United States Patent Application Publication US 2006/0046253 A1 - sequence listing, part 2

SEQ ID NO: 291 - DNA, 1566 bp, Saccharomyces pastorianus
atgacgactcgttcgctccaacttactcgtcctcattatagattattatcctcacctttccgcaaaagctccatcatacaaaggcaaatgtctgcttcaagcccttctccagccaatagctatttgaacatgattactaagtctctacaacataatctacagacatggttccatttcgaaccaaacgaaatcgacatcattgaatcaccctcacatttttacgaccttctaaaatcaaaaatttcaagctcacaaaagaggatctttattgcgtccctttacttagggaaaagtgaaactgaactaattgactgtatatctcaagcattgtccaaaaatcccgatttgaaagtttcctttttgttggatggccttcgaggaaccagggagttgccttccacctgttctgccactttgctatcatctctagcagccaaatatgggtctgaaagagtagattgtcgattatacaagactcctgcttaccacggttggaaaaaaatcgtagtccctaaaaggtttaacgaaggattaggcctgcagcatatgaagatttatgggtttgataatgagataatcctctcaggcgctaacctttccaacgattattttactaacagacaagatagatattatctctttaaatctgcgaatttcgccaattattatttcaaactacaccaacttatcagttctttcagttaccagattgtaaaaccaaaagttgctggcaatgttaacatcatttggcctgactcgaaccccaccattgaaccgatgaaaaataaaagaaagtttttgagggaagcttctcaattacttgagaatttcttacagatttctaaacacaatcaaccgatttctccaccgggccaattttccactatagtctacccaatttctcagttcactccacttttccctaaatataatgacaaatcaaccgaaaaatcaacgatattgtcgttgctatcgaatataaaaaacacctctatttcttggacattcaccgcaggatacttcaatattctcccagaaattaaagctaatctactagccacaccggttactgaagcaaatgtgataacggcatcgccctttgccaacggattttaccaatcgaagggtgtctcatcaaatttacctggtgcctacttatacttatccaaaaaatttctacaagatgtctctagatacaataaagatcaagctattacattacgggaatggcaaaggggtgtagtcaataaacctaacggatggtcatatcacgcaaaaggtatctggatctcgtctcgtgacaacaacgatagcgatagttggaaacccttcataaccgtaataggatcttcaaactacacaagaagagcctactcgttagatttggaatcaaatgctctcattattacaaaagatgaagaattaagaaataaaatgaaaggcgaattaaatgatttactacaatacacgaaacctgtaactttagaagattttaagtcagatccagaaaggcatgttggaactggtgttaaaatagctacttctgtgttgggcaaaaaactctaa

SEQ ID NO: 292 - DNA, 567 bp, Saccharomyces pastorianus
atggattacgacagccctgacccaatgaacggtgcttcaagcaacgccctaattgctaagatgaactcagctaaactactatatcaacactatttggataaagtcactcctcacgccaaacagagatgggctgtattaggtggtctactatgtttatttatggtgcgtattacaatggctgaaggttggtatgtgatttgttatggtttgggtttatttttattgaatcaatttttagcctttttgacaccaaaattcgatatgtccttgcagcaagatgaagaaaacaatgaattagaggctggtgaaaaatcagaggaattccgtccatttatcagaagactacctgaattcaagttctggtacaacagcattagagccaccgtcatttccttagtattatcactattctcgatcttcgatattcccgtattttggccaattctactaatgtacttcgtgctgttattctttttaaccatgagaagacaaattcaacacatgatgaaatacagatacattcctctggatattggtaagaagaagtactcacatccttctaactga

SEQ ID NO: 293 - DNA, 969 bp, Saccharomyces pastorianus
atggatactttgagctcagtacagcctgcttcctatgttggttttgataccatcactaatcagatcgaacatcgtctgttgaagaaaggtttccaattcaatataatggtggttggacaatccggtttaggtaaaagtactttgatcaatacgttatttgcttcacatttgattgattccgccactggtgttgatatctccgctctacctgtctcaaagaccactgaaatgaaaatttccactcatactcttgtagaggatcgtgttcatttaaacattaacgttatagatacgcctggatttggtgactttattgacaactctaaagcttgggaacctattgtgaagtacatcaaagaacaacattctcagtatttacgtaaagaattaacagcccaacgtgagagatttatcgttgatacacgagtccatgctattctttattttttacaacctaacggaaaggaattaagtcgccttgatgtcgaagctttgaaaagactgacagaaatagcaaatgttatacctgttattggtaaatcagatacattaactttagatgaaagggcagagtttagagaactcattcaaaatgagtttgagaaatataattttagaatttatccttatgattcagaggaacttactgacgaagaattggaactaaacagaagtgtcagatctataatcccatttgctgttgttggttctgaaaacgaaattgaaataaatggtgaaacttttagaggaagaaaaacccgttggagtgcaattaatgtcgaagacatcaatcaatgtgattttgtgtatttgagagagttcttgatccgtactcatctacaagatttgattgaaacaacttcttacatacattatgaagggttcagggcaagacaattaattgctttgaaagaaaacgccaatagccgttcctcagcccacatgtccagtaacgccgttcaacgttaa

SEQ ID NO: 294 - DNA, 552 bp, Saccharomyces pastorianus
atgagcacattgatatttggtaaacacttggcgctttacaaaattgtacctgccaacgtaatcggatggttaacgcctttggggaaccctccacttctggctcctagccaaaaaccactaggatctattcatgaatggttgagaaaaaagctactaggagatggtaaaggtgctgaggacaaggatttcttctccaataatggtatattgttggcagttcctaagaaaaaagtatcgcaccaaaagaaaagacaaaagctttatggcccaggtaagaagcaattgaagatgattcatcacctaaacaagtgtccatcgtgtggccattataagagagccaatactctgtgcatgtactgtgtagggcagatacgtcatatatggaaaacacacactgctaaggaagaaataaaaccaagacaagaggaggacctttcagaattagatcaaagggtcttataccctggtaaaaaggaaaccaaatatgccaaggatttgaaagataaggataaatacctggaacgccgtgttcgaacgttaaagaaggaatag

SEQ ID NO: 295 - DNA, 744 bp, Saccharomyces pastorianus
atggttaagattgcaattatcacttactctacctatggacacatagacgttttggcgcaagccgttaagaagggtgttgaagcagctggtggtaaagcagatatatacagggtcgaagaaactttgcctgatgaagtcctgactcaaatgaacgcacctgaaaagcctgatgacattcctgtggctactgaagagacattgatcgagtacgatgccttcttgttcggtgttccaactagatttggtaatttgcctgctcaatggtctgccttttgggataaaaccggcgggttatgggctaagggctctttgagcggtaaagcagccggtgttttcgtcagtacttccacttacggtggtggccaagaaagtaccgttaaagcctgtttgtcatatctagctcatcacggtattatctttttaccattaggctacaagaactccttcgccgaattggcaagtatagaagaagttcatggtggctctccatggggtgctggtactttggctggtcctgatggttcaagaactgcttctccattggaattgagaattgctgaaattcaaggtaagacattctatgaaactacaaggaaacttttccctgtaaaggaggccaagccatctactgaaaagaaggcaactgcctctgacgctgctaaaagacaaaccaaacctgctgctgctgcaactgcagaaaagaaggaagataaagggttgttgtcttgctgcactattatgtaa

SEQ ID NO: 296 - DNA, 1383 bp, Saccharomyces pastorianus
atgacagttccttatttaaattcaggcagaaatgttgcatcttacttacaaacacaatcacatcaagaaaagactttgaaggagagattcagtgaaatctacccctctcatgctcaagacgtaaaacagttcgtcaaggagcacgggaaaacaaaaattagtgatgttctactagagcaagtatacggtggtatgagaggtgttccaggaagcgtatgggaaggttcagaattggatgcagaagaaggtattcgtttcagaggccgtacgattgctgacattcaaaaggaattaccaaaggcaaggggaagctcacaacctctaccagaggctttattttggttattattgaccggtgaagttcctactcaagcgcaagtggaaaatttatccgctgacctaatgtctagatcagaattgcctcatcatgtcgtacagcttttagataatttaccaaaggacttgcatccaatggctcaattatcgatagcagtgaccgccttggaaagtgaatccaaatttgccaaggcttatgctcaaggtatctccaagcaagactattggagttacacttttgaagattcattagatttgttgggtaaactaccagttattgctgctaaaatttatcgtaacgtgtttaaagacggcaagataggcgaagtggacccaaacgctgattatggtaagaacttagtcaacctgatcggctcaaaagatgaagattttgtggatttaatgagattgtatttgaccattcactcagatcatgaaggtggtaacgtatctgcccatacatctcacctagtgggatctgcattgtcctctccttatttgtcccttgcatcgggtttaaatgggttggctggtccattacacggacgtgctaaccaagaagtcctagaatggttatttgcactcaaagaagaagtcaatgatgactactctaaagaaactattgaaaaatatttatgggacaccctgaattcaggtagagtcattcctggttacggccatgccgtgctaaggaaaacagaccctcgttacatggctcaacgtgaatttgctttggaccatttcccagattacgagctatttaagttggtctcatcgatatttgaagtagcaccagccgtgttaaccgaacacggtaagactaagaacccatggccaaacgtggatgcccattcaggtgtcctgttacaatattacggcttaaaggaatcgtcattctataccgttttatttggggtttcaagagcgtttggtattctagctcaattgattaccgacagagctataggtgcttcaattgaaagacctaaatcatactctactgaaaaatacaaagaattagtcaagaacgttgaaagtaaactataa

SEQ ID NO: 297 - DNA, 1845 bp, Saccharomyces pastorianus
atgactgatatgaatgatagtagttttgctattcctcagcaaactccaaggaaacatgtactatcttctaaggttatgcaactttttagaagtggctcgaagtcatccaggcaagtaaagccctcatcgaacactcagccgccctctaatgtaaacacaaatgtttcatcggcgtctaaatcagccaagtttggtttacataccccaacttctgctaccactagagtagccaatgctgctgctaacgttactaacgctgctgctgtgagtaaatctggaatgtatatgcccgagtgttaccaatccacatcaccatcccactccagttcgtctgcatcgttgaataatcaaatcgatatcaatacctctaaatcctcatctgccacctctttaacgtcatcagtatcagccttgtctttatcacccgcatcagccataaatactagctccaagagcttgagccccaaattttcccaccatagtaataacgctgttaatacgcctgcacctacgccaactgcttcaagtattaatagtaacgttaataaaataaccaataccagtggacctttctgtggtagatttctcgtgcataaagatggtactcacgaacactatttgaaaaatgccaaaagacaagaaaagctatccacgatgatcaaaaatatggttggtgcgagcaaactacgtggcgaagcaaaatctgccgttcctgatataataaaggacccaagtacttctgtaaacactaccaagaatccacctacattatttgcaggttttatgaaacaggtcgtagatatggatgatgaatacccagaaggcgcacccataagtggcgccttcaatggttctgaaaagaacttatacaagtcaggtttaaacgaatcaagcgggaaagtggcggccctttcatccaataatgtacccgctaccacgccaattaaaaaggatacacaatgttttgctgaaaaatatggtcgttgccaagaagtccttggtaaaggtgcgtttggtgtagtgagaatctgtcaaaagaaaaacgtttcgtcacaagatggtaataaaggtgaaaagctttatgctgtaaaagaatttaaacgtaaggcgtccgaatctgtggaaaaatactctaagagattaacctctgagttttgtatctcctcgtcattacatcacacaaatatcgtcaccacattagatcttttccaggatgctaagggggagtattgtgaagtaatggaatactgtgcgggcggcgatttatttactttggtcattgccgcaggaaagttggaatacatggaagctgattgttttttcaagcaactgataagaggtgttgtctatatgcacgaaatgggtgtttgccacagggatttgaaacctgaaaatttattattaacccatgatggtatgttgaaaataaccgattttggtaacagtgaatgtttcaagatggcatgggaaaaaaacatccatttaagtggaggtgtttgtggttcgtctccatacattgccccggaagaatatatcaaagaggaattcgatccaagacccgtggatatatgggcatgtggtgttatctatatggcaatgagaaccggcagacagctatggagctctgctgaaaaggatgacccattttatctgaattacctaaaggggcgtaaggaaaagggtggttatgaaccaattgaaagtttgaaaagagccagatgtaggaatgtgatatattcgatgttagatcctgttccgtatagaaggatcaacgggaaacaaattctaaacagtgaatggggtagagaaataaaaagctgtcacaatggacacgcgttgaaataa

SEQ ID NO: 298 - DNA, 798 bp, Saccharomyces pastorianus
atgagttgggaaggtttcaaaaaggccattaacagggctggccacagtgtgatcattaagaacgttgataagaccattgataaagagtatgatatggaagaacgtcgttataaggtgcttcaaagggccggcgaatcgttacaaaaggaagcaaagggcttcttggactctttaagagctgtgacagcatcacagactactatcgctgaagtcatctctaacctttacgatgattcaaagtatgttgctggtggtggatataacgttggtaactactatttgcaatgtgttcaagactttgacagtgaaacggtgaagcagctagacggacccttaagagagactgtgctggacccaataacaaagttctcaacatacttcaaagaaattgaggaggctataaaaaagagagatcataagaagcaagattttgatgctgcgaaggcaaaggttcgtagattagtagacaagcctgctaaagatgcttccaagttaccaagagctgagaaggaattgagtttagccaaagacatttatgaaaatctaaataatcaattgaagaccgaactaccacaattagtttcattgagggtaccttatttcgacccaagttttgaagctttaattaagattcaattaaggttttgcaccgacggttacactcgtttggcacaaattcaacaatatctagatcaacagtcaagagacgattatgctaatgggttattagacactaagattgagcaactattggggcaaatgacaagcttagacatttgtgctcttggaataaaatga

SEQ ID NO: 299 - DNA, 852 bp, Saccharomyces pastorianus
atgtcagacaaggaacaaatgagcggaaacaccgatttggaaaatgctccaaccgggttctacagctctcacgaagaaggtgctcctggcggcgtggaggatgaacgtccatctcacgattcattgggcaagatttacacagggggcgacgacaacgaatatatctatattgggcgccaaaagtttttgaagactgacctgtatgaagcctttggtggtactttgaaccctggtttggctcctccttcagttcataaatttgccaatcctgctcccttgggtctttctgcgttcgctttgactacttttgtgctatcaatgttcaacgcgagagctcaaggcatcactgtccccaacgttgtcgttggtcttgccatgttttacggtggtctagtgcaacttattgctggtatttgggaaatcgccttggagaacacttttggtggtaccgcgctatgttcctttggcgggttctggttaagttttgctgctatttacatcccttggttcggtatcctggacgcttataaagatagtgctgatgacttgaataatgcattaggattttatttactgggatggtgtattttcactttcggtttggctgtctgtactatgaaatccactatcatgttctttgcgttgttcttcttattggcggttacctttttgttgctgtctattggtcactttgtcggtaaagtcggtgtaacaagggccggtggtgtacttggagttatcgtcgccttcatcgcttggtataatgcatatgcaggtgtggctacaaagcagaactcatatgtactagctcgcccaattccattgccatccactgaaagagtgatattctaa

SEQ ID NO: 300 - DNA, 3162 bp, Saccharomyces pastorianus
atgaaaagttatcgacattatatctattatactgtgatatcgcttctgttattgtgcagctccgtttcattcgcaaaacagggagagactccgttcttcaaagacgctataccagaaagatcgcgcccctctgcaccagataagggcaatgatacgtgcccgccatgtttcaattgtatgttgccaattttccagtgtaaacaattttctgaatgtgattcatacaccggcagatgtgaatgtatagaagggtttgcaggtgatgactgttctctgcctctgtgtggtggtctctcaccggatgagagcggtaataaggatcgtcctgtaagagcgcagaatgatacctgtcattgtaacgatggatggggtggaatcaattgtgacgtttgccaagacgattttgtttgtgatgcattcatgcccgattccagtatcaaggggacttgttataagaacggtatgatcataaacaaagtcttttcaggatgtgatgtgactaatgagaaaattctacaaattttaaacggcaaaattccacaaattacatttgcttgtgataaacccaatcaggagtgtaatttccagttttggatagaccaattagaaagtttttactgtggattgaacgattgtgcttttgagtacgacttagaccataatacctctcattataaatgtagcgaggttcaatgtaaatgtgttcccgatacaatgttgtgtggtgctaaggggtctattgatatctcagagtttctaacggagactataagaggccctggggatttcagctgtgatttagaaacaaggcagtgtaaattcagcgagccttccatgaatgatttgatcttaactatttttggtgacccttacatcactctgaaatgtgagtctggtgaatgtgttcattacagtgaaattccaggttataagtctccttcgaaggacccagcagtgtcatggcagggaagattggtactggctttgactgctgtgatggttttggcactctttacgtttgccactttttacatctccaaatcgccattatttagaaatggagcgggatcatcaaaatcccctattcgtttgccagacgaggatgcaatgaataattttttgcaaaatgaagatgatacattggcaacattaagttttgaaaacatcacatacagtgtaccctcgataaattccaatggctttgaaaaaacagtactgaatgaaatcagtggtatcgttaaaccgggccaaattttggctattatgggtggttccggtgcaggtaagacaactttgttagatattctagcaatgaaaaggaagacgggccatgtctccggtagcattaaagttaacggtactagtatggaccgtaaagccttctctaagataaccggattcgtggaccaagacaacttcttattacctacactaactgtctatgaaactgtcctgaatagtgcattactgagattgcccaaagtgttatcctttgaagccaagaaggcgcgcgtttataaagtgttggaagagctcagaatcattgatatcaaagaccgtattatcgggaacgaatttgatcgtggtatcagtggaggtgagaaacgtcgtgtttccattgcatgtgaactggtgacgtctccattggtattatttttggatgaacccacgtctgggttagatgcgagtaacgctaataatgttattgaatgcctagtgagactatccagcgactataacagaactttggtattatccattcatcagccaagatcaaacatattttatttatttgacaaattggttttattaagtaaaggtgaaatggtatactcaggaaactctaagaaagtctcggaatttttgagaaatgaaggatacgcttgtcctgataattacaacatcgcagattatttgatcgatattacttttgaaaccactccccaggggaagagaagaagaatacgaaatatctcggatttagaagccggcgccaatgttaacgataatgttaacgataatgataacatcattcatcaagcaacgttcactaacagcgacggtaccacacagagagaatgggctcatctcgcagcccatagagacgaaatcagaacattgctgagagaggatgaggatgaagaaggagccgacggaacacgaggcaccaccgagatcgatttgaataccaagatattacacgataaatatagagatagcgtttatttcgccgagctttcacaagagattgaagatgtcatgagtgaagcggacgaaaacagcaacgttttgaacggagatttgcccacgggtcaagaatctgctagtttcttacaacagttatcgatattaaattcaaggagtttcaaaaatatgtataggaaccctaagcttttattggggaactacgtcttaacgattctactaagtttgttcttaggaacgttatactacaacgtctctaacgatatcagtggtttccagaatagaatggggttattcttcttcatattgacctactttggcttcgttacattcacgggcctgagctcatttgctctggagagaattattttcatcaaggaaagatctaataattactattcgccatttgcatactacatgagcaagataatgagtgaagtggtgcccttacgagtggtgcctcccatactgttatcgttaattgtgtatccgatgacaggtctcaacatgaaagacaatgcctttttcaagtgtatcgggatacttatattgttcaacttgggcatatcactggagatcttgaccatcggaataatattcgaagacttgaataattccatcatactaagtgtactggtgctcttgggctcactactatttagcggattatttatcaacaccagtaacattaccaatgtagcgttcaagtacctgaaaaacttctccgtgttttactacgcctacgaatccctattgatcaacgaagtcaagacattaatgttaaaggagaggaagtacggcttgaacatcgaggttcccggcgccactatcctgaccacgttcggatttgtcgtccaaaacctggtctttgacatcaagatcctggctttgttcaatgtcgtgtttctaataacggggtatttagcccttaaatggatagtcgtggaacagaaatag

SEQ ID NO: 301 - DNA, 648 bp, Saccharomyces pastorianus
atgagcagcaccaccgataaactactccaaaaacacgattctcttttaaaaagaactacagaacataagttcaccaaggaactgtgttcaggtactttaaatgatcgtagtttgtacatctatttaacacaagatctcctgtttttcgagaccggtttaagattgatatgtaagacgacttctttagcgccaactaccaatgcattgattaccttagccaaaaaaattggtttttttgctaacgatgaaaattcatacttccatgattgtttggaattattagcaccatccctgagtaaggaagaaagagctaactttgacaacaagattattcctggtatcgatacttatattaagtttttagaagatttcacaaaggacagctcagttacatgggcatccttaataacctacttatggatttgtgaagagagttattggatatgggctcgtgacactccaagagctccaggcttgcactggaaacatcaaaaatggatcgatttacatgatggtgagcactttcaagtctggtgcgaatttttaaaagctgaggtcgataagttttccgttgaagaagttgaaagcgtgtttacaagggtcttacaattagagtttcagttttttgaaacttgttacaacgcttag

SEQ ID NO: 302 - DNA, 267 bp, Saccharomyces pastorianus
atggacgcactaaagctgtcggattttattggaagcaccttaatagtctctcttgcggaagaccgtattttaattggaagcttagttgctgtagacgcccaaatgaatttgctactggatcatgttgaggagcgtattggctccggaagccgtatgatgggcttggtcagcgttcctaggcgttcagtacaatctataaaaatcaccaaacctatgttgcgtgacctcgccgcgaacaaatttgaattgatgggtaatattgtttag

SEQ ID NO: 303 - DNA, 990 bp, Saccharomyces pastorianus
atgaacaatacgctttcaagccttttaaatcgtaacgaggcattgggacttaaccctccccatgggctagacatgcatattaccaaaagaggctcagactggttatgggccgtgtttgccttattcgcccttattttgctatgttacattgtaatgttcttcattgcagaggccaagggttctagattgaccagatatgctttagctcctgcgtttttgattgcattttttgaattttttgcttatttcacgtatgcctccgatttaggttggaccggtgttcaagcggaattcaaccatgtcaaggttgacaaatctattactggtgaagttcccggcgttagacaaatcttctactcaaagtacatcgcatggtttttgtcatggccatgccttttgtttttaactgaattaactgctggcaccactggtgagactgaaaatatctcggctttggatgtggttcattcgttattgattcaaatcgtgggtaccctattctggatcatttcattattggtcggttcgttaatcaagtccacctataaatggggttactatactatcggtgccctagctatgctagttacacaaggtgtactgtgccaacgtcaattcttcaatttaaagactagagggttcaacgcggttatgttgtgtaccagtgttgtaatcgtgtggttgtactttatatgctggggtctaagtgagggtggtaaccgtattcaaccagatggtgaagctgttttttacggtgtcttagatctatgtctatttgcaatttatccatgttacttagtaatcatgatctgccgtactggcaggttccccaaaatctctttgtccggcggattcccccatcatcatcatgctgccgacgatgtggaagatgaggttcctgaagcaaaagatgcctccccagaaagcccaagagcatctggagagactgctatccatgagccagaacaaatcgtcgacgatgctgcttag

SEQ ID NO: 304 - DNA, 1476 bp, Saccharomyces pastorianus
atgtttcgtgctcgatacccgtttaagagcattagatcttactcttctctgacggttaagtcgttatatgagcaactacatcaacctcgtcatgactccatttcagttgatggatggatcaagtctataagattattaaaacgtatagcgtttttagacttacaagatggtacctccgttaacccattgagaatagtggttccgttagcaaacgctgattatgtacactttttgaaaaatctgaaaactggccaaacattgtctatttccaacgctatctggcaggatacgcccagcagagaacagccttttgagctgcaaataaaagaccccatagaatcgatcaaaatcataggtcctgtctcagaaaactatcccttgcagaaaaaattccagactttaccatttctaaggtctttacccacactaaaatacaaaacctcttatttgagcgcaattttgaggttgagatcatttgtagaattgcagttcatgcatttttttcaggaaatccatttcactaaagtttccccaccaatactaacttcaaacgactgtgaaggtgctggggagttgttccaagtttccaccaatcaattgtcgtctccatcttcgtattttggtaaaccaacttatttgactgtgtctacacaattgcacttagaaatcttggccttatcgctatcaagatgttggacgttatctccttgcttcagagctgaaagaagtgatactccgagacatctctccgaattttggatgcttgaagtggaaatgtgttttattgatagtattaacgaactaacatcgtttgtagagactacaatgaagacagtaatccagtcttgtttggataaccagaaggagcttttgccaaagcagtttatctctttgaaagaagatgatgcactatctacatcactagaccaagaaaggcaagatatcataacacgttggcaaactttggccagtgaaaaatggcaaactataacgtatacgcaggctatcgaaatcctcaaaaaaaactacaacgaggttccgctttttaaatacgagccaatctggggacagcctttgcaaactgaacacgagaaatggttagccggcgaatacttcaaatcacctgttttcgttactgactacccacgtgtttgcaaagccttttacatgaaacaaaactctactcccgacaatactgtggcatgtttcgatttactggttccgggaatgggtgaaatcatcggcggaagtctaagagaagatgattatgacaagctatgtaaagaaatgaaggaacgcggtatgaataaatctggtgaattggattggtacgtttccctgagaaaagaaggtagcgcaccacatggtggatttggactgggatttgagagatttatctcatatttgtatggaaaccacaacataagggatgctatacctttccatagaacagccgcgggctccataaacttctga

SEQ ID NO: 305 - DNA, 123 bp, Saccharomyces pastorianus
atgactttaccaggtggtgttattttagttttcattctggtcggtttggcttgtatcattattatctctaccattatctacaataaatggaaagctagacaacaaggtttgcaaagattttaa

SEQ ID NO: 306 - DNA, 2262 bp, Saccharomyces pastorianus
atggtacttgaaaacgatttagaatcgctggataatgggttggaagacattaatgaagatctatttcgtgacgattatttattggatgaagatgcttcaggatcgggattacaatccgcatggactagaatgaagtactggttttatagaaataaattgaagtggacgaacaatggcatagtgattaacgaggggaaagataataggagtaatgccaacctaagaagaggtataccattgtacgaattggatgcaaatggccaacctattgatacaggttttgaggatgagtttgcactcggaacaggatccttttccaaagtaccatggaaattaatacttcgtgtgttgtttggcttactggtatttacagtctttcttatccttgtgatcaatatcacaaagtccaatcgtaccataaaggttttatcacactttggcaaccctgatttcgatccttacgtaaaatattttaacggtacccacgaatttttccccttgaccatagtgatttcgttagatggtttccacccatcactgatatccaaaaggaatacgccgtttttgcatagtttatatacactggattatgacaccggtatgaatatcacatccacaccattcatgattccaagtttccccacggaaaccttccccaatcattggacactggttactggacaatacccgatacatcatggaatagtatccaacgtattctgggattcagatcttagcgaagagtttcacccaggcgtattggatcctcggatatggaatagcaatgttagcgaaccaatttggcaaactgtccaaactgcatttgacagcgatatgtcattcaaagcagctacacatatgtggcctggtagtgacgtgaattatactaaatacaacgaaaagaagttgctacccgaacataagaagcccattgcaatagagagaacgccttattatttcgatgagttcaatgccaaggaatcattaccaaagaagctatccaatatcatgaaatacgtggatatggacgcgttggacgaaagacctcaactaattctcggatatgtaccgaatgtagatgcttttggacataaacacggattccctgcagaatctgattattactacgaagaattcacgaagacattaagcgaagtggatacgtttctacaggggttagttgagtctttacgagaacggaatataacagacttcactaatttagtcattgtaagcgaccacggtatgagcaatattatggttccctcaaatgtagttgtctgggaagatatactgaacgagaaattaaggaaggattacgtatcgcatgcatatttggagggcccaatgatggccatatcattgaaggattccaccgaaattaacgaagtttaccatgaattaaagtcatcgatagatgaagaaaagtacaaagtatatgtgaacgggaactttccggaagagtggaatttcaatgatagaagaaaccatcacatggcctcgatctggatcgtgcccgaacccggatatgcagtgatgaagaaagcacagctgaagaaagcgggaaaagatgaccataaagataaaaacgaagaacaagtgtttacgatcggatcgcacggctacaataatagtgccgtcgatatgaggtcgatatttattggcatggggccgtatttcccgcagggttacatcgaaccattccaaaatacagagatatacgatttattatgtgacatctgtggtgtggcagaaaaggatagaaactccaacgacggctccggggtggtcatgcagcaactccgcgagcctgagaacagcgacgaagtggagattactgacgatttcgagtatttgagtagcgtgtttggtaaagccagtacatacaacataatctggggcgggtaccctgacgaggaagaatatgaagcacaggaagatgatgaagacaatggagacgccgaagacaatgccaatgacaatgacaatgacaatgatgacgacaatgataacgacgccaaagaaatagccgccgtgtccacttcgtcattaacgactacactaccgatgacgacttccacgccatcgacgactagcaccctactgagcggcacactaccgtcatcgagaggcagcagtatacgagctagcgctaccaccagtgcagcagggaatttgttccaagagattatcagcgatgcaaaggaactcatcgatgatataatcgaaggtatcgatgacttaatcgattccaatacgtaa

SEQ ID NO: 307 - DNA, 630 bp, Saccharomyces pastorianus
atggaatattcttccatcacctcttcaaaccccaaacatgattttcaaagaaagatcgctcttttaggtgctagaaatgttggtaaaacaactttaaccgttcgcttcgttgaatcgcggtttgttgagtcctattatcctactattgaaaatgaattcactaaaatcatttcttataagaatcatgactgcactttagagattcttgacactgcaggccaagatgaaggctctctgttaagtatgaaatccttgacaggtgtacgaggcatattattatgctacagtatagttaatcgtgctagctttgatcttattcccgttctgtgggacaagatagtggatcatatgggtagggacgatctgccggtaatacttgtgggcaccaagagtgatttggaaagagatgcaaaagatgaaagtaggtgcgtgacaaaagctgagggtgagaaattggcctcaacgataggcagtaaagataagaagaatcaggcaatgttcatagaatgtagtgccgaacaagattataatgttgaagaagcttttactcttgttctaaagcaaatggaacgtgtagaaggaactttaggttttgacggtgaaaataataataagtgcaatattatgtga

SEQ ID NO: 308 - DNA, 2616 bp, Saccharomyces pastorianus
atgtcggaacaaagaaccagatatgcagatagcatattgaccacgaaaaatccttatgaagccactgaaactatcaggatcagactgtcgcaggtcaaattgctaaataaagacttctatctattatttaaggatttatccaacttgaagagaagttatgctcagcaattgagaaaaatagtagcagaaaacgaagatcttactaagatcttaaatgctcagatgcttgaaaacaatgtcttgactccacaggaaatgagtgaattcagatttgagtcattgggagaactgagaaatttgtgggatacagtcattgaagagttgaaaacggacttgaaatcaagtactgaatactatgacactttggataaccaagtcgttcatgaattgaaggagtctgtggagaacaatactagttggagggaaagtaaggacttgcactcgaagctgagcaaaaacgctgcttcaattgaacactatagcaagcatgaaggcaactccagccaattggaagaagcaagaagacaatgggatttacaaagcccatacctgttcgaattgttcgaaactattgattataaccgcttagatactttgaaaaactgtatgttgagattccaaaccggtttcagcgattatttattgaacactaccaatgaatgtgaaactgtgatgacaaaatttttggcatttgaacctcaaagtgaaattgaccgttttgccagagatgcaagccaatataacttcaagccgtcctccacttctaaatcagcgattatgaataacgccccacctgcctctgccgccactgctactcgttcaacttcaggctcagacggtacacccaccttaggcactgaaagggataaaaaatccccacaaaaggagaagcgcaagagtacatttggaaacatcggccatcgccttgcttctgcgtcttcgactcttacccataatgatctcatgaataatgaattttcagactctacaaataataattctttgaaatcgaagaaatcatctcatattttaagatctaaagtgggttcaatttttggtagaaacaaaactaaaaataagagacaacagcaatcttcatcaaactcttacatccaagagaccatcacagaatctccaaataattcttcgactagggtctcttctactgccacttcttctatttatcagaaacaacgtcaacccacatattcatcttcaaaatcaaacaatagaactccagccggcagtactgacactccaccgcttcctccccctgctactcctaataacgtggagctacctgcgtccaccgatccagctcctatttttacaccaacttcagtgccaattacgatgatgcaacagagttcctcacctgccgcacaagaaagtctcccagacgattcttccaaatcggtgctgatatcaatatctcaacctccactacaaccacagtcaaaatctaagcctttaccagttgaacctgcatcccctggtgtttcgattcctgccactactactgatagcctgtcttcggtacaaatggattcgaggcctttgcatattcgtgctcctgctttgccaccttcaaggaagcaaaatgcaattcagaatagagactcgcaactctatgaaacattgcctacgcatggtccaggatctattcctacttcttcttcattatcctccgtacctcaagagcgcccagcttccgtacttgcctaccaaattactggtgacttgaaagaattgaaccctcaagccacaggctcgtcaacctccttagtggggcaatcattgtttcagcactcttctctggaaacatcccacctcggtttgaacgctagtatcgcagaagtgctcaacgcttccttcaaagacggcatgttgcaaagctctcaacttatcggtgaaattgctctgaattacgtgcccaattccgtcatgaatacaccaatacctattggcattaatttaaagattgataatggcgctaattttgagaaagtaatcttaaatcaagcctttatcgagcgtgtggcccctgaagaatttaaagtaaatccatcattcattgattctagaactttaggcgctatcaaatactctataaaggcgccagtcgcccctattgtcatccacccggtttggagatttgagcctcaccaggctagtgttgtactgaccgttaagatgtcgacgagcttacctgaggagatatcgcaaatcacaatagaagatttggttgtttttgtgaacattgacggtgctaacgcaacaagtgctctatcgaaacctcagggttcgttcagtaaagaaaagaagagaataacgtggagattcaaagaaccacttgtcttgcaaagaaatggcgaaggccagagattgatcgcgagatttattacagacaccttagcacatgaatcttccaagggcgtgatcaccaaattcagcattagtgaaacagataacacaatggtgcctcacagtggtgctggtagtggtatttctttgacttgccaggaattggatgaaaacaacccatttgggggtgactggttggatgtaaacacaaagagaactttgaccaccggtaactaccatggtctggcctga

SEQ ID NO: 309 - DNA, 3678 bp, Saccharomyces pastorianus
atgggatatccaccgcctacgcgaaggcttagtgataagaaaagataccattactctaacaatcctaatcgaaggcatctttccggtgtttatccaaaaaacggcttcccaaaaccaattattaatggatttacatcttcccctacagcagaaacttctgcaaacacctccgttagtcctgccactgtaccaccaccaccaccacctccttcaatacctagcacatttggcatcgaagcgcccaggccatcccggtatgatcccggctcagttaataggccttcatcgtcatcttatttgtcaacgaggaagaccggaagtcggtacaatccagaggttgaaaggccctcttcagccggtagttcaacgccggaaaataccaacgcaaataccaccccaaataccaatattgacaccggaaaatcacgctattctcgaaaaaccatgagcagatataaccctcaatcgaacagctcttcaaacatcatgcatttttccccaccaacttcaaacacatcaccattttacgtccccaatggtaattcccggggcagacctagatcgatggatgatcatagtcctgatatagcaaacaaccctgaactgggtagcgtttcattggttaatagcaacagcgctcattcctattactccaggagcaacaaatggagatctgttggaacaccttccagggcgccttttgataaccacgttagtaatacagcaaccaccaacggaactcatcaaagagagcccttttggaaagctaataataatgtactttcaaaatctactcactcacagtcgtcgccttccctttatgatactaaatttcacgagataaataaaatggacaaacccgactctccagttaagattggaggattaaataaagatgaagcaaaagatcttccacatgacgataataaattccaatctgaagaatcagatatcatacgccatgtgtctacaaagcttgatagtttcaaggcacatgaaaacggaagtttagaagaagaaagttcacataaaagagaacctgagataacgaaaacccgccatgagccagaaaaaagaaaagaacacggtagactcgaagacgactttagaaaaccaaaagcaactagtgtggatgtaaaacaagatggattatggacaacgactacaagagctgtcaatacaataggaaaggttaaagaacagaaaaaagaacaaataaacttcatcaagaaagaagaaagctcagaaattagaaactacgaatggatatacgaccctgaagctttgaaaactgatttaacagaactgacacttgagaatgaaaacaagtgttacgaagagccgcttgaaaaagtagaagcatgcatttttccattatcaaagacagaaacaaggttatgggaattaaaaaaccagaggagagacaaaatcatcagtaaacagaagtacttactgaaaaagacggtgaagtctttcacagagtatccattttatgcccaaaacaagcttattcaccggcaagccacaggactcatcttaaccaaaatcatttcaaagatcaaaaagcaggaatatcgaaaaataataagcctaaagcatagctattttggcttacagaagaaatacgaaaaagaatgtgaaattttggccaaattaagtgaaaatttaagaaaggaagagattgaaaataagcgcatagaacatgaattaatggagcagaagagacgtgagggcggtgttgaaattgaaaaagacaaggatttacgcaaaccttcctcgtcctcgtcatctcgtcgcagaaatagagctgatttcgttgacgatgcagaaatggaaaacgtgttacttcagattgacccaaactataagcattatcaggctgctgcaaaaatcccgccactgatattaaatccagttgaaaaatattcttataagttccgtgatgtaaataacttggtaacagacaaaaatcactgggcctctagaatattaaaagacggtgttgatacattttctgaccatgagcattctttatttttggaaggttatttgattcatcccaaaaaatttggtaagatttcacactacatgggtggtctgagaactcctgaggaatgtgttttgcattattatagaaccaaaaaaaccatcaattataagcaactcctcatggataaaaacaaaaaaagaaaaatgtcagcagctgctaagcgccgtaagagaaaagaaagaagcaatgacgaagagcttgaaaatgaccaaggtaaagaagagtctgccggcacagcggataaggaagaaaagagtgaaaactttgtcgaagaaattgtttatcccgttctggtccaaggtcctgaggcggatgctaatctgcaagacaaacccgaaaaactcatcgggaatataaccgaacaggaaagcgaagatgtgacatttaaaccagaagaaactgtacaaactaatgaattgaaaagggtgcatgatgtgattggggacaatgacagaaattttagtattattaaagttaacagcgacttctcattcacggcacccagagaagggatgcaaaacgattattatggggaggagccaagagaactagattttagtttagaaaatgcgctgcaaagaaagaagcacagatccgcaccggaacataagacaagttattggagcgtccgtgaatctcaactttttccagagttgttaaaggaatttggctcccaatggtctttaatatctgaaaaactgggtaccaaatcaactaccatggtaagaaactactaccaaagaaacgctgctcgtaatgggtggaaattaattgttgatgagactgatttgaagcgagacggaacaagttctgaatccgtacaacaatctcagatcatgatacaaccagagcgtccaaatattaatgcttataataacattcctccacaacaaaggcccgccctggggtattttgttggacaaccaacccatggacctagtacatctatatcttctgttgacgggtctatgagaccattcggacctgactttcatcgtgatagcttttctaaagttagtacgcctttaacaactttaccaccaccaagactaccttccatccaattcccacattcagaaatgcctgagcctacggttacagatctgcgcaacagaactttagaccatatcgacacattagccgaagcagcctcatcagtaacaaatagtcagaatttcagtgatgaaagacacgccattggcactaaccacaaatcaacaacgattagtagtttactgaacaatgctgaccgggatgtcaaggttcctttccaaaagacttctaagcagcaagcacacgttgagggtactcctaagttgaataacattgtagtacaagaaataaaacctaacatcactaccccaagatccagttctatttccgcactattgaaccctgttcatgggaatggtcaactgaatccagatgggagaccgttgctaccatttaacaatatcacttctcgtgggcctcctagttttcctttaccccctccgcggactagtacggccattcatgcgcctccaaagttcaatttttccaatgacccattggcggctttggctgcagttgcatcagcaccagatgcaataaatggctttttgtccaagaaggataatgataattag

SEQ ID NO: 310 - DNA, 1044 bp, Saccharomyces pastorianus
  modified_base (1021)..(1021): a, c, g, t, unknown, or other
atgaattcactcgttactcaatatgctgctccgttgttcgagcgttatcctcaacttcatgactacttgccaactttagaacgcccatttttcaatatctcattgtgggagcatttcgatgatatcgtcacgtgtgtgaccaacggtaagtttgttccaagtgaattccagtttatcccaggcgaactgccattgagtacattgcctcctgtgctatacactatcgctgcttattacgtgattattttcggcggtaagtttgcattgagtaagtcgaaaccttttaaattgaacggccttttccaattgcataatttgtttttaacttctctttcattgacactattgattctgatggttgaacaattagtgccaattattgttaagaacgggttatactttgctatttgtaatattggtgcttggactcaaccaatggttacattgtattacctgaactacattgtcaaatttatcgaatttatagacaccttctttttggtgctaaagcataagaaattgacatttttgcatacttatcaccatggtgccactgctttattgtgttacacccaattaatgggtactactgctatctcatgggtcgtcatttcgttgaatcttggtgttcatgtcgttatgtattggtactatttcttagctgccagaggcattagagtttggtggaaggaatgggttaccagatttcaaatcattcagttcgttttggatatcggttttatttatttcgctgtttaccagaaagccgtccacttatatttcccagtcctgccacattgtggtgattgtgttgggtcgactactgctacatttgctggttgtgctattatttcttcatacttggtgctattcatttcattctacgtgaacgtttacaagcgtaaaggtaccaagaccagtagggtcgttaagcgcgcacatggtggtgttgctgccaaagttaacgaatacgttaacgttgacctgaaaaacgttcctactccatcaccatcaccaaaanctcaacacagaagaagaaagtaa

SEQ ID NO: 311 - DNA, 375 bp, Saccharomyces pastorianus
atgaacgtgactgatggaaatgcactactgttcaagtgcggtaagcatggctacatgaatcaaactttctcaccaaatgaagtttataagtgtgggttgcaggaagcgcaacaggtacgtaaagaaaagtacccatcttatgaaattacgtatcaaccatttctggttgatacgcctgcttcaagttcagagacgtttacgtgtggtagcaagggctatacaaatgcaagttacacttcgagagatttttattcctgtggcttttttgaagggaagggtgcagaaactaatgccggcgcacgtatccctacagcttctcattccctcatcaaaatcatgatattcctgatgcttataacttatgccatcgtgtga

SEQ ID NO: 312 - DNA, 1173 bp, Saccharomyces pastorianus
atgttgggactgaaaagctgtttggctatccttattggatatgtcgttgccgtgtgtgctttgttttcaagcaagggaaggaatccgtctttaaataattgggagaagttaaaggatcaaaaatattccactttagataacttcgggctaactggtcactctttgttacagttcttccaggataacttggcaattttaggtttttctgaggagaaagttcatcataaacgctcttctttttattatgatgtttttaaagagtatatcctacgtggtgctaattcaaaaaagtgctcatctgcaaactcagctattgcaaaactgaacaaagatgttaatcctatgccagttcactctcacaatgattactggagaaagctaccgctttttgaaggtctagcgtatggtgcaagaagtactgaagcagacgtgtggaatatagacggaaaagaactagccgtgggccacaacgaagcttctttggacccagtcgaattgacactagataaactatacacgggccctctttcaaaaatattagatgaggtcaattgtcaagattctttttccaatagtaagaacggtgtgttcttcaattcgcctgaaacttcacttttcttttatattgattttaagtccgatgacaatgaactgacttacaaattattgatgcaaaagtatttcaagcctttgatcgactccggctatctaacgtattacgacatgaaaaaggaagaagtttcttggaaccctattacagtaatattaacaggcaattatccaacgtcgctagaggttttagataacggaaatgatgacggctattttaactctaaccaaagatttgcgttcttggatgcaccattattagatttggaacccaaatactctaacctttccgtcactacgactgtatccttcaacgaattaatgagacattgcggttctgatcattggaaggtattgttaagaggccatataggttcggatgagattacttgtgccaagaaggtgattgacgaggcccatgcgttgaagctaacaaccagaatttggggggccccaacctggccttttaacacagttaagaccatttctcaccaaatcttccacgatttgggttctgatttactcaacctggacgatatgttcatggcatcgtcattaatctaa

SEQ ID NO: 313 - DNA, 504 bp, Saccharomyces pastorianus
atgtctaccatcccacccgagatcattaattggacaattttgaacgaaatcatatcgatggatgacgatgattccgatttctctaagagtttaattattcaattcatcgaccaggcacaaaccacttttgcccagatgcaacgacagctggacggcgataaaaatctcacagaactagataacttagggcattttttaaagggctcttctgcagctttaggtttacaaagaatcgcgtgggtttgcgaaagaatccaaaacctgggcagaaaaatggagcatttctttcccaataaggttgaattgatcaatactctaagtaacaaatcggtcattaatggaatcgatatcaacgaggatgacgaagaaatgaagatacaggcggataatacacatgctgattccatatttttgattttgatagctaaggctttgaatcaagctaggttagagttcaaactggcgagaattgaattatcgaaatactataacactgatctatga

SEQ ID NO: 314 - DNA, 111 bp, Saccharomyces pastorianus
atgatctcagatgaacagttgaacaccttggccatcacttttggtgtcctcatgatgactttgattgtcatttaccacgccattgactccaccatgtcctctaagaactga

SEQ ID NO: 315 - DNA, 1842 bp, Saccharomyces pastorianus
atggctgaaggtgtgttccaaggtgctatcggtatcgatttaggtacaacttactcttgtgttgctacttacgaatcctccgttgaaattattgccaacgaacaaggtaacagagtcaccccatctttcgttgctttcactccagaagaaagattgatcggtgatgctgccaagaatcaagctgctttgaacccaagaaacactgtcttcgatgctaagcgtttgattggtagaagattcgacgacgaatctgtccaaaaggatatgaagacttggccattcaaggttatcgacgttgaaggtaacccagtcattgaagtccaatacttggaagaaactaagactttctccccacaagaaatttccgccatggtcttgaccaagatgaaggaaattgctgaagctaagattggtaagaaggttgaaaaggccgtcattaccgtcccagcctactttaacgatgctcaaagacaagctactaaggatgctggttccatttctggtttgaacgttttgcgtatcattaacgaacctactgccgctgctattgcttacggtctaggtgctggtaagtccgaaaaggaaagacatgttatgattttcgatttgggtggtggtactttcgatgtttccttgttgcacattgctggtggtgtctacactgttaaatctacctccggtaacactcatttgggtggtcaagatttcgacaccaacttgttggaacacttcaaggccgaattcaagaagaagaccggtttggacatttccgaagacgctagagctttgagaagattgagaactgctgctgaaagagctaagagaactttgtcttctgtcactcaaaccaccgttgaagtcgactctttgttcgatggtgaagatttcgaatcctctttgactagagctagattcgaagacttgaacgccccaatgttcaagtctactttggaacctgttgaacaagttttgaaggatgctaagattgctaagtctcaaatcgacgaagttgtcttggttggtggttccaccagaattccaaaggtccaaaagttgttatctgacttctttgacggtaagcaattggaaaaatctattaacccagatgaagctgttgcttacggtgctgctgttcaaggtgctatcttgaccggtcaatccacttccgatgaaaccaaggacttgttgttgttggatgttgctccattatccctaggtgttggtatgcaaggtgacattttcggtatcgttgtcccaagaaacaccactgttccaaccatcaagagaagaactttcactaccgtcggtgacaaccaaaccaccgtgcaattcccagtctaccaaggtgaacgtgttaactgtaaagaaaacactttgttgggtgaattcgacctaagaggtatcccaatgatgccagctggtgaaccagtcttggaagctatcttcgaagttgatgccaacggtatcttgaaggttactgccgtcgaaaagtccactggtaagtcttctaacattaccatctccaacgctgtcggtagattatcttctgatgaaattgaaaagatggtcaaccaagccgaagaattcaaggctgctgatgaagctttcgccaagaagcacgaagccagacaaagattggaatcttacgttgcttccatcgaacaaaacgtcactgacccaatcttgtcctccaagttgaagagaggctccaagtccaagatcgaagccgctttatctgacgctatggccgctttgcaaatcgaagacgcttctactgatgaattgagaaaggctgaagttggtttgaagagagttgtcaccaaggccatgtcttctcgttaa

SEQ ID NO: 316 - DNA, 1761 bp, Saccharomyces pastorianus
atgctttccgaaaatacaactatattgatggccaatggcgaaattaaagacatcgctaatgtcaccgctaattcctacgttatgtgcgaagatggttcagccgcccgcgttataagcgtcacacaaggttgtcaaaaaatctacaatattcagcaaaaaaccaagcatagagcttttgaaggcgaacctggtagattggaccctagacgtagaactatttaccaacgcctgaacttgcaatgtaccgcaggtcataaactatctgtcagggttcctactaaaccactgttagagaaaagtggtagaagtgccacgaaatacaaagtgagatggagaaacttacaacaatgtcagacacttgacggaagaataataacaattccaaaaaatcaccacaaaacgtttccaatgactgtcgaaggtgaatttgccgcgaagcgtttcatcgaagaaatggagcttttgaaaggcgaatactttaactttgacatcgaagtccgagatttggactaccttgatgctcagttgagaatttcaagctgtattagattcagtccggttattgcagggaatggtgttttatctaaatttctcaccggacgtaatgacctagtgactcccgctgtaaaaagtatggcttggatgcttggtttatggctaggtgacggtacaacaaaagaacccgagatctctgtagatagtttggaccccaaactaatggaaagtctacgagaacaagccaaaatttggggcctctaccttacagtgtgtgatgaccatgttccgctgcgtgccaaacacgtgaggctacattatggggatgggccagatgaaaataggaagaccaagaatttaaggaagaataatccattttggaacgccgtcacaaaattgaagtttaaaagggagctcgatggtgagaagcaaatcccagagttcatgtacagcgagcatgtagaggtccgtgaagcatttttggcaggtttaatcgattcagatggatacgtcgtgaaaaagggcgaaggccctgaatcttacaaaatagcaattcaaactgtttattcatcaattatggacggggttgttcatatttcaagatctcttggaatgtccgctactgtgacgactagatccgctagagaagaaattattgagggaaggaaagttcaatgccaattcacatatgactgtaatgttgctggaggaacaacattacaaaacgttttatcatattgtcgaagtggccataaaactagagaaattcccccaattgtgaaaagagaaccagtttatttcgggttcacggacgattttcaaggtgagagtacagtatacggacttcacatagaggggcataaaagttacttattaggcaataaaatagaagtcaagtcttgtggaggctattgtgaaggagaacaacctaaattatcccagaagaaaaacttgaaacactgtattgcgtgtcctagaaagggcattaaatacttttataaagattggagcggtaaaaaccgagtgtgtgctagatgttacggaagatacaaatttagtggccatcactgtataaactgcaaatatgtaccagaagcacgtgaggtgaaaaaggcgaaagataaaggtgaaaaattgggcataacaccagaaggcctgccgtttaaaggaccagaatgtttacgatgtggggggattttgcaatttgacgctgttcgtggaccccataagagttgtgggacaaatatcggggtacgggtttgttga

SEQ ID NO: 317 - DNA, 1074 bp, Saccharomyces pastorianus
atgtcagattggaaagtggacccagatacccgcagacgtctcttgcagctgcaaaagatcggggcgaacaagaaatgcgtagattgtggtgcgccaaatccacaatgggcaacgcctaaatttggggcttttatctgtctcgaatgtgccggtatccacagaggtcttggcgtccatatctcgtttgtcagatctattaccatggaccagtttaagctagaagagctggttcgcatggagaaaggtggtaatgagcccttgactgaatggttcaaatcccatggtatcgacttgagtttaccacaaaaagtgaagtacgataatcctgtagctgaggattacaaggaaaaattaacctgtctttgcgaagataggccatttgaagaacgtgagcatccaggtttcgatgcttccaaattatcagccactgctcccgctgctagtactggcgcgtcaggtacagttcaaagtcgagagggcacacctttggaaaaccgtcgatcggcaacaccggcaaactctgccaatacttccaacctccaaaaggagaaaaacgaagtttatttcgctgatttgggtatgaagaaccagtctaagccggatcatttacccccttctcaaggtggtaaataccaaggtttcggcagcacaccggtaaatcctccacaggaacaacaagcgggttctgccaacactttgagcctggaaaactttcaagccgatccattgggaacattaactaagggatggggccttttctccagcgctgtttccaagtcatttgaggatgtgaatgaaaccgtaatcaagccccatgttcaacaatggcagtctggtgaattgtcggaagagacaaagagagctgccgcccaatttggccaaaaatttcaagaaaccagtaactatggtttccaagcttttagtaactttaccaaaaacttccaagaccagcgtaatcctgccgcgcaaagcaactctgctgcaggcgtggattcttctcgtgcaggttaccaaaagatcagtaataccgataagaaaaacgaccaagacgaagacaagtgggacgaattttaa

SEQ ID NO: 318 - DNA, 1656 bp, Saccharomyces pastorianus
atgagcgctacttcaacaccgccaatgaatctgtttcgcagaaagaaggaacatagacgcgggatcacatacacaatgttgttatgtgggccagcaggaacagggaagagttcatttgctaataatttgctggaaactaacatttttccacacaagtatcagtatgctgaaacaggcgccaatattagctccaaccccgatgtgaaagtcgttgcccctaccaaagtcgtctcattcaactccaagaatgggattccatcatatatctccgaattcgattcgatgagagccagtctggaacccggtattactatcacttccacgtcactggagcttggaggcaacaaagatcaaggaaaacaggaaacgaatgaagacgacaccgtcttcttcaacttgatcatgacacatggtgtcggtgaaaatttggacgatacgctatgttttgaagaggttacctcatatttagagcaacaatttgatatcgttcttgctgaagagactagaatcaaaagaaacccaaggttcgaggacaccagggttcatgtcgcgttgtatttcattgaacctacgggacatggtttgagagaaattgatgtggagctcatgaaaagcatttctaaatatacaaatgtactaccaataatatctagagcggactcgttcaccaaggaagaactgattcaatttaggaaaggcattatgttagatttggaaaaattcaacgttccgattttcaaatttgaagttgatcctgaagacgatgatttagaatccatcgaggaaaaccaagcattggcatcactgcaaccatttgccattataacctcggataccaaaaacagtgagggaaagtacgtaagggagtacccatggggggtaatatcaatcgatgatagtaaaatttcggacttaaaagttttgaaaaacgtcttgtttggttctcatctacaggaattcaaagacactacacagaatttactttatgaaaattaccgttctgaaaaattgtcatccgtggccaacactgaagagattggccctagttctacaaagagacaatccaatgctccaagtttaagcaactttgcatctttaataaatactggacagttcaactcttctcaaaccttagccaacaatttgagaccagacacaccaagaaaccaagttagtgaaagattcaatgaaaatgaatatgaaggcaatcgtgaacatgattctacgacgaatgaacaagaaatgtcacctgttagacagatgggccaggagattaaacaagaaaatgaaaatttgataagatcgatcaaatccgaatcatcgccaaagtttatgaactctccagatttaccagaacggaccaaattaagaaacatttcagaaactgtaccatatgttttgagacatgaaaggatcttagccagacaacaaaaattagaagaattagaagctcaatcggcaaaggaattacaaaaaagaatccaagaattagaaaagaaggcacatgaattgaaactgagagaaaggttaatcaaccaaaataaaataaatgattcctcatcctcaatcaattctctacaacaaagcacaagaagccaaattaagaaaggtgacacatataccgatttagcatctatcgtatctggtagggactga

SEQ ID NO: 319 - DNA, 1965 bp, Saccharomyces pastorianus
atgtcgttagtacacggtcaaacaaatctaaatgaatctgaatttcttatagaaagggcgtttagctcaagttcagaaaatgttgcattttctaaggaggcaacgtaccctatgcctaatgcatatagtttttcaacagctaggagtaacagcgagactaacatcaaaagagagagtccacagggtttggtcggagaacctcatatgacttctatgcttcacaatttttccatgtccacggcgcatgggaatgggaacggaaatgatagcagctctttggcgccaaatgatattgacgttggcccttactgcctattattaaggaacttaccgaaggacatcaccttaagagaatgctattgtatattctcgttggctacgggagtatcgagtatagaactaagaaaggataacaaagaaccctccaatgaaaatgaaaaagttattgtggttaaatttggatccttaccgttagttacacattatgctaatattttgaattcgaaatctgaaattttcggacctagctttccattcagatctcatattgatgtggtgaatgaacaaacgcaactgccagtgagttttcaagaacatgctacagctagcacaacaaacagctcacccaggaattaccaattatcttctagtgcgcaaaacgaaatccaaactcaaactttcaatactgtatcacacgcggcatctaattcttctcctctaggaccggcgtcagccaaaataaagccctcactactttctgaaagatccttgcgtttttcattcaatgatccttttgggctagaaacaggttctcagaggaaggaatcagtgcctttcctgcgaaacagtatctcacagcacgatttatccactgtaaccaccactccattaccagcaggaattccgccctcaaaagatgccggtaaatccctattgctattagaaaaagatgaaataaatgaaagcatttggaatggtgatgaattggctaatgatgttggtggttcttcattcagtgcatctttacaacagcctccgatgtcttcaacacctgtaatggagtggaattcttcctcgtctactaatattcctgtttttcaattatctggccaagacaatcgtcaatctgctctgttacagccatcgcatcattctatcagccagaatgttccacatattcaatcacaacccaatttgaacaattcaggagtaatacgttctacagcctctctaccacagtatcatatgttgaatcaaatgagtggtactaccaatgcgcataacgtgcaacagcatctttcaaatgttccatctaatttagagcttaacttgcaaaccgaacataaccactcacaatcttctgctcctaatggttcttcaattttcaataaccaaaaaataaatcaaggttttttaacaagtgaccaagatactactggactaccacaacagaaagaatcatcttctactgctgcttctgcttctgcttctgttttcccgaagaataatgaaacaaatgtggcaggttccacaactatatcacaggctgacttgtcattattggctaaagtgcctccaccggctaaccctgcggaccaaaatcccccatgtaatactttatatgtgggtaatttaccgcctgatgcaacggaacaagaattaaggcaattgttttctaaccaacagggattccgcaggttatctttcaggaataaaatgaacacgcacggccatggcaacggtcatggacatggtccaatttgtttcgtggaatttgaagatgtcagctttgccactagggcattagctgaattatatggtagtcaattgcctcatcctcgtccttcattaaataacaaaggaggtattagattaagtttttccaaaaaccccttaggtgtgagaggttcaaacagcaggagcaaaactggatatagtttcaatggaagttacggaaaatcatga

SEQ ID NO: 320 - DNA, 969 bp, Saccharomyces pastorianus
atgaaacgagtcactggagtctttcttacacttttgagattttcgcagtttgtatcatcagttttggtgatgtcactcttggcgtatgccatccatgcctacaatgataaaggtaacaagaaaaccaacttcacgttggcaacaggcgtaatcagcgtgttctatctgattattttgggtattttatgtttggctttacctactctaatctacataggaatgtatttctgtgcagaattgatcatgtgtctactatggttggccgctttcatcgttctcgcatatgctcaaggtcgtcacagctgtaagagcagaaattcaagtggaggatattatgacccatatagtgggcaatacactagtagcaatcatagaagagcctgtaactcttcccaagcagcaattgcctttgccggactcacttttttgctattcttgactagtgtagtattattgggagtcaatgttttaacaccaattagaaggcgctataaatctcaaggattatggagaactggtgcttctatgggaacgaaacttcatagatggagtggattggctttaagtgagccgtttgaagaaactgccggttacgggaatggtaatataagaaccgaggacgttgaagcaggtacaggtgcaggtacaggtgtagattcaaataccgcttatgtatcagatcctaacgctgacacacgctatgctactaatgatcctcatggccgctacaccacaaccacaaacactaatacacgttatactactaccacccctaatgcagatgtgcgttacaccactaatgagcgcactgcaaataccccaaacgctgtaacggaccagcatacttattctaccgacgaatcaggtgggcattcctatgaccaagagaaacttgtagagggggccgcttctggtgcaatgagcggcagtactacagacccaaataggaacgtcaaccctatgccatga

SEQ ID NO: 321 - DNA, 630 bp, Saccharomyces pastorianus
atggtgtatacgggatttggcctagaacaaataagtccacctcaaaagaagccctataatgaattaactcccgaggaacagggagagcgaggtgcagaaatgattatgaacttcatgacttcatgtcccggaaaatcagtaataagtggtgtaacggggttcgcgcttggtggtgtcttaggtctatttatggcatccatggcttatgacacaccacttcatacgcctactccagccaatacggctgcaactacagctacggcttcaggaaacgtgggtgtgggcgggatatcaaggaccgttcagcaaatatctgacttaccattcaaacaacaaatgaaactccagtttaccgatatgggtaagaaatcatactccagtgctaaaaactttggttatattggtatgatatatgctggtgtagagtgtgtgatagaatcgattagggccaaaaacgatatttacaacggtgtaacagcaggttttttcactggcgctggattggcgtataaagctggaccacatgctgctttaatgggtggtgctggttttgctgccttttcggctgcaattgatacgtacatgaagagcgaagatggtaggccacctcgaaatgattttaaagaataa

SEQ ID NO: 322 - DNA, 2091 bp, Saccharomyces pastorianus
atgtcgttttctaagctactacgatataatcagagaaacaatatgacaacggcatctttgaccacagagcacgccttttctgagaactggaccacttctgccattctgagcgatcctaccagtattgatgttaacataccagccgagataagtagggtattaccaccatcaaatgaatcgtacgattccgtattatcttccttgcccactagaggcatgtcaaagatgaattccacggaatcttctggcgacgacgaaggcacccatttgcaaaaactgacaacctcttggctggagaaaattgacacggaaatgcccgaaaacatttccaaaatcgactcgaatatcatttcctcccctattgttaatcaggttgaggctcgattcattgttcacacgggtaaactgaggaagaactccactgactttgcatcgtctttctcgaactccctaggtttttccaaaagttatggcaagtatatttttttcggctctaagaaaagcgaaaatgccgccaagaagaaccattctattgacagtaatcatggcagccactctctcactgatcatggccgcaacctcccacaaacttcagaaacaataatatgcgacgctttcgcctccacttctgcggaacatgagtacggggcccatggcccggatgggatgttcaccactcgcatttattccctagagggttcgttctcttctctttctacaaattgtcctgaggacacgtattcggaagccattcacataaatactaagcatattgagaataccggtagcacgacacactcaaggaagtcgtcatatactacttcattatcaaacatcaaaagactgttcaagagaacatctttgaatagccactgtagtggctcgtatgaccacacgaacacaatcgctgatgattatgccattgcatcatctgtgaatgaaactacttcttcatgcatttcatccggatcattgtatgccatgagtgaaaatgaagataacgatagagaccaaatcgtacaaactttatacaacaacattgatgcgtccactgatttagtgtctaagaaatacaaagatctaaacgttattctaggtgaaggttcgggtggtaaggtgaaacttgttcaaagggtcgtggataacaaagttttcgcactaaaggagtaccgttctaaaaacaaaaaagaatctgaaaggaagtacatcaaaaagataatttctgaattttgcatcgcttccactttgaaaaatccgaatatttgcgaaacatcaaaaatactgtacgaaaatggtaaaatcttccaaatcctagaatactgtgaatatgatttatttgctttggttatgagtgaaaaaatgcaatatgatgaaatatgttgcctttttaagcaactgatcagtggtgtaaaatatctgcacgacatcggcctttctcatcgggacttgaaactagacaactgtgttgtgacacaaagggggattttgaaattgatcgattttggtgcctctagtgtcttccattatccactatcttctcagctcattgaagcgcacggcattgtcggtagtgacccatacttgtcacctgaggttttttatttcgaaaagtacgatcccagagcgctagacgtttgggccatcgggataatgttcttctgcatgatcaccaggagatttccttggaagtatcccaaagtgaaagatcttcaattcagagcattttgttccggaagaggggcgacatcttttaaagacctagtgacaagacccgccaccggtgacaacaatcaatataatgatggttacgaagaagatgttattgatatgggccctaatttccttctacacaggctaccggaagagagccacaacataatgaggcagatactggatatttcgcccttcagaagaattactgtaaacggaatcctgcaagatgactggatcaaagaaatagaaatgtgccaagtagtgggtgcagaagtcccaaaggatgcgtcacctcgaattataaacaaagaaaaccatatccatacgaacatcgaccaacgatacgcccatatcggcggaatgcatgaacgaacatga

SEQ ID NO: 323 - DNA, 687 bp, Saccharomyces pastorianus
atggggtccgaggaagacaagaaactgactaagaagcagctcaaagctcagcagtttagaaaaagtaaagaggaaaaagaccaggagaaagaggtaaagcaagagcaagagcaagtgtcagatggaaaaagacctaatggtgaagttgggaatgaaggagaagaacccgtgaagaaaaagagaaagacacgtagaggtcggggtggtaaaggcaaaaatgggaagaagggcaacaggttcattgtttttgtcggtagtttaccaagagatattacggttgctgaattacaaggccacttcaaaaacagttcaccggaccaaattcgtctcagagcagacaaaggtattgctttcttggaatttgacgccgataaagatcgcagcggcattcaaagacgtatggatattgccttattgcagcacgggactttgctgaaggaaaagaaaatcaacgtggagctaaccgttggtgggggtggtaacagtgaagaccgtttggaaaaattaaagaacaagaatatcaaattggacgaagaacgtaaggaaaggttgactaagatgatcaccgacgacaacgagaagaaaaaggctaaaattaccgcttcagctactcccacggccacaaccggttcggataagcctgttcctgcaggaattcaccccgatagagctaggttgctcaaataa

SEQ ID NO: 324 - DNA, 633 bp, Saccharomyces pastorianus
atgttttcatattcagatctttgttccatcggttcggccatgatattatcggccaccacctttctaatgggtgttttcttcagtaaccagccatacgattaccaccttttattcaatgctaacgccactcaagaacattttgatctagctttgaaacattatcaaatcctgcatgacactccaaggccaatcgttattgccctgtgtgtcattgcattaattggtttgatcggtggtacaatcaaaatctacaagccaaacccagaattgcagatgtttgaatattgttcattgggtttatacgtgctggctatttgtgtctttattactaatgtcaagactggtcttgactgtactataagccataaatggggggaagtttccgaaaatcaagggctggccgtcattgcttcttctaacattatcctattggtcatgttttccggtgttatcatcttacaaattggtctatggtacagtaactgggatttgcaaaaaagattaaagcaattttatgctgaagaagaacaagaagctgccagtgctggtaaaaaatccgaaaaagctgaaaaagtgaagaagaatgacaataaagctaagaatgttcaaaagaggaacaacgccaagaaatag

SEQ ID NO: 325 - DNA, 1137 bp, Saccharomyces pastorianus
atgttagtaaatgtaacgtcttcgcaatttataaacagacatcaaccgacgagtttgaataaggttactaccacagaaagctgttcgagttcacctctatttacagagaagtcgaccattacgtgttccattgggactgaaagcacaattacgacgaaatatcgtaacagtctgacgaattcatgccacggcctgtcatacgctgaatactgtgcgccttcttcgcataattacacatctattccaaggtctttaacggcaagtgcatcttcatcttcgtctgtaaagagtaatattactactgacgtatggttgacaagtacatcaaaggctttgtatttaacaccaacaccaaccatgcagccatcgacaactgaactaacaacaccgccatccacaaaatttgcatcaaccattaccacatttgaatcatacaccatgttcaccagtaaaaaatctatttatgtcgtctatgaacaagaatatgaaattacggaatcaacaacaagctttagtacacacttcccccaaacaacaaggcttaaagagacaaatgccccactaacttttactattccatgcagtaccatcactggagatgctaagctttaccgccaattgttgccaggagcgttggatacacaaaacgcttcagacaaggataacaacaatacgggtgtcatagttggctccacagttgggattatcattggagtggtaatagtaatttttatcgggtttgtagttatcagaaataagagaaacgttaaaactcgtagcaaaaatggcttcagtcatgatattggcaaaagggtaggccatgatgaggtgatgaagggagaaccaatgctaaacccgtttcgaaatgaatttgatttcaaagcaagagccactagcgaaagtacacaagatttgtttggggatggtagagagatacgaagaagcgattacttagaaagcgcatatgcagcgcatccttattatggtatggaagatcatgatactagaaggctctcctatctgtcatcacttaatgagtctacagggtcatcgattggggaaacaagttccaacgcgtccactataactcggccaaatattgatcagacgaatagttttctgagagagattatataa

SEQ ID NO: 326 - DNA, 1614 bp, Saccharomyces pastorianus
atgaggtttgttttcgatgaagttttcagttcggatactgagtctccagaattcgaggaaacgtgctctataacttcttctgcatcatcacaatgcgtaacacctgaaccgagtccggctgcgaagttacctctcttcaccacaatttgcaccaagcaattgactcaggaatctgtagtggagctggatcctgctctagagaattttttgcgtgacttgaacctacaatccaaagtaattcctataaatgagcccatcgcaactccatcatcaatgtttacaccacgtgctgacaaaccgctagcaaatccatcttctatttcagtgacgagcactgctaaggaccaagatacaaggctgcacctactaaaggcaatggaagactcatttcaaagaaagatgcaaaatttggtgcttacgaatcagaaggaagttcaggctataagagacaagaaacgacgcattgaagagcaacgtaagcgaaaagaggaggaggagcggaagcgcaaagaagcagaagagaaagccaaacgagagcaggaattgttgcgccaaagaaaggaagaagaagagcgcaaacgcgaagaagctgaagcaaagctagctcaagagaaagaagaagctcaaaagaaaaagatagaagaacaaaatgaaaaagaaaaacagctgaagaaagaccaagaagcaaaattgttgcaacaaaaagataaactgggtaaagcaattacaagtttcgatacaatttccaaaacgttttggcattataaagacaaaattgcccaaataaagcaggatatagtcttgcccgtcaagaaggccgatgtaagtgtacgaaatttgctttcacgtcacaagagaaaaataaaccctaaattcgggcaactaaccaacagtaaccaacaacttttcaaaattcaaaacgagttaacgcagttgataaacgacactaaaagcgataccttagcatatcaatggatcttaaactttattgcaaaggccgtagttcaccaatcagaaactgaagtcagagtaaaaccggagtctgcgctgcctctggggaaattaactctatatctactaattcagttcccagaactgcaggagttattaatggctagacttgtaaagaaatgcccctttgtcattggattcacatgtgagattgatactgagaaaggccgtcaaaacatgggctggaaaagaaataatgaggacaagtgggaagacaacacatcttacgatgaaagaatgggcggtatattatctttgtttgctatattaacaaggctgcccctgcctcaagaattcatcaccactaaaaatcacccgttcccaattgcgttatcatggcatatcttggctagaatttgtaatacaccactagacttattaacgaacacccatttcgtaatcttgggctcatggtgggatgccgctgccgtgcaattcctacaggcatatgggaaccaagcctcgaaactactatttttgattggtgaggaactaacgtctcaaatggctgaaaagaaatatgtaggtgctgcaagattaagaatcctgctagaagcttggcaaaataacaccatggaatcgtttccggaaatgtctccttaa

SEQ ID NO: 327 - DNA, 984 bp, Saccharomyces pastorianus
atgggccacgaaactctgcatattggtgggagaaaatctagtttggcggtaatacaatccaaccatgttttaaaactgatccaggaaaaacatccggaatacgactgcaaggttttcactttgcaaacccttggtgatcagatccagttcaagcctctctactcatttggtggtaaggccttgtggacgaaggagctagaagatcacttgtatcacgatgatcctttgaagaagcttgatctgattgtccactccttgaaggacatgcccacactattgcccgaggggtttgaactgggaggtatcaccaagcgtgtcgacccgacagattgtcttgttatgcctttctactctgcgtacaagtctctagatgaccttccagacgggggcatcgtgggcacctcttctgttagaagatctgctcaactgaaaagaaaatacccaaaattgaagttcgaaagtgttagaggcaatatacaaactcgactacaaaaacttgacgaccctaagtctccataccaatgtatcatcctggcatccgccgggttgatgcgtatggggctagaaaatagaatcactcaacggtttcactcagatactatgtatcatgcggtggggcaaggcgccctgggaatagaaattagaaaaggcgactccaagatgatggctattctggacgatatttgcgatctgaatgccactatatgctgtctatcagaacgtgccctgatgagggctttggaaggtggttgttccgtccccattggtgtagaaaccacatataacgaaaaaacaaagaaactgctactaaaggccattgtcgttgacgtagatggtactgaggccgtggaagacgaaattgaaatgttgatagaaaatgtcaaggaagattccatggcttgcggtaagattttggctgaaagaatgattgccgacggtgccaagaaaattctggatgaaattaatttagaaagaattaagtga

SEQ ID NO: 328 - DNA, 1155 bp, Saccharomyces pastorianus
atgaatagaaatacgactaaccataagaacacggattcgagcgctagtagaaatgctggcataccggaagagagagtccatctgaacaagagaggcttgatatactggaccaaccctaggaagtcgggtgcaacctttgctgccactctagtaggtttaattgtcttcagaaacgtcaatattatttcagttttgctcaagatcgggtacatggtcttattcacaagcttcgcggtggagctatctacgaagatactctttgatcagggcatagtgtctaggctgggaatgaaagaatctccagacgttgttgggttcttgagaccacgtattgaccgtgcattggaccacgtgcctgcgttgcaggataagatcagaaagttggtgtttgcaaacagaacaagaaacaatctaaccattggtatgtctctatatttcttgcacgggctttttgccattttttccatgaacactgttctgatgatgaccaccatgctactttacaccgtacctttgatctacgacagaaaacaggaaagaattgaccgtgctattgacagagtgaagaacatgctcgtccacagattccacagaaactactccaaggttgtcgaaaagaccgaaccatacattgacaagattattccagctcaaaatgatcaagacagctactcaacctctgtaagcggcaaggatagctcttcaacctcccaacgcaacaaggacagcttcccaacatctcaaaacggcaaagacatatactcgacttctcagcacagccaaggaacctacccaacctctcaaaacgaggccagtagcaccctaaaatctggcaaacatgaactaccatcagaaaaggacttcaaaaacagacacggagactttagcaagcctgacgtcaagacgtacgacccaagacaaatggatatcgatgcagaactagaggctcaccagcgtgaaatagaacaaaagctaagggaaggtgattataatttagtaggaagcaaggaaattccggacccaatcaccgtaccagctcctgctcaacgcaccgttatccctaacgaagataagccattccctatcagcaaaaacaatgaaaccttacaacaaaagagtactcacggtttgaagcagaaattgcaacatgcctaa

SEQ ID NO: 329 - DNA, 747 bp, Saccharomyces pastorianus
atgttgcgtttggggtttatgcctagatgggtccctagaagtgggctttttgccttgtcagacacaatcggtgcacataagagattctatgctctggcttctgagcaattgtcaagaaagacggtgaaaccgctagaatcgaggaaaacgtttctcatagacacatacaaatacctgatggagaagagctccgtagttctatttgtccattacaacaatctttctaagacggaagatcaccatttcaggtttagaattaagcaaacgggggggaaacttacaaaagtgaggaacaatctgtttgaggtttatttgagaaactcgcatctgcccgatccatgtggtcccgcaaagcgcaaagagcaaaaccgaaagcatccgctcttgcccctactgaagggtcccacggccaccattacgttcgaagatacgaaccctcaacaagtggcgaaactgctgaagctcttgcaatcagcacaggacaagctgttggtgatcggcgccaaagtggaaaaccaagttttggatgtggaaaaactgaacgatttcaagactctccctacaaagacggagctacaatcccagatggttggggtattgcaaatgctcagcggtctcggtttagttcgtacgctggaaagcgggtcgaatgcgctctacctgacattgcaatcgcaccatgataaccaaaagcctaaggaggatgcagattcaagtgcggactccaagccagaagaaccaaaatag

SEQ ID NO: 330 - DNA, 861 bp, Saccharomyces pastorianus
atgaagaccaagccactaagtcaagatccaggctccaaacgttatgcctatcgtataaataaagaagaaaatcgtaaagaattgaaacatgtcaagatagatgaaagttctttagtccagaagggtcagaagatcgatttgcctaagaagagatactaccgtcaaagagcgcattccaacccattttcggatcatcaattagagtacccggtatcaccacaggagatggattggtccaaattatatccttactataaagatgcagaaaccggccagatgacaaagaaggtaactattgccgatatcggctgtgggtttggtgggcttatgatagatttgtcacctgccttcccagaaaccctgatcttaggtatggaaatccgtgtacaagtcaccaactatgtggaggatagaatcattgccttgagaaacaacactctctctagacatggtttccagaatatcaacgttttaagaggtaacgccatgaaattcttgcccaatttttttgaaaagggccagctatccaagatgtttttctgttttccagatccccatttcaaacagagaaagcacaaggcaagaatcatcactaacaccttgctaagtgaatacgcatacgtcttgaaagagggcggtgtcgtttacactattactgacgtcaaggacttacatgaatggatggtaaagcacctggaagagcaccctttgtttgaacgattgagcacagaatgggaaaacagtgacaaatgtgtgaaaataatgagaaatgccacagaagaaggcaaaaaagtcgaaaggaaaaaaggtgacaagttcgtcgcctgctttagaagattaccaaatccaaccatactgtaa

SEQ ID NO: 331 - DNA, 1125 bp, Saccharomyces pastorianus
atgcccacgatgatcaaaaaagatgataaaacaatggacccccctaatgaaaagccacataagaagatcgagagggatgatatcccagagtcttccaaccatatcccccctccagaagctagtgtgttaaggggtggtaagattaattcaaaaaccagagccatgaaggctgttacaagtatcatagtaaacaccgatgagaagccccaaaagtcgagcaataaagtcgatggagccgaaaagccggagacagggcattggagcagtaacataggcaaatttgagtacattttttacaagtttttgcttgtgatgctatacatctgttttgggttgttacgatacggccaataccaatataataagatgaaattaaggatcttcagtattatctacaatcatgcgtacacgccgcaattgattagacaggacgttgtgtctttgaaaaaaattcctaaaaggttagctgccatcttggaaatcaagcccgttggtgatgttggtggtggtgttacaggtttattaaatgatgcgagtgaaattgtttgttggaccgtatcagccggcataaaacatttggtattatatgactatgacggattattacaaagaaatgttccagaattgaggaaggagattcactcgaacttagctaaatactttggaccatctcatgtcccaaactatgctgttaaaatacctcactccaacaagacattttataacttggatggaattgaatccgaaactgacagtggtgaggtagtaaacggcaacgatgaaggaagcggaatcgctattgaagtgtctttgctgtccaacagagatggtagagagacgattgttgatttaaccaagaccatggctgagttatgctcggtcaacgaattaagcgtttctgacattaccatggacttagttgactcggagctaaaacagctagtgggacctgaaccagatttattgttgtattttgggccttcgttggatctacaagggttcccaccttggcatatcagattaaccgaattttattgggaaaaggataacaacgaggtcatatactccgttttcattcgcgggctaagacagtacgcagggtgtaaagtgaacgttggcaaatga

SEQ ID NO: 332 - DNA, 546 bp, Saccharomyces pastorianus
atgggtttgtttgcctcgaaattgttcagtaacctttttggtaacaaggaaatgcgtattcttatggtgggcctagatggtgctggtaagaccaccgttttgtacaagttgaagttgggtgaggtcatcactaccattccaacaattggtttcaatgtcgaaactgtccaatataagaacattgcattcacagtctgggatgtcggtggacaagacagaattagatctctatggagacattattacagaaacactgaaggtgttattttcgttgttgattccaacgatagatcacgtattggtgaagctagagaagtcatgcaaagaatgttgaacgaagatgaattgagaaatgccgcttggttggttttcgccaacaaacaagatttgccagaagctatgtctgctgctgaaatcaccgaaaaattaggtttacactctatcagaaaccgtccatggttcattcaagccacttgtgctacctcaggtgaaggtttgtacgaaggtctggaatggttaagtaacagtttgaaaaactcgacttaa

SEQ ID NO: 333 - DNA, 1137 bp, Saccharomyces pastorianus
atgaatatggaaactgatgaccctatgcacggttctgccgaagatcagctgtatcccacactggatgaagacatgcatagcaatgacagcaagaaacacaatacgaaggcgattgccaaccacgaggatgctgaggaggaactagatgatttcgatctcaggccaggctcctcaggcatagcagaccataaatcgtctaggccactagaaccaactaatacgagtataagccagctcgaccaatggattaagcaccttggtaagtgtgagccattatcggaagacgatgtggctcggctatgtaagatggcagttgacgtgttgcaattcgaggaaaacgtcaagccgatcaacgtccccgtgaccatttgtggtgacgtgcacggtcaattccatgacctgttagagctgtttaagatcggcggcccctgcccggacaccaattaccttttcatgggtgactacgtggatagaggatattactccgtcgaaaccgtctcctatttagtcgccatgaaggtcagatacccgcatagaatcactatactgagaggtaatcacgagtcgagacaaatcacccaagtatacgggttctatgatgaatgtttaaggaaatacggcagtgcaaatgtttggagaatgttcaccgatctgtttgattatttccccattacagctttagtagacaacaagattttctgtctacatggcggtctttcgcccatgatagagaccatagatcaagtcagagagctgaacagaatacaggaagtgcctcacgaaggccccatgtgtgacctcctatggtccgatcctgatgatagaggcggatgggggattagtgccagaggtgcaggtttcacttttggtcaagatatcagtgagcaattcaatcatactaatgatctatcactgatagcaagggctcatcaattggtcatggacggttatgcttggtctcaccagcaaaacgtggtgaccatcttcagcgctccgaattactgttatagatgtggtaatcaggccgcaatcatggaagtggatgaaaatcataatagacaattcttacaatacgacccatccgtaagacctggtgaacctagcgtcagtagaaagacaccagattatttcctataa

SEQ ID NO: 334 - DNA, 78 bp, Saccharomyces pastorianus
atgagagctaagtggagaaagaagagaactagaagacttaagagaaagagacggaaggtgagagccagatccaaataa

SEQ ID NO: 335 - DNA, 258 bp, Saccharomyces pastorianus
atgttaccacgttcagcattagcacgctcattgcaactacagcgtggagtggccgctagattctactctgaggggtccaccgggacgccaagagggtccggttcagaggactcctttgtcaagagagaaagagccacagaggactactttgtcagacagcgtgagaaggagcaattgcgcaatttgaaggaccagctggaaaagcaacgaaagaagatcgactctttggagaacaagattgactcgatgactaaatga

SEQ ID NO: 336 - DNA, 1650 bp, Saccharomyces pastorianus
atggtccgattaaatcatgcagcgtcgtatttcatgcctcttttctgctcgacaaggccttatatagtggtgctctctgcattgtctagtatttcgctattcctattgttctatgtgtcgtcggagttactattgcatgagtatgatgatccgttgatgttcaaacccaactcgcaggactacttcagaactttcctgctggggctcttttcgccctttctttactacttcctgaagactttccttttcaacataaaccagcggttcttgatcctgaatctgattgtcgatttccccatcaatgacgccttcatgcttattattctgatcgggttggcgtatcctcaggtacaagaccaagaaggcacttcacacaagaacaaggaatgttcctggcatatcattccaaggcaggcctatatcttcggtatatcatgggctctgggtgaattcaccatttgcataattggaaatttgtttaactatcaagaaatggccgacctgggcggtaataacgctttaacacgtcaagatagcgctaattggtactctaataatagtataagctataaggatgatcgtggttgcggtgcagagaatcgtcacaactttgtgaaaagaagtgatattacgttgtctaagtgtattggagtaagaaacgactcgtcatccatatcgaacaatgtctactcatccgactatcacccgatcaaacccctgcattccacgtcatcggcatatggtagcatacaacaggaatttcatgagaacaacataggtgcaaacaacgaacttcatatccctgacatttcccaagacgatacaattatcatgatgaatcctatcgacaactcgttgaaattgacaaccctagattctgaagatctgaacttccccatgaatgatgaagatcccattctgaaaagatcgtttggttatacttgggccatccctaatgaaaatacttcaactgctgctaaaagctttacaccagtaaagaaatttgttgcatttacctcggcataccaattggttatgagcatattcttgatggtcttggtggtcggcaataatatcatgttaaccattggagagtcgttgattctatcgatgtattttgtttatgttcgcggtcacgaggacttgtttacccccatagtgaactatttcggttcgagaaccatttcaaatttcatcctatgcgtgataataccattactctttttgaacttcatcgtaaatacagcgatatatctaagaagggagctggacgactggttcaatgattcgcagggggaatatgacgaggatgaccaagacgctgccaagaagagactagccttgagtcgtgattatcagcatccgctgagtgtaaactacaccgcgggggataattccgatgcaatgaatggcgcgggccattttgcattgagtcccggccagccactgggcgactccaccttatattatggtaattctaatagcaactatgacaatacaactaatgaacccgccttcttgaggttttgtaagaaactagtcaaaatttggagggctttggcaagaaacgattcattcgtactcggagtaatggtttcatggagtttagccgtcttcttgacaggtatcgtctccgccgtttatatatag

SEQ ID NO: 337 - DNA, 525 bp, Saccharomyces pastorianus
atgagcaagaatgtggggaaattagtaaaagtatggaacgaatcagaagtcttaattgatagaaaatcaaaatttcaagcaagatgttgcacattaaagaatcagaaggagattccctctgtattagaagaattagtccagaacaataagagcgtttcaaaggcctcccacatgcacatgtatgcttggaggacggccgaattacctagtgattcggattcacagcataagaatcaagaccagaaaaagaaaggtagtaaaaatcacaagaataataacaataatcatggcgacaagacaacgaagataacggttcaaccgaagaatgttgagcaaggctgtgctgactgtggtgaggctgctgctggacagcgcttattgactttgctcgagagagccaatatcttcaacatcctagtaatagtgactaggtggtacgggggtacaccattgggctcgtctagatttaggcatatctcaacttgtgctgtagagagtttgaaaaagggtgggtttctgccctga

SEQ ID NO: 338 - DNA, 2127 bp, Saccharomyces pastorianus
atgactactggtaggattcaatttgccgtttctactccttgtaatgctaagggaaaaccatcgggatatagaatatttgaattcaataatggccggcttgcgctgacaccatcagagaggggctgtaccaaagtggacgtgaatgcaaatatacaggcattctgttacttaaggcccaatgggagagacacatcgacatcatcagatacagcccacattatggattcgagtgattacatgatactggcaaagtccaatgggtttattgaaatcataagcaactaccaatacaagataagaagtggcctacgattaacgccttcctttatccttagatgtaccccagaagactttgagtcaaatttcttcagtgactatatgattgccggtcttgaatatagccaaggtttgttatattgctgtatgtgctccggcagaatatacatttttgtaatgaaccttccatcggattatatccagttcaaaaacatgtacaatcctaaatttccagattgcttctttaacaagcatgaacacaccagtacaagtcattcttcagaggaagaaaaaatatttgaaggccgtacgcggtataccggacgatcatactccaagcacatttgctactttcttttacctatagaaccgtctcatctgagatcatcacctgtagtatcatcgttttgcaatatgtatcaaggcctgcccatatataggccttcgatgtatttacatatagaacgaggtatttctacattccacataaatccattggaccggttttgtttcatgactgtgtcaccacgatcgccactatttatgagaaagataatactgccattaacatacgttacgtttttaagcactttcattgatctgaagaataaaacacaaggaggaatatgtggtgaagtgctctcgtgggacaatatagcgcaacaaaacggattcgggtctttgtttagttggattagcaacaaattcacggtcgattctgatatcataaattccaccatctgggatgacattgtaagatattcaggaacagggatgttagattcaggtatcgtatggaaacaacgccaaggtcacgccaaagatgatatttacgatttatttcatacccaagatatgttagatagtagccgccggaactcttcattcagcgctaccagtaacgaaccaaggcctttaagtagaaggagaagagagtcttttcgaggtttaaccagggacgctttcagagagacaatggatgtaccgtgctcaacaaaatgggagttggattcattcattcgaggtctaagaagaaatacgtttatgatagattttgaaatcgtagagaaaatttctcatagaagtgggaatgatgggatgaatgaggatgatagcaatgaagatgaaagtgacgaaacaatgacctcatttctaacggacaattacaagaaaatggacattgtgtgcattgatcattttgtgacgttaagtgcatttcgacctagatattatgatgaaccgataataaagattgattcgctatcaaataaaaatggttctgagaatatgacttataaaagagctgagaaaaaccaaatagacgttgatgagcaaatggcaaagaatgagacagttcaatttcagcaggcgttaggtgatttatgttcctttaagaaactgttcatgttggatgattctttgtgttttatactggacacacacggggttttactaataaacagattcgaaatcgaaaacaccaagaatttactaaagaatgccaagggtacagtccggataataccttatgatttcggattgattaatgatgcgatagtggtaatcgatgatatatatgcggatccgaacaatgtttccactttgacgtttcatttagtagcaacatcaatggcaggagagataactgtatttaagggcgagtttcttaacgattccaggctagggaaattacagctatgcgactcactaaaattgaacagaaaagatcggtttgtggacaaacttgcattaattgattatgatggtggtctcaatacactgaagaggaaattcggctacgacaaaaagaactcgtacgcattcattgtgaaaaaagtcaaaaaagattaa

SEQ ID NO: 339 - DNA, 1035 bp, Saccharomyces pastorianus
atggacaaaggatcgttaccgtttgtcgttgacacggcgccttcaaacacccccgataaaattgtagcgccctccatagaggaagtggatagtaaccccagcgaattgagagcattaagaggccaaggtagatattttggagtggacgatgacgacgaagatgctatcaaggaagcagctccaaagtgtaataactgttcccaaagaggccatttgaaaagggactgtcctcatataatatgcacctattgcgggtcgatggatgatcactattcccaacactgtcccaaggcgatcaagtgctcgcaatgtgacgaagtaggccattacaggtctcagtgtccgcacaaatggaaaaaagtccaatgttctctttgtaagagtaaaaaacacttaaaggaaagatgtcccagtatatggagagcatatatcttaatagatgacagtcaaatggggaaacacaaagtccttccgtttcataccatatattgctataattgtggcgaaaagggtcacttcggtgacgattgcgaggaaaggaggtcgtcaagagtgcctaacgaggatgggagcgcattcactggttccaacctatcgaccgatctaaaacaagaatactaccagcatataaatagaaatttaaagaataacgaaaactaccaattcagtgggtctatatacgatgaagagcctctaccgaaaccttctcacaaaagacattcacagaacgatcattctcacagtaacagaaacaagcgtagagtatcgaatttccaccctcctccttaccaaaaacgcaatgtcattcagcccaccataagaggtgagaccctttcaattaataacaatagtagtaaccattcacggtaccaaaatcaaaacgtaaatgtctcctcgatatctgaaaatatgtacggttccagatataactcttccgcttatgttaataacaatgacattcccaactcttccaattataagaactataattcttaccaaccgtatagaagcgggactttaggaagaaggagataa

SEQ ID NO: 340 - DNA, 1785 bp, Saccharomyces pastorianus
atgttaagaaaccaaagttgcgccaggcttgtcaagcccatcgcgacccctaaaggaagactgctgagaagaccgtgctacaggcacgtctcgactggcagcagtgccaacgctggcggcggcgccggcagcgccgccagcagccagtggttcaagtactcggttattgcttcctccgctacgctgttcggctatctgttcgccaagaacctgtactctaaggagaccaagcaggacctgatcgagcggctggagatggtcaagaagatcgatccggagaactccacgttgaaattgtcctcgctggactcgccggactatcagcacgaccctgttaagatcgaccaggttgtcggagagctgaagcatctgctaggcgacgacccggaaaactactccgagtcgacctctgacctagacgctcactcggatacatacttcaacacgcatcatccgtcctcggagcagagacccaagatcattctgttccctcacactaccgaccaagtctcccaaatcctgaaaatatgccacgataacaacctcccagtggtgcccttctcgggcggaacctctcttgagggccatttcttgcccacaaggatcggcgacaccattaccgtggacctgtccaagtttatgaacggcatcgtcaagttcgacaaactggatctggacatcaccgtccaggccggtctaccgtgggaagatttgaacgacttcctgggcgaccacggcatgctgttcggctgtgaccctggtccaggtgcccaaattggtggttgtattgctaactcttgttctggtaccaacgcctaccgctacggcaccatgaaggagaacatcataaacatgaccgtggtactacctgacggtaccgttgtcaagaccaagaaaagacccagaaaatcgagtgccggttataatctcaacgggttgtttgtcggaagtgaggggactctgggcattgtcactgaggccactgtcaagtgtcacatcaagcccaaggcagaaaccgtcgctgttgtgtcctttgacactatcaaggatgccgctgcgtgcgcctctagtcttacccaaaacggtatacaactgaacgccatggaattgctggacgaaaacatgatgaaactgatcaacgcctctgaatccacagacaggtgcgactgggtcgagaaaccaacaatgtttttcaagattggcggcagatctacagacatcgtcaacgccgttgtggatgaagtcaaagctgttgcccaacaaaaccactgcaacagttttaactttgccaaagatgatgacgaaaaattggaactatgggaagccagaaaggtcgccttatggtccgtgttagacgccgacaagagtaaagataaatccgccaaagtatggaccaccgacgtggctgtcccactatctcagttcgacaaagtcattcatgaaaccaaaaaggacatgcaggcaagtaaattgatcaacgccatcgtcggtcatgcaggtgatggtaacttccatgccttcattgtatataggacccctgaagagcatgaagtgtgtagccaattggtccatagaatggtcaagagagccctggatgccgaaggtacatgcacaggtgagcatgggattggtatcggtaaaagagagtacttggtggaagaattaggtgaggctcctgttgatttgatgagaaaaatcaaactggccattgatccgaagagaatcatgaacccggacaagatttttaaaattgatcctaatgaacccgccaatgactataaatga

SEQ ID NO: 341 - DNA, 1587 bp, Saccharomyces pastorianus
atgtatcatggtgtggagaagctgaaactcaagtattcaaaagacgggtgtgtcacttgcaagatcaggaagaagcggtgctcggaggacaagcctgtatgcagggactgccgtcgcttgagtttcccatgcatctacatatcggaaccgatggataagcagtctttgaagaagataaaggctgacatacagcatcagttggtccataagaaaaaaaagcacgctgctgacggggaccagcgggcggccatggtcaattatgtgcggcgtagccatgaggatgaatacgataatcagatatacctgtcgaaaccgctggaggactgcatttctcagaagctagactcgatggggctgcagttatacaactactataggtcgcatctggctaacatcatttccattgcgcccatgaaccagaactactacttgaatattttcttgcccatggcacacgagaacgacggtatcctgttcgccattctcgcttggtcagcaaaccatttgtcgatatcttcctctaatgagttccgaaaggacgagatattcgtcaacctggcgaacaggtacacatttatgtcgctaacacatctcaaaaccagcgaggattcaaatgtttatgacaaactaagtttcttgtattcgctagcgcaaatcttgattctatgtggctcggagatttgccagggtgatgtgaagttctggaaaatactgctgaatattgggaaaaacttaatcgagaaccatgttggcaaggacatttcccatatactgaccacaaccacagaggaggcccctctagaggagagagttatcttccctaatttcaactctgttgttaaatactggctgatcgtgaacttcatataccacgacattttaaacttcaatactacatctttccccatcgaacagtatgagaaattcttccaaagagaacatacctcgctgcccaattcagtcagctttatagagccggcggactcgccgatcgaagaaatagaccctttgatcggaatcaacaagcctattcttttattactgggccaggtaacgaatttgacaagattcctacaaaccatggaacaggaggaaatgctggagcatggggataaaatacttaatttgcaagtcgagctctataaattacagccttcgctgatggcgttggactgtttagacgataataaacaattctgctatctagagttattcgaaataatgaaaatctccacgttgatgtttttccagataacactgttgaagatcgacaaaggttcgctggagttgcaaatactgctcaatagactaaattccaagttggacacggccattggaacttttttggaaggctcgttgtgcttcccacttttcatttacggtgcgtgtctcgggatcgacgacatagaaaagaaattagatttggaagccaaatttgatgatattttaaaacgatataaatgctataattttcaaaacgcaagattactaatacggaaaatatggcaaaatgaagcagagggaaacgacgaacataacttggtgcatatgattgatgagttggacttcaatattaatttcgcgtaa

SEQ ID NO: 342 - DNA, 594 bp, Saccharomyces pastorianus
atggaatcaagacggtatgggcccaacattatagttacaggaacaccagggtgtggtaagtcctccacatgcgagttattaaaggacaaactaaaaggctacaagtactacaacatctcggatttcgccaaggacaacgattgttttgaaggatacgacgaaggtcgtaaatcgcacattgtggatgaagacaagctgctagatacgctggagccactgttgagacaaggaaacagcattgtcgactggcatgtaaatgacgtgtttccagagaggctgatcgacctggtagtggttttgagatgcgataactccaagttatattcaagattgcacgcaagagggtaccacgactccaaaatcgaggaaaacctcgatgccgagatcatgggtgtggtcaagcaggatgctgtggattcgtacgaaccgcacatagtggtggagctacaaagcgatacgaaagaggacatagtgtccaacgtggctcgtatcactgcttgggagaagatgtggttggagcaacatccagacggtgtcacgaacgaataccaaggaggccgcagtgacgacgaagacgacgaggacgaagagtag

SEQ ID NO: 343 - DNA, 576 bp, Saccharomyces pastorianus
atggacaaattcggtttgcaagcattagtaccgctgctcaaacaagaagacaaagaactttcaagcacatatgaccattctatgactttaggagcggatttatcgtcgatgctatattcgttgggtattccaagagattcacaggaccatagagttctcgatactttccagtcaccgtgggcagagacatctagaagtgaagtggagccccgatttttcacaccggagtcctttaccaacattcccagcgtattacaatccaacgtaactccaccatgtttcaattccatccagaacgatcaacagcgtgtagccttgttccaagatgagactctattctttcttttttataaacatccaggtacagtcatccaggagctaacgtatttggaactcaggaaaaggaattggaggtaccacaagaccttaaaggcctggctcaccaaggacccaatgatggaacctatcgtgtctgttgatgggctaagcgaaagaggatcatacgtgttttttgatccgcaaagatgggagaaatgtcaaagagatttcttgttgttttataatgctattatgtaa

SEQ ID NO: 344 - DNA, 2268 bp, Saccharomyces pastorianus
atgcgcagatcactggctggcctcactttcacacctttacgtctctcgagtccaagatcgctgctattcatgtcatcctcattaccttcctctgccggtaagaaaccaaaacaggctactttggctaggttcttcacgtccatgaagaataagccgccaggaggctcttcgtctcctgagaaggccaccaaacacaagcttgaaagcggcataaacgagattaatagtgaaggagcgtctgctataaagaaactgaagcatgtgtcggccgtgcaaacgccggtggagccgtctgatatgagtagcaacagctcttctctaccgtcatctgctccctcttctggcggtgttgatgcgtcgcaaaaatctcgggagctcactctcaaggtcgaagaagaacagggcccgattgagaatgaccactactcatccaatatcccctattccgaagtctgtgaagtcttcaatgagatcgaagccacctcttctcgattggaaattattaggatatgttccgacttctttacaaagataatgaagcaatcatctaagaatttgatacctaccacatatctttttatcaataggttgggccccgattatgagcctggtttggaattgggccttggtgaaaatctcttaatgaaaacaatcagtgaatcctgcggcaaatcaatgagccaaattaaactaaaatacaaggaaatcggagatttgggtgaaatagctatgggcgcgagaaacgttcaacccacaatgtttaagccgaaacccttaactgtaggcgaggtctttaaaagtctacgaagtattgcaaagacccagggtaaagattcgcaactgagaaaagtcaagcttatcaaaagaatgttaaccgcatgccagggtgtagaggctaagtttttgattagatccttagaatcaaaactaagaataggtcttgctgaaaaaacagtgttgatatctttatccaaagcacttttacttcacggtggaaatgaggaaagttctcgtgttgatgatatccccatggacgccttggaaagtgctcaacaaaaaatcagagatgcattttgtcaagtaccaaattatgagctcgtcatcaattcatgcttggaacatggtatcatgaatctggaccaattttgtactttaagaccaggaattccattgaaaccgatgttggctaaacctacaaaggcaatcaatgaagttttagacagattccaaggtgaaacttttacgtcggaatacaaatacgacggggaaagggcccaagtacatttattagatgatggaacgatgagaatctactccagaaacggtgaaaatatgactgaaagatatccagaaatcagaatcacagatttcattcaagatatagatgccaccaagaatttgatcctagactgtgaagctgtggcttgggacaaagaacaagggaagattctaccatttcaagttttaagtacaaggaaacgtaaagacgtggaattgagtgatatcaaagtaaaagtctgtctctttgcatttgacatcctttgccataacggtgagagattgatcaataaatctttgcgagaaagaagagactgcttaactaaagttacaaaagttgttcctggggaattccaatacgccactcaaatagtaacagataatctcgatgaactgcagaagtttctcgacgaatctgtcaatcaatcatgcgaaggtctaatggtcaaaatgctcgaaggtcctgaatcacattatgaaccaagcaaaagatcaagaaattggctgaagctgaaaaaagattacttagaaggtatcggagattccttagatctttgcgtcataggggcatactatggcagaggtaaaagaacaggcacgtatggcgggttccttttaggctgttacaatcaagattcgggagaatttgaaacctgttgcaaaatcgggacaggattttctgatgaaatgttgcagcaacttcatgaaagattaacccctacgataatcgatggaccaaaggccacgtttgtttttgattccagtgctgaaccagacgtatggtttgaacccacgactctgtttgaagtactgacggcagatctttccctatcacccatttataaagctgggagtgcaactttcgataaaggtgtttcgttaagatttcctaggtttctacgtataagagaagataaaggtgtcgaagatgccacttcttcagaacaaattgtggaattgtacgaaaaccagtctcatatgcaaaattag

SEQ ID NO: 345 - DNA, 1386 bp, Saccharomyces pastorianus
atgtcaaagcagcttgttaggtctgcgaagaatctggtgaagggttactcttctacccaggtgttggtgagaaatgccacgtccaacgacaataatcaggtgtccaaagactcgttgatagaactggcagaaaagtcatatgacagtgtagattttttcgagatcatggatatgcttgacaagaggctgaacgataaggggaagtactggagacacatcgcgaaagcgctgactgtgttggactacctaattagatttggtagcgaaaactgtgttctttggtgtagagagaacttgtacatcatcaagacgttgaaggagttcaggcacgatgacgatgaaggcatagatcagggccaaattgtcagagttaaggctaaagaattgacgtcattgttgtccgacgaagagaggctaaacgaagaaaggaacatgaacatcaagggcaggaacaggggaggaagaaggagaagaggaaccaaccgtgacggcgaggatgatgatgatttgcagagagccattgatgccagcagaatgactgcggatgaagatgaaagaagaagaaagcaggacgaggactacgaaaccgccttgcaattgagtaaagaggaagaggagttaaagagattacaggacttacaaagaatgcaagcacaacagcaacagcaacaacccatgtactacgatatctttggcaatccaatcacgcccgaagagtatgcacagttccaactagaacaacaacaacaacaactacttcaactacaacaactacaacaacaacaacaacaacaacaacaacaacaacaaccaatgtactacgatatgttcggtaatcctatatcaccagaagagctagcacagtttcaacaagaacagcaacagcaactatacttgacctccttacaacagcaacaggctacatccaacaacccatttgccaagcccaaccaagaagcaagtccacagagacaagatgtaccatcaatgaacgcgtcatctatgccgcaacaacaacaacaaccacaacaggaggagccattaacacaaacaaggacaggtaatcaatcgatgacggacaaatacagtaaattaaacgaactattaggcacaggcacgggcattgacacatttggtaacttcggggatacccgtgttcccgctcaacataccaagacggggacattcattaactcccagggtacaggctataggcaagtttccaatgacccaaagcataatccattcctaaacagtcaatatacgggtctgccaagtaccaacgttgtaccaacacaaacaggctacggatttgggaaccaacaacagcaacaatctcaaactaacggctcaaatagccaaggctatgctttaattgatctttga

SEQ ID NO: 346 - DNA, 1524 bp, Saccharomyces pastorianus
atgagttccaccaataataatttcaacactaataataacagtaatacagacctcgatctggactggaaaactgcattgaatattcccaagaaggataccagaccacagaccgacgatgttttgaacacaaagggtaatacttttgaagatttttatttgaaaagagagctgttgatgggaatttttgaagccggttttgaaaagccatcccccattcaagaagaggctattcctgtagcaataaccggtagagacatattggcaagagctaagaatggtacaggtaagaccgccgcgtttgtcattccaacattagaaaaagtcaagccaaaattaaataaaatccaagcattgatcatggttcccacaagggaattagctctacaaacttcacaagtcgtccgtacattgggtaagcactgtggtatttcatgtatggttaccactggtggtaccaatttgagagatgacattttaagactaaatgaaacagttcatgttttggttggtactcctggtagagtgttggatttggcctcaaggaaagtagcagatctatctgattgctctttgttcatcatggatgaagctgataaaatgttatcccgtgattttaaaacaataattgaacaaatcttgtcttttttgccaccaactcaccaatctctattatttagtgctactttcccattgacagtcaaggagttcatggttaagcatttgcataaaccttatgaaattaatttaatggaagaattaactctaaagggtatcacccaatactatgccttcgtggaagaaagacaaaaactgcattgtttaaacactttattttccaagctacaaattaatcaagctatcattttctgtaactctactaaccgtgtagaattgctagccaagaagatcaccgatttaggttattcgtgttattattcccatgccaggatgaaacaacaagaaagaaacaaagtgttccacgagttccgtcaaggtaaagttcgtactttggtctgctcggatttattgactcgtggtattgatattcaagctgttaatgtcgttatcaattttgatttcccaaaaacagcagaaacttacctacatcgtattggtagatcaggtagatttggtcatttaggtttagcaatcaatttgatcaattggaatgatcgtttcaacctctacaagattgaacaagaattgggtactgaaatcgccgccattccagccacaattgataaatcattgtacgtggccgaagacgatgaaactgttcctgttccatttccaattgaacagcaaagctaccatcaacaaacaacacctcaacaacaattaccacctcagcaacaattcgctattcctccgcaacaacatcacccacaattcatggttcctcctccacaacatcatcaacaacaagcgtatcctccattacaaatgccccaacagcaagggtaccctccacagcaggaacatttcatggcaatgccaccaggacaaccacaaccccaattttaa

SEQ ID NO: 347 - DNA, 1287 bp, Saccharomyces pastorianus
atgcatcacaattctcaatctatgagcgctgcttatatcaggagccccgaggacgaaaacatggcccctatagctagtacaaaacataggactgggtccctgaggcatgttccatccacgcatcctagggtcgcacttagtgatgtgaccaacatagttgcgacgaactccaacaataatagcataagtaggacaaagaccgttccgatgaaggaacggtcggactctgtcacgagacttgagaagcagaggcctgcggtagaaggtgctacacagcggagagaaacagatcataatgacatgctgacggggaaagaacgagaagagaccgttgatgaggattacgaagagagcgaagacgatgagggagaagatcgagaacctttgttgttgcaacattatgccagcgataaagctgtctgggaacatgcatttaaaacctattatagaactacattggatcctaatgatgacgacgtgtacgatgtggtcatggttgctgaattgtcgaacgaaatatttttgtatatgaagcagctggaagaatcatacaaacccgatccgtactatatggatagacagccggaattaaggtggtcgtttcgaagtacgctgatagattggattgtgcaagttcatgaaaaattccaacttttaccggaaacattatatctttgcatcaatataatagacaggtatctatgcaaagaggttgttcccgtcaataggttccagctcgtaggtgctgcttccctgtttattgctgccaagtatgaagaaatcaactgccccacaatcaaagatttcgtatacatgtcagaaaattgctactcaagagaagacttgttggacgcagaaagaaccatattgaatggcttagaatttgaactgggatggcccggtccaatgtcatttttgcgaagaatcagcaaagctgatgactacgagcatgatacaagaacgctggctaagtatttgttggaatgcacgataatggacgaccgactgatctccgcgcaacccagttggttggctgcgggagcttattttctaagtaaagtgattttgggacagaaccaatggtccttggggcatgtttactattccaactacacccaagagcaagttcttccactcgccaccattatcttagaaaattgcaggtatgcatccaaacgtcataacgccatatggagaaaatattcttcgcgtcgttatttgcattcttcacaggtggtagccaaatggatagcattggctgaacacagagtagatcgatctaactaa

SEQ ID NO: 348 - DNA, 1812 bp, Saccharomyces pastorianus
atggctgctaaaagatcaaacagaagcaaggcccccagtagtagggatgagaccgatccatatggcttgaacgaagttgacgattttgcttcgaagagggaaaaagttttacttggaaattccactctcgctggcggtgctaacaatgatgacgatgacccattattagaagatgaggaggaagaagaagttttggctatggacgatgctgatgagtcttcagaagaagaagaagaagaagaagaagaagaaaaactggatggtgctgaagcttataagaaaatatttggcagaaacttagaaaccgatcagcctctagaagaagatgaagagcacggtatgctggataacgaaaatgcctggggctctacaaaaggcgaatactatggggctgatgacttggatgatgaagaagcagctaaagaaattgaaaaggaagcattacgacaacaaaagaagcatttggaagaactcaatatgaacgattatttagatgaggaagaagaagaagagtgggttaaaaatgctaaggaatttgacatgggtgaattcaagagctcgaccaaacagccagaaactaaggtttccattaaggatattctaaatatggatggcgaagcaagagacaactatttaaaaacaatgtttcctgaattttctccactttccaaagaatttacagcgctagcacccaagttagaagaattaaagaaatctgaggaaaacgaattctcaaaattaaaagtaattgctcttggaagctatctaggtacaatatcgtgctactatagcatcatgctgcatgagctccataataatgaagacttcacttccatgaagggacatccagtcatggaaaagattttaacaacaaaggagatttggaggcaagctagtgaactaccatccgattttgacatgattgaagaagaaggatccggaagcgagagaacgtcaaacattgaagcattcaatgaggataagttgaatgctttggagggcgatgaagtttctagcgtggaagaaagcgaacaagaacagaatgaagacggcgaagaggatgaaagcgacgatgacgtggatatcgatgattttgaagaatatgtagcccaatcgcgtgtaccttcaaaaccaaaatcatcagttacatctgaagctgatgattttgtagaatctgaaattgctgatgtagatgcgcaagacaaaaaggcccgtaggagaactttacgtttctacacatccaaaattgaccaacaggaaaataaaaaaatagacagatttaaaggtgatgatgatattccatataaagaacgtttatacgaaagacaacaacgtctgttggaagaggctcgtaaacgtggtgtgcatgacaataatggcgctgatctagacggtaaggagtatggcccagaagatgaagcagtttctaagagtatcaattcccaaggtgagaacgactattatcaacaaatacaaagagggaagcaagacaaaagagcctcccgtaaacaagctcataagaacgctgttattgctgcaagggaaggcaaattagctgaattggctgaaaacgttgcgggtgacggtaagcgtgctatcaattaccaaatcttgaagaacaagggtctaacgcctagaagaaacaaggacaacagaaactctcgtgtcaaaaagagaaagaagtaccaaaaagcgcaaaagaaactcaaatctgttcgtgctgtttattctggtggccaagctggtgtctatgaaggtgaaaagacaggtattaagaagggtttgacaagatctgtcaaattcaagaactga

SEQ ID NO: 349 - DNA, 1263 bp, Saccharomyces pastorianus
atgagtagcaataagggcaatgggcgcttgccgtcattaaaagattcttcatctaccggaggacctgcaaagccttcattaaagtttaagccaaaagcagtcgctagaaaatctaaggaggagagagaggctgccgcatctaaagtgaagctagaggagggccctaagagagacaagaaaaacttcaataacagtaacagtaaaagagtaaacggcaatggtggacaacaaaggcgaatggccaaatatttaaataacacacatgttatttccagtggtcccttagctgctgggaatttcgtcagtgagaagggtgatctcagaagagggttcatcaagtccgaaggaggcggatcatccctagtgcaaaaaggtttagagaccattgacaacggtgctgaaagttcggataacgaagcggaaggtgacagcaatggagacgtagcgtccaggtctaagaagaagtttaatatggggagggaatttgacgctcacaatcttatagaggttgaagaagaagaggatagtggaaaaggcagtgacgtggatatggatgacgaagcatgggggactaaaaagattgaacagttattccctgtcagacccattcgtgtaagacacgaagaagtggacactgttaaaagagaaatacaggaagctctttcagagaagccaacccgtgagcccaccccaggtgtgaaaatagaatcttctaacactgaattacaatcctatttggaagagagggaaaagcaggtcaatggaaaactaggagatcttgaacttcaaaaagactttcagtcggtcgacgaaaaggaaagtgctgctgaattagaactgctaaaggcagaccaccagcatatattaaagaagctgaaaaaaatggacagcaaacccgaaagattcatggtattccagttacctaccaggctaccaaattttgaaagaccggccgtaaagacagaggaagttgaagtggaagcacaagccagtgatgctacaaaaaagaagaagaccatcaagaaaaagagcacaacaaacgtcataccgagcgatgaattagctggtaatatcggagccatcagggtccacaaatcggggaaactttctgtgaaaattggaaacgtggtcatggatattggcaaaggcgccgaaaccacatttttacaagacgttgtagcattgagtatggcagacgattcatcatcagctgaacttctaggccgtatagacggtaaaatagtagtcacgcctaaaatctaa

SEQ ID NO: 350 - DNA, 1338 bp, Saccharomyces pastorianus
atgtccagagacgctccaattaaggccgacaaggattatacccagattataagggaagagttccccaagattgattcaattgctcataatgactatagctctgcactagatcaattattgatcttggagaagaaaaccagacaggcttcggatttagcatcctcgaaggaagtcctcgctaagatcgtggacctgttagcatcgcagagtaaatgggacgatctgaacgagcaactgactctcctatctaagaaacacggccaacttaaactgtccatccagtatatgatacagaagattatggaatatttgagagactcgaaaaccctcgacttggacaccaggattaaagttattgaaactattagagtggttactgagaataagatatttgttgaggtggaaagagctagagtaactagggatttggtggaaatcaagaggaaagaaggtaagattgatgaggcagcagacaccttgtgtgaattgcaagtcgaaacttacggttccatggaaatgtcagaaaaaatcgaatttatattagagcaaatggaattgagtatattgaagggtgactactcccaagctacggtactttcgaggaaaatcttaaaaaaaaccttcaagaatcctaaatacgaatcattgaagctggagtactataaccttttaatcaagattggtttgcacaagaaggattacttagaagttgcccaatatttgcaagaaatataccaaacggatgttattagagtagatgagaccaagtggaaaccagttttatctcatatcgtgtatttcttggttctttcaccttatggtaatttacaaaatgatttgattcacaaaacgcaaaatgataataatttgaagaaactggaaagtcaagaatctctaataaaattgttcaccacacacgaattgatgagatggccaattgttcaaaaaacttacgaacccgttttgaataaggatgatttggcattcggtggagaagccaacaagcatcactgggacgatctacaaaagagagtcattgaacacaatttgagagttatttccgagtactattccagaatcactctatcgagattgaacgaattgctggacttgacagaaactcaaactgaaacttacatcagtgatttagtcaaccaaggtatcatatatgcaaaagttaatagaccagccaagattgtcaattttgaaaaacccaaaaattcaagtcaattactgaatgagtggtcacataacgttgacgaactattagaacatatagaaacaatagggcatttgattacaaaggaagaaattatgcatggtttacaagctaaataa

SEQ ID NO: 351 - DNA, 1473 bp, Saccharomyces pastorianus
atgatactagatccattgtctccaaatattgaaaatcattcccatgatgaaatcatcgacttttgggagaaaattgagtccattgccaatataccaaaagataaactggatgagtcccacgtcaattcaagccttgtcgcgtacctcaagtttgccacggattcctataaagtgtttatcaataccgatcgagatctctatcgaatgtcactgattttattggaatcgcctctatttgaatttgaaaaagagttttgcctgagcaaattgcaatcactactcaatatagacctactggaaatgaatatgaagtttattatagtttatgtccttctctgcgaggcaaagaaaaacgtccactctttagaaattatgcttaaattccaagggtttaccgtattttataacgctttatacactcaatttgcttatttgagcaagtatggagaagaaaagagaactgttaataaacagcgatataaaactgatgctgctaacacaattacgcctttggactgtttggtcccaagtttgactgacattgatttgggtattatagatgaaatgaagcaaatttctaccgttttgatggatttgttatttcaaatcttaaagtattgtaaatgcgttattgccaaccttcaaattgttgatgatttctttgtttactttttgatggaaacgataaggtctgatattatggatgatatgttcaacaatgcacaatttaagctgttgttggcattaaatgaacaatatatgatgtttgccaaagaatacgaaatcgaaaataaagtttataagtatttgatcaacgaatcagtgtccaaatgcttcagtgagttgctgttattaaaatttaatagagtatcggatcctcctttacaaatcatgatgtgcaaaatcatttatctaatcttgacaccaaggagcgatcatgctccaataagttttttttatacaaatgatttgcacgttcttactgatgtattaataagagagctccagaacataagtgaagatgaggagatattgagaaataccctcttaagggtccttatcccattattaaaaaacacacaattatctaaaactcattatagaaaggacgatttgaataaattattgcagtatctgtcaactctagataatatatgcgctgacagtccggtactacacgaacacctagtcacagtaaggctatcacaaaagtgtcttcaacaaattccttggctagaggatccgcctacgcctccgaacgaaaattcaccggcttctagtaatacgactagtagagactccagtatatttactctaggagggtctgataaccaaaatgtcttgacccgtaaaggccatctttatagtaatcgtggactagacgtctctgcagaatctttaactaaaagaaaagctagagctccaccaccaccaccaccaccaccatcaagaaaatgtggaactctgaaatga

SEQ ID NO: 352 - DNA, 2073 bp, Saccharomyces pastorianus
atgaacgttttagtctacaatgggccgggaactacaccaggatcagttaaacatgccgtagaaagtctgcgtgactttttggaaccttattatgctgtgagtacggtcaatgtcaaagttttacagacagaaccatggatgacgaaaacctcggccgtcgtgtttccaggtggtgcagatcttccgtatgttcaggcatgtcaacccattattcctcgattgaagcattttgttagccaacaaggtggtgtattcatcggattttgtgcaggaggttatttcggtactagtcgtgttgaatttgctcaaggtgaccccacaatggaagtttctggtagtagggatctacggttttttcctgggacaggtaggggaccagcgtacagcggatttcagtataacagtgaagctggtgcgcgtgcagtggggttaactcttcctgacggctcacatttctcgacgtatttcaatggaggatctgttttcgttgatgcagataagtttgacaatgtcgaagtcttggcaacgtatacagaccacccagatgttccttcttctgattcaggtgatggccaaagtgaacgcccagctgctgtagtactctgtaacgttggaaaagggaaagtgttgttgaccggccctcatcctgagttcaatgttcgtttcatgaagaaatcaacagacaaacatttccttgaggctgtcgttgagaagttgcaagcccaagaaaatgatagattaaagtttatgagaacgattctcaccaagacagggctgaactgtaataacgattttgattatgtaagggctccaaatttgacaccattgtttattgcaagtgcccctggtaaacgaaactttttggaagagatggaaagcaatttggtacatcatggtgcgcatgaaaatgatgttgaacagtactcagaattaagtgccgagagtgattctttccacttttataaaggttacatatcctcttacgatgcggctagtacctctttacttcataaagagccagacgaggtttctaagacactaatattccccggtgaaaatgaggatgttccaccatcccggtatacgcccaattttgatatgtctgagtactttagacatttgaattcgcaaaatacactaggtactttacttctgtatggtgaggttattacgtcaacaagtaccgtgttgaatagtaacaagtccctattaaattcggtacccgaaaacaccttactccatgtaggcaccattcaagtctctggtcgtgggagaggtggtaacacttggatcaaccctaaaggtgtttgcgcttcaacagcagtggtcaccatgccactccaatcgccagtaactaatagaaatatatctgttgttttcgtccagtatctttccatgcttgcttattgtaaggccattctttcttacgcacctgggttttcggatattcctgttaggatcaaatggcctaacgatttatacgccttaagtcccaattactataaacgtaaaggtttgaaattggtgaatactggttttgatcacacaaagctgcccctaggtgatgtagagcctgcgtacctcaaaatatcaggtttgcttgttaatacgcactttataaacaacaaatacactttgctagttggttgtggtataaatttaactagcgatggtcctacaacttctctacaatcctggattgatattttaaatgaggagcgtcaacaattcaatcttgatttgttgccagctattaaggcagaaaaactacaagctctttatatgaataaccttgaggtcatattaaagcaatttattaattatggtgccgcggaaatactgccaagttattatgatctgtggttacacagtaaccaaatagtcacattaccggatcacggcaatacccaagccatgattactggtattacagaagactacggtttattgattgcaaatgaattagtaagcggtagttccactcagttttcaggaaatgtttacaatcttcaacctgacggcaatacatttgatatcttcaaaagtttgattgccaaaaaagttcaagcttaa

SEQ ID NO: 353 - DNA, 5118 bp, Saccharomyces pastorianus
atggtaggacaacagtattctagtgccccattgcgcacagtgaaagaagtccaattcggtcttttttcgcccgaagaagttagagcaatcagtgtggccaaaataagatttccagagacaatggatgaaacccaaacgagagccaaaattggtgggttgaatgaccccagattaggctctatcgatcgtaacttgaagtgtcaaacttgtcaagagggtatgaatgaatgtcccggtcatttcggtcacatcgatctagctaaacctgtttttcatgttgggtttattgccaaaatcaagaaggtttgtgaatgtgtctgtatgcactgtggtaaactactacttgatgaacataatgaactaatgagacaggctttggcgatcaaggacaccaagaaaagatttggtgcaatctggactttatgtaagactaagatggtttgcgaaacagacgtcccttcagaaaacgaccctactcagcttgtttcaagaggcggttgtggtaacactcagcctaccgttcgtaaggatgggttgaaactggttggtagctggaaaaaagatagagccacaggagatgccgatgaaccagaattaagagttttaagcacagaagaaatcttaaatatattcaaacatatctctgcaaaagactcctccagtttagggttcaacgaagtcttttctcgtccagaatggatgattttaacatgtcttcctgttccgccaccaccggttcgaccatccatttcctttaatgaatctcaaagaggtgaggatgatttaacatttaaactggctgatattttgaaggcaaatattagtttggaaactctagaacataacggtgccccacatcatgctattgaagaagcagaaagtttactacaatttcatgtggccacctatatggataatgatattgctggccaaccacaagctttacaaaaatccggtcgtcctgtcaaatctattcgtgctcgtttaaagggtaaagaaggtcgtattagaggtaaccttatgggtaagcgtgtagatttttcagcgaggacagtcatttctggtgatcctaatttggaactagaccaagtcggtgttccaaaatccatcgcgaagaccttgacgtacccagaagtggttactccttataacatagaccgtctgacacagcttgtccgtaatgggccaaatgagcatcctggtgcaaagtatgttatccgtgatagcggagaccgtatagatttaagatacagtaaaagagccggtgacatccagctacagtacggttggaaagtggagcgtcatatcatggataatgatccagttcttttcaaccgtcaaccttcgcttcataaaatgtctatgatggctcacagagtgaaagttattccatattctacattcagattgaatttgtccgtcacttctccatataatgccgattttgatggtgatgaaatgaatcttcacgttcctcaatctgaggagacaagagcggagctttcccaattatgtgctgttcccttacaaatcgtgtcacctcaatctaacaaaccttgtatgggtattgtgcaagatacgctatgtggtattcgtaaactaacattaagagatacatttatagaatttgatcaagttttgaatatgctatattgggtcccggattgggatggtgttattcctacacctgccattatcaaaccgaaacctttatggtcaggtaaacagatcatgtctgtagccattccaaatggtatccatttacaacgttttgatgaaggtacaacgttactttctccaaaggataacggtatgcttatcattgatggccaaatcgtttttggtgttgttgaaaagaagaccgttggatcttccaatggtggtctaatccacgttgttacaagggaaaagggaccacaagtatgcgccaaactatttggtaatatacagaaagttgttaacttttggttgttacacaatgggttttcaacgggtattggggataccatcgctgatggaccaacaatgagagaaatcacagaaacgatcgcagaggccaagaagaaggtttttgatgttacgaaagaagctcaggcaaacttattaacggctaaacatggtatgactcttcgtgaatcctttgaagacaatgttgttcgtttcttaaatgaagcaagagacaaagccggtcgtttggctgaagtcaatttgaaagatttgaacaatgtgaaacaaatggttatggcaggttccaagggttcatttattaatatcgcacaaatgtcagcttgtgtagggcagcaatctgttgaaggtaaacgtattgcctatgggttcgttgatcgtaccttaccacatttctctaaagatgattattctccagagtccaagggttttgttgaaaactcttatttaagaggtttaaccccacaagagtttttcttccatgcaatgggtggtcgtgaaggtcttatcgatactgctgttaaaacagctgaaacaggttatattcaacgtcgtttagtcaaagctctagaagatatcatggttcattacgacaacaccacaagaaactctttgggtaacgttattcaatttatctatggtgaagatggtatggatgcctcacatatagaaaaacaatcactggatacaatcggtgggtcagatgtcgcttttgaaaagagatacaggattgatttattgaacccagaccacatcctggatccttcattactggaatctgggtctgaaattcttggtgatttgaaacttcaagttttattggacgaagagtacaagcaattagtcaaagaccgtagttttttaagacatatatttgttgatggtgaagcaaactggccattgcccgtcaacataaggcgtattatccagaatgctcaacaaactttccacattgaccataccaaaccatctgacttaacgattaaagatattgttattggcgtgaaagatttacaagagaacttactagtgttacgtggtaaaaacgaaatcatacaaaatgcccaacaagacgcagttactttgttctgctgcttgttacgttctcgtctggcttctcgtagagtcatagaggaatacaaactaacaaagcaggctttcgaatgggtgttaagtaatatcgaagcacaatttctccgttctgttgttcatcctggtgaaatggttggtgttcttgcagctcaatctatcggtgagccagctacacaaatgacactgaatactttccatttcgctggtgtggcttccaagaaagtcacttccggtgtcccgcgtttaaaggaaattttaaacgtggccaagaacatgaaaactccttccttaactgtttaccttgagcctggtcacgctgctgatcaagaaaaagcaaagtttattagatctgctattgaacacactactttgaagagtgttacgattgcttcagaaatttattatgatcctgatccacgctccacagttattccagaagatgaagaaatcattcaacttcatttctctctgctggatgatgaagccgaacaatccttcgaccaacaatcaccttggttactacgtctagaattagatcgtgcggcaatgaacgataaagacttaactatgggacaagtaggtgagagaatcaaacaaactttcaaaaacgatttgtttgttatctggtctgaagataatgatgagaaattgatcattcgttgtcgtgtggttcgtccgaaatcattagatgccgagaccgaggcagaagaagatcatatgcttaagaaaattgagaatactatgttagaaaacattacattacgtggtgttgaaaatattgagcgtgttgttatgatgaagtatgatcgtaaagtgccaagtccaacaggtgaatatattaaggaacctgaatgggtattagaaacagacggtgtcaacttatctgaagtcatgactgttcctggtatagacccaactagaatatacaccaactcctttattgatattatggaagttttgggtattgaagctggtcgtgcggctttgtataaagaagtttacaacgttattgcatctgatggttcttatgttaactaccgtcacatggccttattggttgatgttatgactacccagggtggtttaacttctgttactcgtcatggtttcaatagatctaataccggtgccttgatgagatgttcattcgaagaaaccgtcgaaattctgtttgaagccggtgcctctgccgaattagatgattgtcgtggtgtttccgaaaatgttattctcggtcaaatggctccaatcggtactggtgcgtttgatgtcatgattgatgaagaatcattggttaaatacatgccagagcaaaagattactgagatcgaagatggccaagatggtggcgctactccatatagcaatgaaagtggtttagttaatgccgatcttgacgttaaggatgaattaatgttttcacctctagtcgattcgggttcgaacgatgctatggcaggaggatttacagcttacggtggtgcggactacggtgaagccacatctccgtttggagcttatggtgaagcacctacatcccctggattcggagtctcttcaccaggattctccccaacctctccaacatattcccctacctctccagcatactctcccacatcgccatcgtactcgcctacatctccatcgtactcgccaacatcgccatcatattcaccaacatcaccatcttactctccaacatcaccatcctactctcctacatcaccaagttacagcccaacatctccgtcttattctcctacatctccatcatactctcctacatctccaagttatagcccaacatctccaagctatagccctacatccccagcttattccccaacctcaccaagttatagtcctacttcaccttcatactcaccaacatcaccatcatattcaccaacatcgccttcctactcccctacttctcctaactatagccctacttcaccttcttattccccaacatctccaggctacagcccaggatctcctgcatattctccaaagcaagacgaacaaaagcataatgaaaatgaaaattccaaatga

SEQ ID NO: 354 - DNA, 546 bp, Saccharomyces pastorianus
atgggtctttatgcttctaagttgttcagcaaccttttcggtaacaaggaaatgcgtattctaatggtgggtctagatggtgctggtaagaccaccgttttatacaagttgaaactgggtgaagtcatcactaccattcctacaattgggttcaatgtcgaaactgtccaatataagaacatcgcattcaccgtctgggatgtcggtggacaagacagaattagatctctgtggaggcactattacagaaacaccgagggtgtcattttcgttgtcgattctaacgatagatcccgtgtcggtgaagccagagaagtcatgcaaagaatgctgaacgaagatgaattgagaaatgccgtctggttagttttcgctaacaagcaagatttgccagaagccatgtccgctgctgaaatcaccgaaaaattaggtttgcattccatcagaaaccgtccatggttcatccaatccacttgtgctacctcgggtgaaggtttgtatgaaggtctggaatggttaagtaacaacttaaagaatcaatcctga

SEQ ID NO: 355 - DNA, 609 bp, Saccharomyces pastorianus
atggtcgaagaaactactgatttcagtcaattcgaagaagataaaaacaacgatcaatacaaagtctccgccaagaaaaccgttgatgaatataaaaacttggatgcggaagatgaatccttagccaaatggaaagaatctttaggcttaggctctgatgttttaccgttagaattcgctggtgacaaaaggaaagtggtggttcagaaaattcaactattagtcaacacagaaccacagcctattacatttgaccttaccaatgaaaagacaatcaaagaattggcatctaaaagatataagatcaaagaaaactctatttacaagttgaagattgtcttcaaagttcaacatgaaattatcacagggttacgatatgtacagtacatcaagaaagcgggcattgccgttgacaagatagatgatcatttgggatcgtatgctcctaatacgaaaactaaaccattctatgaggtagagctaccagaaagcgaagctcctagtgggtttttagcaagaggtaactacagtgctgtatcaagatttattgatgacgataaaacaaaccatttgactttgaactggggggttgaaattgttaagaaatga

SEQ ID NO: 356 - DNA, 78 bp, Saccharomyces pastorianus; identical to SEQ ID NO: 334

SEQ ID NO: 357 - DNA, 1326 bp, Saccharomyces pastorianus
atggaggataccaattccagcaaagaagtgtattctaatacattgtcaccgacatcttctagaattacagaccaaaaacaaattaatttggatgtggacctagagaaaaaccaaactgcgaaaagctcagattcgctggagtccctgccgaatgccaagatacgtaatcctaaacacggtgagggttcaccgttagactatccaaaactaaacacatacacgtttgtaccgactacagtgccaccatatgtgctcgaggtgcagtttgacaagctgaggtggcagggcaagggcccagttaatggaagtgtcaccgacgataatgaaattccaaaagaatttaaatgggggcaatttgcgtctaacattggcaatcacgccgcatactccagagaccaaaacgagaatcatagccacctcctgaaaccatccgcccaggacaactattctctgacatcatcaacgtcttcgaaaaatgctgctcgaagagaaattttgagtgatatggccagtgaatggggtggtgaagaacgtttagaaggggtattgcattctgaaataggtgcgaacttggaattcaagaccatggaagagagaaaggaatggttacaatatatcgaaaaggtaaaagatttttattacagcgataagaaaaagaatacagaatcacctgattccgcccacaataaaagttacaaatcagattgggtaaatgatttaagtaaagagagagaaaagtggcggagattaaaacagaagaagctacaacaatggagaccacccctgacgtcattattactagatagtcaacacttagtcttgggtttgagaatattcatcggtattttgtcgtgtgcctcacttgcgttagcgatcaagattttccaaaactcgaggtcgaataataccatcagtgaaagtaaaatcggacaacaagcaagtacaataatggccatctgcgtaaatgcaattgcgattgcgtatattatttatattgcccatgatgaatttgccggtaaacctgttgggctgagaaatccattgagcaaactgaaattgattttgttggatttacttttcataattttttcaagtgctaatgtagcattggcattcaacactcgttttgacaaagaatgggtttgtacttcgattcgcaggtcaaatggaagcacatacggatacccaaaaataccgcatatctgtagaaaacaggaggctttatcttcttttctatttgttgccttgtttatgtgggtgataaccttttccattagtattgttagagtggtggaaaaggttagttcaatcaccaacagaaactaa

SEQ ID NO: 358 - DNA, 2448 bp, Saccharomyces pastorianus
atgtccgaaactctacctagatcagatgatttagaggccacttggaactttatagagccaggtatcaaccagatcctaggaaacgaaaaaaatcaagcatcaacctctaagaaggtgcagaaaattctctctccaacgatgtacatggaagtttataccgcaatttataactattgtgttaacaagtcgcgttcttctggtcattttagcactgatagtagaacaggccaatcgacaatcttggtaggaagtgaaatttatgagaagttgaagaactatttgaaaagttacattttgaatttcaagaaaaccgattcagagacttttttacaattttacgttaagcgttggaaaagatttacaataggtgccatctttttaaaccatgccttcgattacatgaatagatattgggtccaaaaggaaagaagtgatggtaaaagacatattttcgatgttaacactttatgcttaatgacgtggaaagaagtcatgttcgatcctaataatgatattttagttaacgagctattagaacaaattaccctggaaagagaaggacagattattcagagaaacaatatcagtacagccataaagtccttagttgcattaggtattgacccacaagatttgaaaaagctaaatttgaacgtctatatccaagttttcgagaaaccattcttaaaaaagacacaagagtactacacccaatatacgaatgactatttggaaagacattcggtcactgagtatatttttgaggcacatgaaataatcaagcgtgaagaaaaggccatgacaatatattgggatgaccatactaaaaaaccactttccatggcgttaaacaaagttttgattacagaccacattgaaaagcttgaaaacgagttcattgtcctactcgatgcaagagatatcgagaaaatcacttcattgtatgcactaatacgcagagatttcacactaattccaagaatggctacagtctttgaaaactatgttaaaaagacaggtgaagatgaaatttctggcctattggccatgcataagcataacattatgaaaagcgaaagtgcaaaccaaaaaaaattggcattaatgactgtgcattcgctttctcccaaggactatattaagaaattactagaagtccatgacatattttccaatatctttaacgaaagctttcccgatgatatacctttagccaaagcattggataacgcctgtggttcgttcataaacatcaacgagtttgcgttacctgcagggtccccaaagagcgctacatcaaagacctctgaaatgcttgctaagtatagtgacatgctattaaagaaagctaccaagcctgaagtggcaagcgatatgtcagatgaagatattataacgatattcaaatatttgactgataaagacgcttttgaaactcattatagaaggctttttgccaagagactgatccatggcacttccacgtccgcagaagacgaggaaagcatcattcaaagattgcaagctgcaaacagtatggaatacactggcaaaataaccaagatgttccaagatattagactttctaaaatcttagaggaagattttgctgtgactctgaagaatgagcccgactactccaaatctaaatatccagacctacaaccatttgtattggcggagaacatgtggcctttttcatatcaagaagtagaattcaaattacctaaggagctagtaccatctcatgaaaagctaaaagactcctatagccaaaagcataatggtagagttttgaagtggttgtggccattatgtcgtggggaaataaaggctgacatcggaaaaccaggtagagttccgtttaatttcactgttacattgtttcaaatggcaattttactgctatacaacgatgccgaaacattgacattagaaaacatacaagacggcacaagcttgagcattcaacacattgctgcagcaatgataccgttcatcaagttcaaactgattcaacaagttcctccagggctagactcactagtgaaaccagaaacccaatttaagatatcacgtccttataaggcactaaagaccaatataaatttcgccagcggggtcaagaacgatattttacaaaccctatcaggcggaggacacgacaatcatggcaataagttgggaaacaaacgcttgacagaagacgaaaggatcgaaaaggagctgaacacagaaagacaaattttcttggaagcatgtattgtgagaataatgaaagccaagaggaaccttccacatacaacgcttgtcaacgaatgcattgcgcaatcacaccaaagatttaacgcaaaggtttccatgatcaagagagccattgacagtctaatccaaaagggatacctgcaaaggggagacgatggggaatcttacgcgtaccttgcttaa

SEQ ID NO: 359 - DNA, 261 bp, Saccharomyces pastorianus
atgttaagtcgttgcatctcccgtaatgccaagctgccaacaaacttcagaatagcctctcgcttatactcggatggccctctaggtggttccggccccggtggggttcaggacattttcatcaagagggaacgtgccaaggaagatttctttgccaggcaacaagagagagaacaattagctcacgtcaaggaacaattaaaagaacacaaaaagaaactagaacatttagagaacaagattaataatctttcaaagtga

SEQ ID NO: 360 - DNA, 2511 bp, Saccharomyces pastorianus
atgggtgaagaacataaaccgcttttggacgcctccggtactgatcctcatgaagaggataaaaccgccaccgccattctaagaagaaagaagaaggataacatgcttttggtcgacgatgctatcaatgacgacaattctgtcattgccatcaactccaacactatggacaaactggaattgttccgtggtgacaccgttcttgttaaggggaagaagagaaaggacacggtgttaatcgtcttgatcgatgacgaattggaagacggtgcatgtagaatcaaccgtgtggttcgtaacaacttacgcatcagactgggtgatctagtcacaatccatccttgcccagacatcaagtacgccaccagaatttccgtactaccaattgctgataccattgaaggtattactggtaatcttttcgatgttttcttgaagccttacttcgtggaagcttacagaccagtgagaaaaggcgaccatttcgttgtgagaggtggtatgagacaagtcgaattcaaagtcgtggatgtcgaacctgaagaatatgccgttgttgctcaagataccattatccactgggaaggtgagccaatcaacagagaagacgaggaaaacaacatgaacgaagttggttacgatgacatcggtggttgccgtaaacaaatggctcaaatcagagaaatggttgaattgccattgagacatcctcaattgttcaaagccattggtatcaagccaccaagaggtgtcttgatgtacggtccaccgggtacaggtaagactttaatggcaagagccgtagctaatgaaactggtgcctttttcttcttgattaatggtccagaagtcatgtcgaagatggctggtgagtctgaatcgaatttaagaaaggcctttgaagaagctgagaagaatgcaccagctattattttcatcgatgaaatcgattctatcgctcctaagagagacaagaccaatggtgaagtcgaaagaagagttgtttctcaattgttgactttaatggacggtatgaaggcaagatctaatgtcgttgttattgctgcgacgaacagaccaaactccattgatcctgccttgagaagattcggtagattcgatcgtgaagtggacattggtatccccgacgctacaggtagactggaggtcctgcgtatccacaccaagaacatgaaattggccgatgacgttgacttggaagcgctggcagcagaaacacatggttatgttggtgctgatatcgcctccttgtgttctgaagctgctatgcaacaaattcgtgaaaaaatggacttgatagatttagatgaagatgaaattgatgcagaagtacttgattctttaggagtcaccatggacaatttcagattcgctctaggtaactctaacccatccgcattgcgtgaaaccgttgtagaaagcgtcaacgtcacttgggatgatgttggtggtttggacgaaatcaaggaagaattgaaggaaactgtcgaatacccagtcttacatccagatcaatacaccaaattcggtttatctccatcaaagggtgtgttgttttacggaccaccaggtacaggtaaaactttgttggctaaagcagtagccaccgaagtctctgccaacttcatttcagttaaaggtccagaattactaagtatgtggtacggtgaatcagaatctaatattcgtgatattttcgataaggcaagagccgctgcgccaactgtcgttttcttggatgaattagattccattgctaaggcaaggggtggttctgtaggtgatgctggcggtgcttctgatagagttgttaatcaattattgacagaaatggatggtatgaacgctaagaagaatgttttcgttattggtgccaccaacaggccagaccaaatcgatcctgctatcttgagacctggaagattagatcaattaatttatgttccattaccagatgaaaatgctagattgtctatcctaaacgcacaattaagaaaaactccattagaaccaggtatggaattaactgcgattgccaaggctacccaaggtttctctggtgcagatttattatatattgtacagagggctgctaaatatgccatcaaggattctatcgaagctcacagacaacgtgaagctgaaaaggaagtaaaggcagaaggtgaagatgtggaaatgacagatgagggggcaaaggctgaacaagaagatcaagaaccagatccagttccatatatcactaaggaacatttttcagaagctatgaagaccgccaagcgttctgtctcagatgccgaactacgtcgttatgaagcatactctcaacaaatgaaagcatctagaggtcagttcagtaatttcaacttcaacgatgctccattaggtactactggcacagacaatgctaatgctaataacggtgctccaagcgggtcaggtgcagcatttggctctaacgcggaagaagatgatgatttgtatagttaa

SEQ ID NO: 361 - DNA, 420 bp, Saccharomyces pastorianus
atgtgttgctactgtctttgctgcacagtgtccgacttcatactatatgtcattgcgcttttcttccctcccatcgcagtcctatttcgttccggtctgttctcatctgatttcctactgaatgtactgttgacgctactggggttcttgcccggtatgctgcacgcattctactacatcacgattacaagccccataaggaacgccgactacgtctactattaccaacaaggctgggtggatagcgaaaggaacgaaccctcgagccgtcctcaaaccaccgacgcctcccagcaccgccatcagcagggaagctccactagaaacgtttatccaaatatccaaactcctctgctgcaagccgcacctcacgataacaaacagtctactgtggaatctccccctccgtatataccatga

SEQ ID NO: 362 - DNA, 2364 bp, Saccharomyces pastorianus
atggatttgtttattgaaagaaaaataaacagtttattacaatttttatttgtttcccgacaggattttttgaagaatttgagattttggaacaacaataataacaacttttcgatttacttattaatttttggagtagtagtatttttttataaaaaaccagatcatttgaatcgtatcgttgacagcatcagtgaaatgacaacgaatttcagagatagtaatagtctcagccgttggttgcccagaagcaagttcacccacttggacgaagaagttctgaagaggggtggcttcattgctggtttggttaatgacggtaacacctgcttcatgaattccgtattacaatcattggcatcatcccgagaattgatggatttcttggataacaacgtcatcaagacctatgaagaactagaagaaaaagcagaaaataaagaagaaagcggatacgaacacgaagacgagcaagatgctctcaagaagaagtctgccaagaacggtaaagtttacggtaagcacaagaaaaagctaaacaggaaattaagctccagagaggaagaagaagagaaccaagagccggatgtcacgtttagcgtcactttaagggatctattagctgctttgaatgataagtattatagagacaaaccatattttaagaccaataggttattgaaagcaatgtccaaatctccaagaaaaaatatgcttttaggctacgatcaagaagatgcacaagagttttttcaaaatcttttagctgaattggaaaataacatcaaatcaatgaactctgaaaagcttgatactaccccaatcgctaaaactgagttaccagctgatgctttggtgggtcaaaataatcttgagaaagtcggcactgtttatattccgactgaacaaattgatcccaattctattttacacgacaaatcgatcaaaaatttcacacctcataaattgattactcctttagatggtattaccgcagaaagaattggatgtttacaatgtggtgaaaacggtggcataagatattccgtattttcagggttaagtttaaatttacctaacgagaatattggttgcaccttgaagttgtctcagttgctaagcgattggagtaaacccgaaatcatcgaaggcgtggaatgtaatcgttgtgccctcgctgcagctcattctcatttattaggtcagctgaaagaattcaaacagaaatcagagggttctattccagaaaaattgattagtgctgtccaaaacagggtacaacaaattgaaggggtactcgccaaaccagttattgatgacgaagattatgagaagttgcacacagccaacatggtccgtaaatgttccaaatctaaacaaatcttaatatcaagaccaccaccattattgtctattcatatcaatagatctgtcttcgatccaagaacctacacaatcagaaaaaacaattccaaagtactatttaaatcaaggttaaaccttgccccatggtgttgcgatatcgacgaaatcaatttagatgctcgattaccaatgtcaaagaaggaaaaggctatgcaacaagattccagtgaagatgaaaacattggtggcgagtactattccaaattgcatgagcgcttcgaacaagaatttgaggatagtgaagaagaaagagattacgatgacggagaagaaaaccagacctctcactacaatgacaacagggatactaataattatgacccactaaatggtgaagctgatggattatcgtcagatgatgaggatgaatacatcgaagaaaccgacgccttaggcaacaccattagaaagaggaatatagagcatgccaatgctgaagaagaacatgaacatgtagtagaagacaatggggaagggatgaacaacaccgacaacgtaaaccacagcgagctaaaggttaatgttgaggaccaattagactcatcatcagatgaggaagatgctataccggctccgcccatcaactatgctaggtcattttccactgtgccagccactccgctgacatattctttgcgttcagtcattgttcattacggtactcacaattatggtcactacattgcattcaggaagtacagaggctgttggtggagaatatccgatgagaccgtgtacgtcgtggatgaagctgaagttctttcaacacctggtgtgtttatgctattttatgagtatgactacgatgaagaaaccggtgagatgaaagacgacttggaggccattccaactaacgaggaagaagaagaaggagagcaagagcaagagcagcaaaaccaggaagtccaagaaggtatatctggtaaagatgtaaattaa

SEQ ID NO: 363 - DNA, 450 bp, Saccharomyces pastorianus
atgcatttatacggctactttgtgctcctcattgccgtggttcttttcattgcattattgcctttgttttctggtattggaaaattcaagttgactaaaccgagctcatcggtaaaagcgcaatcaccaacaggaaagctaggtaagagggagtatttagagagcaagcttaaccacaccaatgtgctgaagttcgacctaaatggcgagaaagatggctctggcgatgatagcacaggtgtttcttctgatttgagaaaatttgaagttgattcaaaaacaggtttgaaaagacgcgtgattggacaatataaccaggaccccaatgattttgatttcgatatcaatgacttgatcgttgaagatgaactagatgaacaaagagaagaagagaaaaagctgaaaaaatataacggtaagaaaaaccaagcttacgaaggatttgtatga

SEQ ID NO: 364 - DNA, 522 bp, Saccharomyces pastorianus
atgtttaagcgtcctctagcaagtttagtacgaatgagtgccgtgctcggaaaaaaatcgatggtaacagtaatgagaacacctactagacttcgtcccattgtagcaaccaacatgggtctcactttaaatctttttcagaggagatttgtagaatcctcaacagatggtcaagtggtccctcaagaagtggtaaacttaccacttgaaaagtaccatgaagaggcagacgagtacttagatgctttactagataacttagaagaactgagtgaggctcacccagattgtatacctgatgtagagttgagccatggagtaatgacattggaggtaccagcttatgggacatacgtaattaataagcaacctcccaataaacaaatctggctggcatctccactgtctggacctgacagatttgaccttcttaatggggaatgggtatcactgagaaacggcacaaagctaacagatattcttaccgaagaagttgaacaagccatcgccaaaacccaatga

SEQ ID NO: 365 - DNA, 924 bp, Saccharomyces pastorianus
atgtccgaaccggcaaatacgtcaaagaactcttcccacttaattggaggcttttttggtgggcttacatctgctgttacattacagccattagatcttttaaagactagaatccaacaagacaaaaagtcaacgctatggaagactttaaaagacatagataaccctttacaactatggaggggtactctaccttcagcattacgaacatcaataggtagtgcgttatatttatcatgtttgaatatcatgcggacttccttggctaagaacaagcataaagtgtcttcatcaggggatgatctgaatgttatatacaacaagagcagtagtctaccacggctaacaatgtacgaaaacctgttaacgggggcattttcaagaggcctggtgggctatatcactatgccaatcactgttattaaagtccgatatgagtctactctgtataattattccagtttgaatgaggcaaccaaccatatatacgccaaagaaggtatttctggatttttcagagggtttggagctacatgtttaagagatgccccttatgctggattatacgtattgttgtatgaaaaatccaaacaattattgcccatgatcctacctagcaaatttatacattgtaatgctgagggggagtttactacctatacttccacaacgataaatacaacgagtgccgtgttgtctgccagtttggccaccacagtaacagcaccattcgacactataaagacgagaatgcaattggagccatcgaagtttaccaattcctttaaaactttcgcatctatagtcaagaacgaaaccgcttttaaactgtttagtggattgagcatgagactgacaagaaaggcgctgagtgccggtatcgcatggggcatatatgaagagttggtaaagagattcatgtaa

SEQ ID NO: 366 - DNA, 1923 bp, Saccharomyces pastorianus
atgtctgactcaaatgatggccaagaaagcactaagaagaatatggaagctcagaatgtaggagaggctgaattaccacacgaaacgccagaacatgcggaaaagccagagatctctaggaaagatgataaattaacaaagaagaaccgaaaaaagggtaaggctagaaagggcggcaacaatagagtggaaactgagctagttcataccgctctactagagaaggataatccattcatggaggaacaacaggaaggtctcaagaaatcagctttattagaaatacctggtatgaaaagccataaactaaagaatccgaatgaagactacgaagacgactcagagggactgttacccttaaatcatgaatcgaatacagaaacgtgtaggactagtccaagcggaagcattaactctatgaatggagaaacgtctccctccgaagatctctctgtgggaaatagaagcaagtctaccaggatacatattcttgaagcgaaaagagcttcagagggtcagggcagagcctacattgcctatgttatacaatttgaaaattccattgttcagaggcgttatagtgacttcgagagtttgagaagtatattgataaggttatttcccatgacattaataccgccaataccagaaaagcagtcaataaaaaattatggcaaatcaataactggatctagttcaaaatacctgctgccctctgaaggttcgggctcagtggatctttcgttgtctgtcatacatgcatcggttaataataatgaggaaaagttaatacgacacagaataagaatgcttaccgaattcttgaacaaacttctgactaatgaagaaattacgaaaacttccataattacagattttttggatcccaataaccataactggcatgaatttgttaatagttcggccacgttttcatccttgccaaaaagtattcttcaatgcaaccctttagaccccaccaataccactagaattcatgctgccttaccgataccaggctcttcatcacagtcggtgttgaataaggaaccaagcgacaagaaggtggataagaaaagaagcaagtcgtttactggtgttgagcaagaatataagcagtatgagaatctattagacggtggaatttataagtataataggcgaacgacgaaaacatatcatgacttaaaaacagactacaatgaaatcggtgaagtatttgcacaatttgctaatgaacaggctcaggttggagaaatagcggagcaactttcttatttaagcaacggattttccgaatcttcaatcactttggaaaaattggttggaagattatactacaacataaacgaacccttaaatgaatcggttcacatggcaacatctgcgagagagctaataaaatatagaaaattgaaatacttacaaaatgaaatgattagaaaagctttgaactccaagaaggtacaattggaaaaacttgaggcacaaaataacgaatacaaggacgttgataaaataattgatgatgaaatgtctaaaagtcataccattaatctggaacgccctaacaacaacgccggcaatggtggaaaatcgtatggtggaaaattatttaacggatttaacaaattggcatccatggttaaagaatccgtgaagtatcaagaaactgatcctcacaccgcgagtgtgaacttgaagaaggaaattgaacaactttctgactctttgaaagttacagacaatgatttagaggttatttcaaaagttattcaaaatgaccagttgcccagattttcgaaagaaagagagactgatttatcagagatcctaaaacattattctagatatatgagaaattacgcccggaagaacctagaaatttggaaagaagtcaagaaacatcaagatttcgcataa

SEQ ID NO: 367 - DNA, 4314 bp, Saccharomyces pastorianus
atggtagaaggggctctcattggtaaatatctatcacaagcgagtcaattgaaactcatatcggacttgattcaaaacgatgatttgggacaggtactggaactaatagaaagtgcctcattgaatatacctattgatagcgagattgttttttctatctttgaaaaaataacggagcaggttgtcgagtatgccaggatgaaggatgaacaaagtgaaatgttctctccttcaagaactgaaatgaacgattccctaaggacctctgcacgcttactatgccatttgcctggtgtatgggaaaaatttcagacctggatatcttaccgactaaacgatatcattagcaagaactacaaacatctttttgatgataaatttgacaaaatgactgtacaaccattttttgatgcctttgctaaacaacaaaatgtcgatgtcgcacatgaaaaactggatttgaatattcttagtttgttggactctttagaagtggtgtatctttttgaccaaagtgaaaatagcatctccactaaaagcttagattttatcgtagttccattattgggttgcaattccgaagaaattgctgaatcatgctccaaattaatgagatggcatataaaaactctatcggagtgttgtaatgctgatgaaaattttgataagctagtttggaatttcatcaagcagttgtataccagagatgattctcagcagccttggaagcagaagaacagtttgtcggttcttctgagattcctcttgacatcagacttatcgcctgaacttattggttacattagaactgatatgtattgggaacatattcaaagagaactggatcacgaagttcatgagcacaaaaaactggctctctcaatcctcaaattgacaattcaaaagttaccagctcacactacagactttaagacaacctattttacatggagtgcgactcccagcatcgacacgcttaacagctggaagaagtttacaactttgtacgaaatgattgcgctcgatacatcactgaatcaaattgaagcagccaaacaagatgtcataaaaatttttgacaatgtgcatttgcaccctagttgggggctcatcttgctttccacaggtttgaaatcttcgatggaaagtgtcagaaaatacgtgatgaagctaatgttttcagttactcatatgtctgtcttttcgtcaaacatacctttgctgacaaagactcttctaccagctgcaatgctggctcattactttagcgtcaaggacaatatttgtccccatggcgaaagactatcatcatttgtcaaagatgtgctcgccgaaacaactaatgatttatctgaattgctgtcggaaattttaaggttattggttgaaaaagcgacttcttttgatccttctagaatatatgtgtcttatggtatactggagtttctccaaaaaaacaaactaaaagcaattaactctgatcatttgaatctgatcagaagactgtatgaattcgaaggtgaagacgtggtccttgaaactacgattcaaacaatttacttgaaactcttactatacattgacccatgtatctccgcatctgaattactgtttacattactttcacacataaagtataagaaagggtcataccaatatgtcgagcctctttttgaaaattacagagacctcgctgtttcctactttgacgatttacaagctgaagaaaacataatgccgaacattggaaaagatgccatttttgatctcttggcgttagttatcttcgatttcaaaaatatcgaagtcactcctaatttattgattgaaattgcaaaatcgaaacaagatattcctgattatacttcaagtgcaattacgttcttaactgaattactttctggtaatccttccaatgggtatacttatgaaaatgccactgtcctactgtcttatccaagttttacaatttctacatggaagtctttaaaagtcgaaaatctatttgaatcagtaaaggaaaacttttctgctgaaaagttcaaattttttgctgaagtttacaaaaagatcaacgaatgtagatttgacattattgaactaaaatttgatggacttttggttatatacgaattgattaagacttctgtcgaaaaaggttcaagagagagctttaaagtaaaggatagtttatactctactttttttgatctcatgagcatttttttgagaacgtatgccttgaatcgcgattgttcaaatccagatgtggacgagctccacgtattgctccatttgattgcggaaaatattaataaagataatggaaattttctcggaaacctggctgtttgcaatctaatgtacttcatcttagacacttacattcattgttctgatagtgtttccgcggatgaaattgctatagtaaaattcatttttgagagattctcgtccatttgggaaagtgtctgtagcgaaaggttggttttgaaggaaagagatctacaattatcactgataggggggttattccatcccgctatcctgtactttggttcgaaacaatatatagaaaacctcactttggaattagaagaacatgcacaaacgattatttctttaagttatactagaagaagcttactacctcttcttggatcacaactcagggctttcatgaaattttacggggactctttgaacgcgggtgtcgacttttggtggttgattaacattttggtaagtacattcaaagaattacaaatggacgtaaaccttttcaagcttaaacctgttatttcccacttgtatgatcggaaactaaacagctattatactaaaggtgaagagctttatgagaaagtgtatggtccagacgaagtattagccagagtttccattattgattctattttatacgcaaatgaccaatttaaggtccaactaattgaaaaagtcactgaaaagacaaatgttcttcatgctataaagaggacagacggcgctgaagcgttacaacgtttgttacagtggcagttattactattatcgctgcaaactatcaatgaaggaacgctagatgactctaccatgatgaaaattttgaagagtattgaagatgaaagttctccattggtaagagtgtacaaagaatggtttatttctactaaggtagtcgaatactataaaacaggtagttctgaatttgctgagaattacctcttctcattactcgaggatcacagcaaaccggttttcgccgttagtgcggaaaagatatgcttcttggtattgaaagagttaatgaatgatgatggaaaatacggattcgaccagcttttagacaagtttctttgcacattggttcccaacgcagcctcaaacaagcctctagtgaggcatttttccaattctctggtgatttcattatggccggcatttgaaagctatctatcaaatcacacattaagaagcatcatcgagaacttgtacattaatgccaaaaagactcaagtctttggtgaatatcgtaccggtgatgccaatatatgggatttgaaaagtgataaaaaattaacgaacatgtttggtggtgtcgccaaaaagattactgatcataatagcccttacatttccgaagctgtttttgagaagtatttacaagtcaaagacaccgtacctatcggcatcgatgaaaggtcattgtggctgaacaaaagagacaccgatatagatgctggcgctagcgggtgtacagactctgacacatctccattgcagacaaaaagtggtgcctgggagaccgttcttgacctggacaataagaaattcaacgaggtcgttacgcgttccgacttgattgttgtttcttcattggtggacaagccacccaatcttggaggtatttgtagattatgcgatgttttaggggtcggactgttgactgtgcaagacattaaagtcaaaagccatcctcaattcaagaatgtagctgtcactgctgatagatggatgcccatggaagaagttgccttggaaaatattgcaagtttcatgaaggaaaagaaaaaagaagggtacacattaattgggttggagcaaacagataaatcactgaaactcgataacagtttccgtttcccgaagaaatcattaattttgctgggtacggaagcatttggtattccaggtcctttactgagtgagctggatttatgtttagagattcaacagttcggggtcatcagatcgatgaatattcaaactgccactgcagtcattgttcattcctacaccgttcaacacatgtaa

SEQ ID NO: 368 - DNA, 798 bp, Saccharomyces pastorianus
atgtccctttcagtcgctgaaaagtcgtatctatacgactcgctagccagtacgccttcaattagacccgatgggaggctgcctcatcagttcagacccatagagatctttaccgattttctaccaagttctaatgggtcgtccaggatcatagccagtgacggtagcgaatgcattgtgagcatcaagtccaaagtcgttgatcattccgtggagaacgaactgctccaggtcgacgtggatattgcaggccaaagagacgatgccctgatagtggagacgatcacttccttgttgaataaggttctgaagtccgggaatgggatagactcgtcgaaactgcaattgacaaagaaatacagttttaaaatatttgttgatgtcttggtcatttcttcattctcatacccagtttctttaatatcgtttgccatttattccgcattgaactccacatatctaccgaagcttatttccgcgtttgacgatttggaagtagaggagctgcccaccttccatgactatgacatggtcaagctcgaaatcagcccacctctggtgtttatactggccatcgtgggcaacaacatactcgtggaccctgctgccaacgaaagcgaagtggccaataatggtctaattgtcacgtggtcgaatggcaagattacgtctcccatcagatcggtagcattaaacgactccaacgtcaaagggttcaaacctcatttgttgaaacaaggtcttgcaatggtagagaagtacgcctctgatatagtacgatcattggagaatttataa

SEQ ID NO: 369 - DNA, 1674 bp, Saccharomyces pastorianus
  modified_base (878)..(916): a, c, g, t, unknown, or other
atgatggaggaattcacatatgagcacgatttcaactctcacttcgccaccgatctggactatttgcaacaacccgtccaacagcaacaacaacaacaacaacaacaacaacaacaacaacaacaacagccaggacagactcaaagtctggaacaagaccaggatcaggagcgacacatgaatgacatgagcgtttcatccaatacatcagatggtggcgctcaacggccaaagaggactcgggcaaagggtgaagccctagacgtcctgaaacgcaagtttgaaatgaatcctacaccttctttggtggagaggaagaaaatatctgatctgataggaatgcctgagaaaaacgttaggatttggtttcagaacagaagagctaagttgcggaaaaaacagcacgagggaaataaggatccgaacccctcatcacagtcccatgataatactaacgattacgaccgtggtaacgaaaacaattcagtaaccacaacgagtacgtcttccatttttcacgatgaagatctgactttttttgaccgcattccactaaatagtaacaacaactactatttcttcgacatttgctctatcaccgttggaagttggaacagaatgaaaagcggtgctctgcagaagaagaactttcaattcattaaagacttgagaaacttatcgccaataaagatcaataatatcatgtcgaatgccaccgatttaatggttttgatttccaagaaaaactcagagatcaactattttttcagtgccatggcaaataacactaagattctgtttagaatattcttcccattaagttcggtcaccaattgctctctaactttagagaccgatgatgatataataaataatannnnnnnnnnnnnnnnnnnnnnnnnnnnnnnnnnnnnnnatgacaacgatgataatgataacattaatgaggataacgataatagtagtgaagataagagggatatcagagataattttggcgaattgaaactaacggttaccagatcacccacctttgctgtttattttctaaataattctcctgatgaagatccaaacctaaataaccaatggtcaatctgcgatgatttttcagaaggcagacaggtgaatgacgcctttgttggtggttcgaatattcctcacactttaaagggtctacagaaatctttaagatttatgaattctctaatcttagactataaatcttcaaatgaaataatacctgccattaatcctgcaatcccaactactgcaattccacaacaaaatattactgctccatttttacatacaaattcaagcgcaacagattccaatccaaatacaaacttagaagaatctctgttcttcgaccatgatctattatctagttcaataactaatacgactaacagaccaaatcttgatggcggacttcaaggtaataaggatgatacgctaaatttgttggatactacggtcaacagcaacaccaaccgggatgccaataatgaggaggaccatctagttcaagaacatttgcccgacgacactaatttaatagcaaatccaaccgatcaattattgtctttaccagctgatagtgagcttccaaatactccagactttttaaaaaacaccaatgaactaaccgatgagcatagatggatatga

SEQ ID NO: 370 - DNA, 1212 bp, Saccharomyces pastorianus
atgtccagtaccgtggtgtctagaaagaggagagtcagcactgttacagaacaggagaatagtggagacgcgaggaagcatagaaagaactctaaaagagatgacaagaactcatcgactaaggatggcgatccgcagctggaattcaaagtcttacaggggtacagggacctggaaggcgagatacataagggtagggctcaagtggccaggacaggagatataggtgttgccatgaacaatctggatactgtagacaccttatttaaccaggttgttggcatacggaacaatgggctattcgctcatgatgctagagccatggtcagtataagtgaactggcccagatatcggtgaggaatctaaagttcgatgattcaaggagcatggtcaatttagaggacatggtaaattcaatgaaaagatatatgttaaaggagcatttcaaactgaataacatcaccgaaaataggaacgatttgacactggacgccgagaatcgttcagaatcaaaccaggaacaacaagaaggcgaagatgaggacgggattgcgagcggtgatcgtacaagtaaaagcacatcttcttttaaggccacctccatgaggcataattatttacagcagttctcgcaccacaatgatttctcccagtttaattggtttaggatgggtgccctctacaatgttgtgagcaaagacgctcccatggtagaccatctgatgggacccctttccgttgagaggagactcaaagtatctacccaacgaagaagaaataacgaccaaatcggtgaaaaaatcactgctgaaaaaattactcaaaattcgttaaattctacacaacaagaaactacaccagaacaggtaaagaaatgctttaaaaaactttctaaaaaaataggtcctgaaggttccataaaccttttcaaattcataatagacccaaattcattccccaagtccatcgaaaatctcttttataccagtttcttgatcaaagaagggaaattgatgatggagcacgacaaggaaggtctacctacggtcaggataaaacaaagcataagtcataatgatccgaggagcaaagaaattgaaaagcaaagacgtcgtgacgctcatcagaaccatattattttccaaatggacatgcctacttggcgaaaactaatccaaaaatttaacatcacttcatcattcttagattaa

SEQ ID NO: 371 - DNA, 3294 bp, Saccharomyces pastorianus
atgactgaaaaaagatcttttcccactgtagatgtgaagatcgatgacgaagatagtcctcagctagaaaaaaaaatcaagcgacagtcaatagatcatggcgttggtagtgagcctgtttcgacgattgagattattccaagcgattcttttcgaaagtacaacagtcaaggtttcaaagccaaggatacggatttgatgggtacgcaattagagtctacatttgaacatgaattatcgcaaatggaacatgatatggcagaccaagaaaagcgcgatctttcttcatacgaacgtgataagttgccaagcgatttcgacccagataaatacgatatttctttccaacagatcgatgctgaacagaatgtgttaaatggtatgaaagatgaaaatacttctactgtcgtgagattttttggtgtcactagtgaaggatattctgttctttgtaacgttacgggttttaagaattatctttatgtcccagcgcccaactcatctgatgctgatgatcaggaacagatcaataagtttatgcactacttaaacgaaacatttgatggcgccgttgattcgattgaagtagtaccaaaacaatcaatctggggttattctggtgataccaaactgccattctggaagatttacgtcacttatccacatatggttaataagttacgtactgcatttgaaaggggtcacctttcgttcaactcgtggttttcaaacggtaccaccacttatgacaatatcgcatatactttgagattgatggtagattgtggaattgttggtatgtcatggataacgctgccaaagggaaaatattcgatgatcaaaccagatagcagagtctcttcttgtcaattagaagtgtcaattaattatcgcaacctaatatctcatcccgctgaaggtgattggtcccacacagctcctttacgtatcatgtcctttgacattgaatgtgctggaagaatcggcgttttcccggaacctgaatatgatcctgttattcaaattgccaacgttgtgagtattgcaggggctaagaagccgttcatccgtaacgttttcactttaaacacatgttcacctataacaggttcaatgattttttcgcatgccacagaagaggaaatgttaagccattggcgtgactttatcatcaaagctgatcctgatgttatcataggctataatacatcaaatttcgatataccgtaccttttgaatcgtgcaaaggctttaaaggtaaccgattttccatattttggtagattgaagagcgttaaacaagagattaaagagtcagtgttctcgtcgaaggcctatggtacaagagaaaccaaaaacgttaatattgatggccgtttacaattggatcttctacaatttattcaacgtgagtataaactaaggtcttatacattaaatgctgtttctgcacactttttgggtgaacaaaaagaggacgtgcactatagcattatttctgacttgcagaacggtaatagtgaaacaagaagacgactggctgtttactgtttaaaagatgcttatttgcctttaagacttctagaaaaattaatggcattggttaattataccgaaatggctcgtgtaacaggtgttccattttcgtatttattggctcgaggtcaacagattaaagttgtttctcagttattcaggaaatgtctcgaaattgacacggtaataccaaatatgcaatctcaggcctctgatgatcaatacgaaggtgccactgtcattgagcccattcgcggatattacgatgtcccaattgcaacgttggatttcaattctttatatccgagcattatgatggcgcataacttatgctatacaactctctgtaataaagacactgtggaaaggttaaattttaagctggaagtagactacgtcattacaccaaatggtgattactttgttactactaagaggaggcgtggtatcttaccaatcattttggatgaattgattagtgctagaaaacgtgctaaaaaagatttaagagatgaaaaagatccatttaaaagagatgtcttaaatggtagacagttggctttgaaaatttcggcaaactccgtttacggttttacaggtgcgacagttggcaaactaccatgtttggccatatcttcatccgttacggcttatggtcgtactatgattttgaaaactaaaaatgcggttcaagagaaatattgtatcaaaaacggttataaacatgatgctgttgttgtctacggtgatactgattctgttatggtgaaatttggtacaggagatttaaaagaagctatggatcttggtacagaggcggctaagtatgtttccactttgttcaaacagccaatcaacttagaatttgaaaaagcatatttcccatacttactgatcaacaaaaaacgttacgcaggcctattttggactaatcccgataaatttgataagttggatcaaaaggggcttgcatctgttcgtcgtgattcgtgttctttggtctctattgtcatgaataaggttttgaagaaaattttgattgaaagaaatgtggatggtgcgttggcttttgttagagaaactattgatgacattttgcacaatagagtggatatttctaagctgatcatatcgaaaacgttggcaccaaactatacaaacccacagccacatgctgtcttagctgagcgtatgaaaagaagagatggagttggtccaaatgttggtgaccgtgtggattatgtcattaccggtgggaatgataaactttataacagggcagaagatccgttattcgtgttagaaaataatattcaagtcgattcgcgttattatttatcaaatcaattacaaaatccgattattagtattgttgcacctatcattggtgacaagcaagcaaacggtatgttcgttgtaaagtccatcaagattaacaccggctctcaaaagggaggcttgatgagttttatcaaaaaggtagaggcttgtaaaagttgcaaaggtcctttgaaaaaagatgaaggccccctctgttccaactgtttagccagatctggtgaattgtatattaaagcattatatgatgttcgggatttagagcaaaagtactctagactatggacacaatgccagagatgtgcaggtaacttgcatagtgaagttctgtgttccaataagaactgtgacattttctacatgcgtgttaaggtcaagaaagaactacaggaaaaagtggagcagttaagcaaatggtaa

SEQ ID NO: 372 - DNA, 1545 bp, Saccharomyces pastorianus
atgtgttcaaccacgaagagggaacactctggtgaaatatctgatccttcattcaagagacaacaacgagataacgatgccaaaccaagccttgaatatgcttgtttgtgccacttggtgaacctgatacctggtaaggaacaaaagattgagatatcgaataggaacatcactactatcggtaggagcaggtcgtgcgatgttattctgaatgagcctgatatctcgactttccatgcggaattccatctgctccagatggacgtagataactttcaaaggaatctgatcaacgtcattgataaaagcagaaacgggactttcattaacggcaaccgtctagtgaagaaggactacattttgaaaaatggtgatagaatcgtctttggcaagagttgctcttttttgtttaagtatgcatcgtcttcttctgctattgagaatgaagacgaaaacacaagcccagaagtacgtacatccaagaatgacgatgaagtcttcaagaaaccacaaataggtgctgcaagtagtcaaaatgcgatgaccagttctacatgcaaaaaaataatcaagacaaagcctgtttcgttctttgataaatatctattggggaaagagttaggtgcaggccactatgccctggtaaaagaagccaaaaataagaaaactggccaacaagtggcggtgaaaatatttcatgctcagcaaaatgacgaccagaagaaaaataagcagtttagggaggaaattaacattctgatgagagtgcatcatccaaatattgttaacttattagatagttttgtggaaccgatcagcaagtcgcagatccagaagtatttagtactggaaaagattgatgacggcgaactgtttgaaagaatcgtcagaaaaacaagcttaggacaagatgaatcaagggccttattcaaacaactgttaactgggttgaagtacttgcatgaacagaacattattcatagagatatcaagcctgaaaacattctattgaatataacaaggcgtgaaaactcgaatcaaatccagttaggcccatgggatgaagatgaaatcgatattcaagtcaaaatagcagattttggtttagccaaatttacaggtgaaatgcaatttacgaataccctttgtggtactccatcttacgtggcgcctgaagttcttacaaagaagggatacacttcaaaagtcgatctttggagtgcgggtgtcatactgtacgtttgcttatgcggtttcccccctttcagtgatcagttaggccccccttcgctaaaagaacaaatcttgcaagctaaatatgcattttactctccatactgggacaaaatcgatgattcagtattacatctaatttctaatcttttggtgctgaatcctgatgagaggtacaatattgacgaagctatgggccatccttggttcatagactcaaagaaacataattcagtctcaatggatttacaacgtttgcaaattaccgacaataagatacccaaaacttactctgaattatcctgcctctaa

SEQ ID NO: 373 - DNA, 1065 bp, Saccharomyces pastorianus
atggatttgaccgtggaacctaatttgcactctttgattaactcaaccacccacaagtggatttttgttggtggtaaaggtggtgttggtaagaccacttcatcatgttcgattgccatccaaatggctttgagccaaccaaacaaacaattcctactgatctccacagatcctgctcataacttaagtgacgcatttggtgagaaattcggtaaagatgctagaaaggtatcaggcatggataatttgtcatgtatggaaatcgacccatccgctgctttgaaagatatgaatgacatggctgtttcccgtgcaaattccaacggaagtgatggtcagggcgacgacttaggaagcttgctacaaggtggtgcccttgccgatttgaccggctccattcctggtatcgatgaagctttgtcatttatggaagtcatgaaacacattaagagacaagaacaaggggaaggcgaaacctttgatacggtcatcttcgacacagccccaaccggacacacgttaagatttttacaattgcctaacactttgtccaagctattggacaagttcggtgaaatcaccaataaattgggcccaatgctaaactccttcatgggcgcgggtaatgtcgatatctctggcaaattgaatgaattgaaagccaatgtggaaacaattagacaacaattcacagaccctgacctgaccacttttgtctgcgtgtgcatcagtgaattcttatctttatacgaaaccgaaagactgatccaagaattgatctcctacgacatggacgtcaattccatcatcgtcaaccagttgctatttgcagaaaacgaccaagaacacaactgtaagagatgccaagccagatggaagatgcaaagaaagtacttggaccaaatcgacgaactgtacgaagatttccacgtcatcaagatgccattgtgtgctggtgaaatcagagggttgaacaacttgacaaagttttcgcaattcctagacaaggaatacgaccctgttgctgacggcaaggttatttacgagctagaagataaggaatag

SEQ ID NO: 374 - DNA, 1008 bp, Saccharomyces pastorianus
atgtctgagcaggacgctgaagctaagcgtgcgaagcaattggaagaagccagaaagagagtggaggaattgaagaagaagaaaaataagaagggtaaaggtaagaagaacaagaacaataatgtcactggcactacaggatcagacacacccgaagtagagagcacgccaggtgaagaattgccgcaagaacaaacaccagttgttgactctactaaaagtgaaaacgaacccgaacacgtcgaagaaaacgaggagaatgaagaagaggaagaacttgaagagaacgaagaattggctgcttcaaatgattctggtgttaatgaggaagaaaccaaagtggaagatgaaccacacgcttctgtggaagaggaaaattcagaaaatgtaaaaaaggaggaggatcaagaaattttgagccacgcagaaaataataaaactattgggactgcaccggtagtcgctgaggagcctaaagaagtaagggaaacctcccattcatcagctgaggcagacgatttatttggtggtgatgacaacgaagaatccgatttcctgaccaccatagaaaatcaaagagaagaagacgaattaagcaaactaaggacagagcttgaaacactaatacaagaaaataaacagttaaagtttttaagcatggataacgaaactacgattgatgatttacaagagcaattgcaagagagagacgatacgataaatagcctacaatacgatttacaaacaacaagggatgaactcacagctacacaacaacgcctaagggaagccgaaacaaaatcagtaagaactaccacagcatcgcctgttcattttgcagattttaatagcaattcaacttcttcgaaatccgccgctaattttgcgccaatggctcgtggtaaccatgcagaagtcgatcgtgtcatgttggataaatggcgtaactggaacgttgacatgaccggttggagaagtattggttcgggcccaatcatggagttttga

SEQ ID NO: 375 - DNA, 2454 bp, Saccharomyces pastorianus
atgtcggaacaaaaaacgtacaagcgtgtggggcaggacgatcccgtgcccgaactggacatcaagcagggacccgtgagatcctatatcgttactgacccgagcgccaaattggcctcgttgcggtccatggttaccgtgaaggagaaattgatcgtggcgtgtctggccatctttacagcgattgtcaggctgcatggtctggcttggccagacagtgtggtgtttgatgaagtgcattttggcggttttgcctcgcaatacattaagggcacctactttatggatgtgcatcctcccttggctaagatgctgtatgctggtgtggcatcgctcggtgggttccagggcgatttcgatttcgaaaacattggtgatagcttcccatctaccacgccatacgtgttaatgagatttttctcagcctctttgggggccctcactgtgattttgatgtacttgactttacgttactccggtgttcgtatgtgggttgcgttgatcagcgcactctgctttgccgttgaaaactcctatgtcaccatctctcgttatattctattggatgctccgttgatgtttttcattgctgctgccgtgtattctttcaagaagtacgaaatgtaccccgccaactcgtggaatgcctacaagtctttgttggctacaggtattgccctcggtatggcttcttcagccaagtgggttggttttttcaccgttgcgtgggtgggcctgctatgtatttggaaactatggttcatgatcggagatctgaccaaatcctccaaatccatctttaaagtagcattcgccaaattggccttcttattgggtgttccctttgccctatatctggttttcttttatgtccatttccaatcgctatacttggacggtgatggggcaagctttttctcgcctgaattcagatctacactaaaggacaacaacatcccacacgacgtcgttgctaatgtcgggatcggttccactgtcagtttgcgccatctttctaccatgggcggttacctacattcccattcgcataattacccagccggttcagaacaacaacaaatcactttatatcctcacatggatgccaacaatgaatggttgttagaactgtacaacgtgcctggtgaatctttagtgaccttcgaaaatgtaaccgatggcacaaaggtcagactattccattctattactcattgtagattgcattcccacgaccacaaaccacctgtttcagagagcagcgattggcaaaaggaagtctcctgttatggttatagcggattcgacggtgattccaacgatgactgggtagttgagattgataagaagaactcagctcccggtattgctcaagaacaagtgagagctttggaaactaagttcagactgagacatgccatgaccggttgctatttgttctctcacgaagtcaaattgccagcttgggggtttgaacaacaagaagttacctgtgcctcctctggtagacatgatttgacactttggtacgttgaaaacaacagcaacccattattgccagaagacaccgagcgtatctcttacaagccagccaacttcatctccaaatttattgaatcccataaaaagatgtggcacatcaataagaacctggtcgattcccacgtctatgaatcacaaccaacttcatggccattcttattgcgtggtattagttactggggcgaaaataacagaaccgtttatctcctgggtaatgctgtagtatggtgggctgtgacagccttcatcggtatctttgggttgattgttatgactgaattgttctcgtggcaattgggcaagccaatcttgcaagattcgaaggttgttaacttccatgttcaagtcatccattatttgttgggtttcgccatccattacgcgccatccttcttaatgcaacgtcaaatgttcttacaccattacttgcctgcttactacttcggtatccttgccctaggccatgccttggatataatagtcagttatgtcttccgtaacaaaggacaaatgggctatgctgtattggtcaccttctttgctgcttctgtatattttttcaagagttacagcccacttatctatggtactccatggactcaagaactgtgtcaaaaatcgcagtggttgtctggttgggattacggctgtaattcctacctctctacatttgaagaatacaaaaatcaaactttaacaagccgtgactcccaacctgccactactagtacgattgaagaaattactatagaggaaaatggtccatcatatgaagacctcatgaacgaagaaggtaaaaaaatcttcaaagacaccgaaggtaatgagttagatcctgaagttgtcaaaaagatgttggaagaagatggtgctaacatattgaaagtagaaaagagagctgtcttggaataa

SEQ ID NO: 376 - DNA, 441 bp, Saccharomyces pastorianus
atgactaataccggttgtttatccccaaacgattttttatcaaaagttccggaattttttaagactgcaaatgaaaaacatataactgtacgtttaacagccaaaaggctcatagagcacgatccggtagaagggaatcttgaatttgatgctaccaacaatcctgaatatgacgtttccagaaaagcgcccgagatttccgtcaattcaagctctgacaaggaatacccattgctaatcagaatgtcctatggctcacatggcaagaaggctaaatgctctacaatggtaaaagctaatgaactagatcaattttggcaagaatactcatctgtgtttaagggaggtatgcaagatttgattaagaagaagaaaaagaagagcaagggcagtgccagtggtaaaaattctaaaagaagcaaggtaggaaagaaaaattga

SEQ ID NO: 377 - DNA, 1368 bp, Saccharomyces pastorianus
  modified_base (219)..(219): a, c, g, t, unknown, or other
atggacatattcagacagacttttggaaacaatgacgaatcatttattcgaatcccaggagctttcaatgaggaaccgcccgcaaatgtgaatggagagggagataatgggaacaacagtgcggatgaaccaataagaagtcaaagtacgcgttcgaggtcagtccttcgttttctgttccaagctcccttaatagttctctactatgttattatttanttattccgaagttcacgtcttctgaaaccactgttaagatttcatgggttctatcaaagaaagcacaatcgtttgttggatcatggctctcaattgaaccgtctattggaaggcttgcagaatgagtctcaggttgtaatgccttctgaaggtaacggaaatgctgacggcggcagcaatagtgaaaatacgggcaacagtcaaagtagccaagttcagttcagtttcggttccttatacaatcctgaaaatggaatgttttccaaaggtatcatgcaaaatagttataccgaattgctggacaattgcagcgaacaagtaaaatttggagtgatttacctgcatgacccgcttttggataatcatatggactatgttaataagatattatgctcagagacctttgttaatatgatacggaaataccaagtgctattatggtatggtgatgttaccacctccgaagggttgcaagtttctaatgcattgaaaattagacaatatcccctacttggaataatttctttaaaagctgaaagaaaaatagaactaattgcgagagttgaaggctctatctcaaataataaacctcaagacctagagactatcttttctaaaaattatcctcgtttgatccaattgcgtcagcaaaggcagaatattgaaatgcaaagactgataaaacaacaacaagattcgagatatcaagattctttaaggcgcgatcaagaaagagacacagaacgattggaggagatgcaaaggcaacaaagagctcaagaacacgaaagattggaaaaggaatggctactgtggagaaaaggacaactgaaaccagaacctttgtctgaaaaaaatgctagcaaagttgctattagattagaagatggccaaagactagttagaaagttcgatgcatctttaccaacggaggaaatatacgcattcgtagacttacatttacatggcttacttgatccagaagaaccaactcaacttgctgagcgacctgctaatttccagcaccagtatgggtttaaattgatcacaccagtaccgagaagagagcttgagatgtctaccataatatctgaagttagtggtatatatccatcgggaaatatagttatggagcgtcttaatgaataa

SEQ ID NO: 378 - DNA, 1467 bp, Saccharomyces pastorianus
atgaatcgaaaggatgtggtaaacgaagtatatgacgattcggatttgattgacgaagaaggggaatctagactggcatggattaagagatggtatcagctaatcacttcgcccttggatttgcagctggtaataaatgaacaattagaaatgatcgactgggatgttcatgccaaaagccttgctaagccgctggggaattttttgactgtgtgtttttttgttatgagacttttgcaagacaacctaatcaagcccaactattacaaactaaatgttaagtcggatgcctttgatctctctaaatcgaacaagttaaaagagtttgattacttgacggaaatatcttctaatttccaaaatgataatcagttcgatgcctttcaatcttggtattttgttactttaagatttctggataatctctttaaaatttcgattttcgcattactgtcattaaacttttatctgacctttaagttcatttttggttatttcaagacttacaatttgtttcatctaaaaaatgaacttagttctccaaatttgaccaaacatagcttgagtgatctacgcaaagaatattacgaagacatctataagcagtcactgtggtctatgttgaaacacttttttagaggttctcgtgatgatacaccatatattgatcaggatgaagatgaaatattttatcaattaaagaaatggactcccactaaatttataaccaattttattgtgtctttttcaccaacagctattgttttcctaagcttttctgaagtttcgttcacaacggcaatttccctaatcttacatcaatacgttctaaatttcgttataattaagagatttcaggcaagcctggaagacggtttgattttatcgagcgcagctttacaggaatatgaagataagcacatcatgacacgcgtaaaccgacaagccagtttatgcactcgatcgaatggtggaggtactggccgatttggatcgggatctaaagcaccaaaagttttcaccactcattcattaaatggtgaagagattagagaagtatataattacaagaaaaaggagttcgaagtactgccaagtgagagtgaaaatatatcggagcctttcaaaacaagtagacaatactttgatgacgaacctcaaaattttggaagctctacagatcctggcgaagtccagttttcaccacacctttccccatatttccgggagaagatttccaagaataaccctgttcgattatctccacaccagtatttgcaggaggatgaaacctacttgtcaaaccaagaccaaaatagatcaaaatcattgagcccgttgagacaaacacctttaagtgcaagaatgaaaagttttgaagattcggaattcagtgcattgaataaacatgacatcaatgccatacttcgttcgcccaataaaatcaagtactatcgtaagaaatag

SEQ ID NO: 379 - DNA, 1596 bp, Saccharomyces pastorianus
atgttcggagtacattctagcagcaataacggtgggtttacaaacctcacatcgcagcaaccacaaacgaaccagatttttcaaccacagccacaatcacagcaaccacagcaacagctgcaacaacgctcgcaggtcaatgcatctctcggcccaggcccttcgcagtttggcacgtcatttaacaataataacataaacattaacaacaatagtagtagcattagtaataatagcattaacaataataacaatataaacaacagcagcagtagtataagccaacagagccagggaaataaccctagttgggttaataatccgaaaaagagatctactcctcacacggtgatgaggaggaaaacaacaaagcaaaactcttcatctgatattaaccagaaggatgattcgtcacccataaacatcacaatgaggagttttagcaagcagaaccaggactccaaacaaaatgacagtaacaaatcaggagcaaataatgatctgaattcttttttgtcgagttttaacgacactccacccaccatcactctacaagactggcaacgggaagatgagtttggttctactccatctttgacaacgcaattcgtctctaataaatgcccaaccaaaaaattgaaaaatccatcttatgactccaagaatactccgaatgtctttgataaagattcatacgtcagaatagcaaacattgaaaacaacgatttggataataacaacgccatcaccgatactagcaatggcggtgctcatgaaactttagcatgcaactcctttaagccttcaaacctaagcgcaattatcgtatttggctaccccgaatcgatttctaatcaagtgatcaagcacttttcccattttggacatatcatggaagattatcagatattaaggttaagtcgtggaatcagccccagctcattcagaatatttcacaacgacgatacggctaacgatcatactgattcttctgccaataaagccatcagtctgaaaaatagggataatgaatcaactaatagaaaatatccaatatttactggggaaggttgggtcaaattgacctacaactgtccatcttctgcattgagggcactacaggaaaacggaagcatctatcacggtgccttaattggttgtatcccgtattccaaaaatgcagtagaacagctggctggttgcagaattgataatatcgatgatattggcgaatttaacgtctcaacgtatcaaaactcctctacatcatccacctcaaatacaccgtccccaccaaacgtattattaactaacgatgcttttctaaataagggaaccatcactcctgcaatcgatgttggtaatggaacacacttgtcgaatccaaatatgacccattctccgaataagcgattaaatgttaaagatggcaagtcgctcttcattcaaaacacgagtacaaatacaaacgccccaacacttttacaaagtctagaatcgaaaatgcgtcaacaggaggagaaatataaaaataatgaacccgctggactcatacataaactaaataattggttatttggctggaacgatctataa

SEQ ID NO: 380 - DNA, 822 bp, Saccharomyces pastorianus
atgttgattaccgagaccttccatgatgtgcagacgtcgtacggcaccactttgcgtgtctacgtgtactctcctaaaattgcgggctatccgcaggcgaagttccccggtgtggtcttgtacagtgagatctaccaagtgacgggccctgttcgtcgttttggccaaagaatcgcctctgaaggctacgtggttgtggcgcctgccatctaccacaacttcatgggtcctgaggcgttgccctacgacgtgcaaggcaccgatatcggcaacgagtacaagatcaagaagccgctggagtcgtacgatgaggacaacaagctgtgttgcgacctgcttttccaactaccgcagttcgacggcaaaagaattgggtccacagggatgtgtctgggggggcacctggccttcagggcgttgttggacaagagggtcacgtgcgcaacgtgcttcttccccactgatattcactcgagaaccttggggctgggcgagaacgacgactcactggaacgtgtttcgaaggagctgggcaacgaccaggaaatggttctgatcttcggtacttcggacacccatgtggacccggagggccgtgacctgatcaggaagacgctcagagaccacggcgtgaagttcacgttcttggaggtcttggccgcccagcatgcgttcatccgtgatgagttcagcaagggtagattcgactcggccatcacccagagctgtctcggattcctgttcgagcaattcaacaggaaactgagacttgacctgggcgagttcgaggacgataacagcccactcgaacacgtttgttga

SEQ ID NO: 381 - DNA, 1638 bp, Saccharomyces pastorianus
atgctacccagatttggtttggcgaggaccgctaggtccgtgcaacgttttaaagtgacacagatctccaaaacgttcttccattccaccgaagttggtaaaccggcaccaccgcacaagctgtcgaagtcttacgcctcggttttcaagaagtggtttgtcaggggcttgaagctgactttctactccacgctggcgggcacgctgtacgtttcgtaccatctttacagggaatcgaacccacccaagcagattcctcagtccactgcgtttgccaatgggctgaaaaaaaaggagctggtcatcctgggcacgggctggggcgccatctctcttttgaagaagctcgacacgtcgttgtacaatgtcaccgtggtgtcgccaagaagtttctttctgttcaccccgctgctcccctccacgcccgtgggtaccatagagatgaagtctattgtggagcccgtgaggtctattgccagaagaacgcccggcgaggtccactacatcgaggctgaggcactggacatcgaccccaaggcgagaacggtgctagtgcagtctgtgtccgaaagcgaattcttcgtttccaacgtgaagtacgactatctggtcgtcagtgtgggcgcgaagacgaccacttttaacatccctggtgtctacggcaacgcgttgttcttgaaggagattgaagatgctcagaatattcggatgaagcttatgaagaccatagagcaggcgagctcttttccaagaaacgacccagaaagaaagcgcctactaacgtttgtggtggttggcggcggccccacgggtgtggagtttgccgcagaactgcaagactacgtcgaccaagatttgagtaagtggatgcccgacttgagtaaagaaatgagcgtcatcctgattgaggccctgcccaacatcctaaacatgttcgataagacgttgatcaagtacgctgaagatctcttcgcgagagacagaatcgatctgcaagtgaataccgctgtgaaatccgtagaaccaacttacatccataccttgcaaagcggccagaaggccagcgatatcccctacggaatgctcgtttgggcaaccgggaatgaaccgatcgagctttcaaaggtgctgatgggcaaagtaccggagcaaaccaacaagcgcggtcttttgattaacgacaaactggagctactgggcgcagaggactctgtctatgccatcggcgattgcacagcgcacaccgggttctttcccactgcacaagtcgcacaccaagaaggtgaatacctggccagaaccttggacaaaaaacttgaaatagaacaactggaatgggacatgctgaacagcactgatgagaccaaagtgtcccgtctgcaaggcgaaatcaacttgaaaaaatctaagctggataaatttaactacaagcacatgggtgcgctagcgtacatcggctccgagaccgcgattgctgacctacacatgggtgactcgtcataccagttgaaaggtatgtttgccttcttgttttggaaatctgcgtacttggcaatgtgtctctccatcagaaacaggattctgatcgccatggactggactaaagtgtacttccttggaagagactcctccgtatag

SEQ ID NO: 382 - DNA, 1341 bp, Saccharomyces pastorianus
atgtcccacgaaggtgaagaagatttattggagtactccgataacgaacaagaaatccaaattgatgcttccaaggccgctgaagccggagaaactggcgccgccacttctgccactgaaggtgaaaataataacaacaccgcagctggtgacaagaaaggttcttacgttggtatccactccaccggtttcaaggattttttgctgaagccagaactatcaagagccattattgattgtggttttgaacatccttctgaagtccaacagcataccattcctcaatccattcacggtaccgatgtcttgtgtcaagccaagtctggtttgggtaagactgccgtctttgtcctgtctactttacaacaactggaccctgttcctggtgaagttgccgttgttgtcatttgtaacgctagagaactagcttaccaaattcgtaacgaatatttgagattctccaaatatatgcctgacgtaaaaactgctgtcttctatggtggtactccaatctccaaggacgctgaactgttgaaaaacaaggacactgccccacatattgttgttgccactccaggtcgtttaaaggctttagtgagagagaaatacattgatttatctcatgtgaagaactttgtcattgatgaatgtgataaagttttggaagaattagacatgagaagagatgttcaagaaattttcagagctaccccaagagacaagcaagttatgatgttttcagccacactatctcaagaaatcagaccaatttgtagacgtttcttacaaaacccattggaaattttcgtcgatgatgaagctaaattgactttacacgggttacaacaatactatattaaattagaagaacgtgaaaagaatcgtaaactagcccaactattagatgatttagaattcaaccaagtcatcattttcgttaagtctaccacgagagctaatgaattgaccaaactattaaatgcttctaacttccctgccatcaccgtccatggtcacatgaaacaagaagaacgtattgctcgttacaaagctttcaaggatttcgaaaaacgtatctgtgtgtccactgatgttttcggtagaggtattgatattgaacgtattaacctggccatcaattatgatttgaccaacgaggccgatcaatatttacatcgtgttggtagagctggtagattcggtaccaagggtttagccatttcatttgtttcatccaaggaagatgaagaagtcctggctaaaattcaagaacgtttcgatgtcaaaatcgcggaattccccgaagaaggtattgatccatccacttatttgaataattaa

SEQ ID NO: 383 - DNA, 321 bp, Saccharomyces pastorianus
atgtctactgaatccgctttgtcttacgctgccttgatcttggccgactctgaaatcgaaatctcttctgaaaagttgttgactttgactgaggctgccaatgttccagttgaaggtatctgggctgacattttcgccaaggctttggacggtcaaaacttgaaggacttgttggtcaacttcagcgctggtgccgctgctccatctggtgtctcctccggtgttgctggtggtgttgctggtgaagctgaagctgaaaaggaagaagaagaagctaaagaagaatccgatgacgacatgggtttcggtttattcgattaa

SEQ ID NO: 384 - DNA, 1032 bp, Saccharomyces pastorianus
atggtcaaagtcgcaattcttggtgcttctggtggtgtgggacaaccgctatctttgctgctaaaactaagcccttacgtttctgaactggccttatatgatatcagagctgctgaagggatcggtaaagacatatctcatatcaatactaactctgattgtgttggttacgacaaggacagcattgaaagtaccttggcgaatgcgcaggtggtgcttatccctgccggtgtgcccaggaaacctggattgaccagagatgatttgttcaagatgaacgccggtattgtcaaaagcttggtgaccgctgtcggtaactttgcgccaaatgcaagggtcttggtcatttccaacccagtcaatagtttggttcccattgccgtggaaactttgaagagaatgggaaagtttaaacctggaaacgtcatgggtgtgacgaaccttgatttggtgcgcgcagaaacattcttagtagactacttgatgttgaaagaccccaagattggacaacaagaggacaagaccataatgcacaggaaagtcaccgttatcggaggccactcgggcgaaacgattattccaataattaccgacaaatctttggtgttccagcttgagaagcagtacgagcaattcattcatagggttcaatttggtggtgacgaaattgtcaaggcaaagcaaggcgctggttcagccacattgtctatggcattcgcaggggcaaagttcgctgaagaaatcttgagaagcttccataatgagaagcctgaaacagagtcgctcaccgcattcgtttacttgccggggttgaaaaacggtaaaaaggcacaagatttgatccgtgacaactctattgagtacttttcattgccaattgtcctgaagaatggtagcatcacgtctattgacactagcatcttggagagactgtctccaagagaggaacagttggttgacaccgctgtcaaggaactacgcaagaatattgagaagggtaagagctttattctaaactcttccaagttatga

SEQ ID NO: 385 - DNA, 3150 bp, Saccharomyces pastorianus
atgttaagggctcagaagttacattcgttggaatcttctaatattagtgcaattctacccatcgaacaatcgcaaaaactggttttagcgaagaagagtggtgacgtagaagtttactctcgagatggcaatacgtataaactatttcaactgtatccggatcttttacagaatgctaaaaatgagtcttcctttccattgattgagaatttctactttgcgaacgagctctctaccatctttgcacagtgtaaagaaaccttaattttactgagtactactaatttacaagaatatgatcgaatcattgatagaaggggcataaaacattgctggctgtttgaaaagacacacaaaaacaaagaagaagtcaccacttacttggcatattcaacaatcaacacttctaagatgcgaatattaatatgggagggaagagcgtataagaacatgatagaagcgtcattatcatttaggaaggaaatcataaggtccatatatcctggagaagtaggcattgttttaacgaccgatctaggaatataccattggccctataacaagtcatctttaattagaattgagaaaactgtgagaaacaaatatcctaaggatatgatatcagcgttaacggaactaatgaatcaaacagaaaaaaccgtagagaagagcccaaaaaaacatcatcgtgatgatactcaatccttctcttctatggaccgtatgtccaggaaatcaagtgtatcaagtatatggtacagaggcataagtagcgatcgttgtaacaaaatacgatatatcttcgaactggaaggcgatgaccctgctcctctaataatcgatggaactaccaagaaactatttaaactagacttcatgcataacaatgaagagccgtttttagtcgctaccgatcatactacattttccgaatcaaattccgaattcgatcacatgcactatttgtcatcccacttgctgatgctatataacacagatactatcaaattcgtcgattacgcaaatggatttacctttttacagcaaaaaataccagagggtataaaatgggtgaagagtctttccggtacttattttttggtatggacttcgaatgacgagttgcagttattctcctaccatgtagatgatggatctgatgattatgatgaagagtcaatttgcggtgacattagtgatcctgacttttatcaactgtggagaaaagttcttttttataagttcttcatcaactctcctaattctacagagttatgtgtatcagaaaacccccaagagtcattagatatatgtgctatgaaactgagagacttaactgtgatgtggtgtttgagaatttttgataaatttcaaaattacataatccaattggaaagtagcaaaaactcaaagatgcttcgatccaaatgtgaagaaataatcgttaaagatatattcgacttatttatcaaattttgggctccgcctcaattagttatattgaaagtatttccttctgctatttcaagtctggtattagaaattactggccaagagcatcattgcttgttcaaggaagccgaagaagctaaagagacatatgacattccgccacatctattgaacaagtggtgcttaccgtatcttactgatactagaagacacctgcagaatttgttaagtggacagcacgatgacgaaaaccgtataacttggttttatcgcgaccgaaaaattaagcagaattttgactttttcctcatcaataaccatgatgacgtggatcttgaaaccatgttaactttgatagacaccgttttatttaaatgctatctttattataacccttccatggtgggtccattcatccgtgtagaaaatcactgcgattcggatgtcattgtgactgagttgaaaatacgtcatatgtttaaagatcttattgatttttactacaaacgtgggaatcatgaagaagccttaaagtttcttacaaatttggttggtgaattagaatccgataatacagaagaaaaacaacgacaaaagattgagcatggcgttaaaatcttagttatttattacttgaaaaagttgtctaattcagaattaggcgttcttttcaaatatactgactggcttttgaaaaggaacaacggttcgattcaggaaattatttcatcgatatattttcacgattctcaagcatgtaacggaagggaccacttaaagatatatgaatatatccagaagtacgacaagttactcgctctccaatacttggaatttgcaatcagtacctttagattggaagggaatagcttgcacactattttgatcaagctataccttaaaaatttggatgttccctcaaccaaaatcaagctaaaatcactactagagacaacatccgtctatgaacccagaacaatactaagattactaactgaaactattgaggccggggcggatcttttgcccgcgaatgacctcaaattcgttaaatatttgaagatatttcctttatcaaaattagaaaaccatgaagaatcggtacgaatattgcttgatgaagtggatgattacaaagcagcaacaaactattgtgatgacgtatacgaaagcgactcaacaaagggagagaagcttttgttgtacctatacgataaactagtttctatatatgattcaaacggaaattccaagctgattctggggtttttacaagaccatggttcaaaattaaattcggcggagatatacaaaaacctacctcagggtctccccttgtatgatatcggtagagtgatttctcaattgttaaagaagcactcgtcgaaaatggacgaaactagaatagaaaagaatctccttcaagttgagcttgtgaccactactttctgtctcaatgacagtttatcttcatacggagtcttgtcggatagccataaatgccctatctgcaagaaaataatctcgaacttcggaaccgattctatttcatggtttactagagagggtagaaatatcgtcacgcactataattgtgggaaagtactacaggatcgttttactgctcaaactaaagcatcttccaaaactgaacaaaagactttgggagacgttaagaatgaaataagcaacaagtaa

SEQ ID NO: 386 - DNA, 894 bp, Saccharomyces pastorianus
atgtcggtaagtgaacaggaccctaatagagcatacagagaaacacaatcgcagatatacaggttgcaggaaacattactaaattctgcaagggcaaaaaatttgcaggaggaagaaaggcaagagaacaatagtcaaccgctagatcagtatgggaattctcaggagcttgcaacgagtggagtttcagccttcaacgcacctgaggtagattcacagtcagttctaacttttactgcagaaaaatatccaaaagaaccaaaaaatttgggtacactctactacaaccgtttcaaagagggatccttccgtgaggattcgacgagctactctgagagacacaaattcccgtataatctttatgacaggacccttccaccaccgttccttccagctatcggtattgataagatcaacaatatagtaatgttgaaaataacatatgaagacgttcaggccagcttggataatttagaatctcctagagcgagaaataatgagatttgggggtgtgatatctactcggatgattcagaccccattttagttttaagacattgtgggttcaaacccgttgcatctccaggtaactcgttccccaaactaaggagaacgccagcaaatatggcaaaccaagatagtgtcataggcaaccttcccctgctgacagggacacctttcgatttagaggtggagctcttgctactacccactttacaaaagtaccctagcgtgaaaaggtttggtataacctcgcgagaatgggggtcggaggacacggttttacacgatgggataagttatggtatctatagcattgcaattaagcaaaggttggatagcaatagacctcatgaaccaaacgggtacataaaaaatttgaagtggacttga

SEQ ID NO: 387 - DNA, 2103 bp, Saccharomyces pastorianus
atgacggccgaacctgctgctaagaaaatcaagctaggattaagtgatcctagcgaacctctcactcaatctgatgtgatagcattccaaaaagaagctttgtttaggtgcataaaccgtcgaagagttgattttgaagcattacgaaaacaatacgagctttcgaggagggagtgtattgatgtttcgcgtaagctggcgaatattatggctctcatagtaaccttggctagatttattgaaacattttgcacggacgctaacgaaaaaaaattgtgtgaagagattgctcaaggtgatgagacgctaatagttcaacgcagtgactcttttatgaaattattgaccaagtacgggaaacctaattctgtggacggtaattctaataatagtacgtcggaccatattcaagaattaacaacagagttgaaaaacttgcggaagagcaaagaggagctgttttaccaaaactcacagttgactgaggagatttctgctttaaaagaatattatacaagcttaatacgcaagtacgatagggatgagtcctttacaataaagcgtgtttttaaagaagagaagtcagatgatgcaaaggaaatacaagaaactaaaagtgaaaccaatgataatagtatcaaggccgaaagtaacgacttgcttacggctaatggtaaagaaaaatccgggagctcggacaaaggtgacgaattcgtgcagcaggaagatgaaagaaaggagaatgctgaacgtgaaaaattggatttagatcttaaattttctgattttcgttcagaagtaagttctctaaagtccactattaacgaccttgagaatatcagaaaagaaaatgaggaggagcttatcaaaacgcgttctgagatatctaatttgaaaaagcaacaattggtagtggtgcagcaagatccaggtatcacgtcatatgaccacgactctttgctagcgaaaattcaacgtctaacggaacaaaacgaggaattgtcggaagtcaacggtttctttctatcaaaattccaggttttatccaaagagaaggaggtgtatacaaaccaagtccgagatgagttccaaaaaaaccttgattctttgattgaaatgaacaattcgttggaaaaggacgttgtaagaataagaacagctcgtgatgatttgctaagtaaaatagccattctagaagctgaaaaatctaagactgaaatattagaagatttgcaacatgccattgatattttgaaggagcaatggattaaaaccgagcaaagatcaaacaatgtaaataccgtacagactcaagatgcactgatgaaggaaattcaagatttggagaaaggctttagagaattatcgaatttaactcacaaaaagtattctgaggtcattaatcatgaatccgtcatatccaagctaactgtcgaaaagacgaaagctgatcagaaatattttgctgcgatgaggtctaaggactcaattttaattgaaaataaaaatctctcgaaaagcttaagtaaatcgaatgaattaattctacaattaaaggattctgatagactactacaacaaaagattggaaatttacataaacagttagagctttctcaaaataatgaaagaagattaatcgattcgagtaaaacagagacaataaaaattattgacctaaacaatgaatcaataaagctgaagaggtcgctagacaaactacaagaagaaagcaacgaaagcattgtaagcctgacgcatctggaaactaaattaaacgatactgaaatagaattgaaacagtttaagtcaaaaacgtctcacctagaagctaaatgcgataaattacacgatgcactattcaacaacaacaacaaaaacaagggctcaaacgacgaggcactcgttgaagagcttgcaaacttccgtaccctagtttattgctctttgtgttctaaaaactggaaaaatatggccattaagacttgtggccatgtcttttgtgaaaactgctgtaaagaacggttggcagcaagaatgaggaagtgccccacatgcaacaaagcgttcagttccaatgatttattaacagtgcacttgtaa

SEQ ID NO: 388 - DNA, 612 bp, Saccharomyces pastorianus
atgtcgttgtattacactttagtgtttgccattctggtggtcgagatttttatgttctccatcctggccatcccaatcccctccagataccgtagacccctcactctacttttattaaagccgttcaagtcctccacagtgcaagtcgcgatcaaatgcatactcgggttcattcttttgctcttcgttgattgcatcaacagagtatacagtatcgacaaagagctgcagttaagcactacttctccgaacaatggcacggtcattgctcaggatagagttgaggtactctccagaaagttttttgcacaaagaaacatgtacctcactggcataactttgttcttgacgtttgtcgtcgtcagaacatttggtttagtcatcgagctcttgaccatgaaagacgtgtacagagcttcgccaccagtggcctccagcgatgtcaagaagaatgactctgttaccgctgaggctgccgctcaatcaggcgcctctaaggacgaccacggtgatgaggaaaattttgaactcttgaagaagattcaggacatcgatgatgaaattaaacgcttaaaggagaagtctgaatcgctacagaaggaaatggactga

SEQ ID NO: 389 - DNA, 1869 bp, Saccharomyces pastorianus
atgtctcgtactaacatgaatacaagacacgcacactcttctatgttggctgctacaaacagcaacaacaataacaacaacaatgccagcgctggtgtcgacagcggcaatgtcagtgcggtaagtatcgacgatggaccccacttcagggatatcttccactatgaacacgaggggaactacaaactcgctagcagcggtatcactaacctgaactattcttcccatatccatcaaactttgtctcccatatccattagtaacgcctccactccggaaagtttccccgaccactccttaggcttagagcaggaaccggagccggaagtggaagcggcagtggatgagggagcactgccacctcaccagaccaagtatcttttgaactccgttaaggccactaaacgattaaaagacgctaaaccgtttttgaagccggttgaccctattgctttgaacatcccgcattatttcaattacgtgcaaaccccaatggatttgtccttaattgaaaaaaatgtgcaggagaacgtgtatcattcagtagaccaggccaagttggatttcaaaacaatggtcgataattgtttagcctttaatggtccggaatcttcaatctctttgatggctaaaagaattcaaacgtatttcgaaagaaagttatctgcattcccaccaagagttttacccgcttctgctttaaagaaaacaagcagaagtcggaagaaaaatgaagattcggattcaccacttgtcattaggcgttcagtgagcactcctaatggtaatagtgttgaaagtgcaaacgaagacggcggtagtggtggcaggcctaagagaactattcatccaccaaaatcgaaggatttattcgaaatttatgaaaactctaaaccaaagtcgaaaactttgcagaaaaaattcagaacctgcttaaagattctgaaaattttaatgagtaaaaaaaattcggatataaattacccctttttacaacctgttgatccaattgctctaaatttaccaaattattttgatgttatcaagaatccaatggatttaggtactatatcaaataatttgatgaattggaaatacagttcaattgatcaatttgttaatgactttaatcttgtttttgataattgtttccaattcaacccggagggcaatgaagtccattcaataggccaaaaattaaaagagcttttcaatttccattggttagaaaatcaggatgttttgaatgaagttgaaacggattcagatcttgatgaagatagctattcttcttcatattcatctgatgatgaatatgatgatgaagacataaatgaaaacgatataactaatccggccatccagtatttagaacaaaagctacaaaaaatggaggttgagttgaaacaattgaaaaagcaagagataagcaaattatcgaaaagaagaaagaggaattacccgaagagaaatattttgcgtaaaagattagggagaccttcagttaatgatttgaaaaaaatcataactgatagcatcaatgaattgaataatttggaaatgaacggaatgattcaaatcatcaaaaattcattacctaaagacgaaatactaacttccaatgacgatgaaatcgaaattgatttggatattttaaatgaacggactattataaaaatttacgaaagttatttcgaaaaaaaacatagcaacaatacaaaaagaaagttgaatcataacgatttgacggcgcaagcaaataagaaaaagaaaaccttgaaatttttagaaaaagatgaaattataaataataattattccgattctgatgatgatagcagtgatagtagcgacagcgacagtgattga

SEQ ID NO: 390 - DNA, 180 bp, Saccharomyces pastorianus
atggctattgctccaattactggtacgatcaaaagaaaagtcatcatggacatgatcatcgggttctccctcgggggtgctatggcctcctactggtggtgggggttccacatggacaagattaacaagagagaaaaattctatgcggagttggctgaaagaaaaaagcaagaaaattaa

SEQ ID NO: 391 - DNA, 1290 bp, Saccharomyces pastorianus
atgagcatgctagctagaagactgttttccacctctcgccttgctgcgttcagcaaaatcaaggtcaaacaacccgttgtcgagttagacggtgacgagatgactcgtatcatttgggacaagatcaagaagaagctgatcttgccctacttggacgtagacttgaagtactacgacttgtcaatcgagtctcgtgacgccaccgcagacaaaatcactcaagatgctgcagaggcaatcaagaagtacggtgtcggtatcaaatgtgccaccatcactcctgatgaggctcgtgtaaaagaattcaatctgcacaagatgtggaaatctcccaacggtaccattagaaatattcttggtgggactgtgttcagagaaccaatcgtgattcctagaatcccaagactggtccctcgttgggaaaagccaattatcattggaagacacgccttcggtgatcagtataaggccacggacacgttgattccagggccaggctctttggaattggtctataaaccatcgggatctaacgctactgctcaaccacagactctgaaagtatttgactacaagggcagcggtgtagccatggccatgtataacactgacgaatccatcgaagggtttgctcattcgtcttttaaaatggccattagcaaaaaactgaacctgttcttgtctactaagaatactattttgaagaaatatgatggtagatttaaagacattttccaaaatgtctacgaagctcaatataaggccaagttcgaagaactgggtattcattatgaacatcgtttaattgacgatatggtcgctcagatggttaagtctaaaggtggttttatcatggcattgaagaactatgatggtgatgtccaatctgatatcgttgcccagggattcggttccttggggttgatgacttctatcttagtcacaccagatggtaaaacttttgagagtgaggctgctcatggtactgtgaccagacattatagaaaataccaacagggcgaagaaacttctacgaattccattgcgtcgatttttgcttggtcaagaggtctattgaaaaggggtgatttagacaatactccaagtctatgcaaatttgccaacattttggagtctgccaccctaaacaccgttcaacaagacggtatcatgaccaaggatttggcgttggcttgtggtaagaatgaaagatctgcttacgttaccacagaagaatttttggatgctgttgagaaaagattacagtcggaaatcaaatcgattgaataa

SEQ ID NO: 392 - DNA, 171 bp, Saccharomyces pastorianus
atggctcacgaaaacgtttggttctcccacccaagaagattcggtaaaggttcccgccaatgtcgtgtctgttcctctcacaccggtttggtcagaaagtacgatttgaacatctgtcgtcaatgtttcagagaaagagctaacgacattggtttccacaagtacagataa

SEQ ID NO: 393 - DNA, 2373 bp, Saccharomyces pastorianus
atggcgggtcattcacacagaacgtcgttgaagaatggacacaagtctttcaaatcaaaacacgcttctaaaggtgctttgaagagactgtacaaaggaaaagtggagaaggagctcatcggaactggcaaaccagacaagcaagtctcgaagctgcagcgtcgaaacaagtctaagcaattaagagcacaaaaaatcttagattctattgaaaacagaaaacttttcgaaggtaaaaatggtgctgccaaaatcgtcactattcttccgctagtaagtgatctggacccattggatattatgtacaagctattgaagtctgcggacgacgaggagattatgatccaggaagtagaatcgaagcgcatattcaatgttcacatcaagaaatttaagagcaatctaaagatcatcattccagacatgaccaactttttgaacattttagattgtgctaaagtggctgattttgtcatttttgggctaagtggtgtgaacgaagttgatggagaattcggagaacaaatcgtccgtgctttggaactacaaggtattgcatcatatattggtgtcataagcaacctttcagcggtccacgaaaaggagaagttccaactggacgtcaaacaatccctggagagttatttcaaacattttttccccaacgaggaacgtgtttataacctagagaagaactcagactctttaaacgtcttaagaactttatgtcagaaacttccaagatctattaactggagagataatagaggttatgttgttgcggatcttgttgattttgttgaaacttcccctgactccggtgagttggtcgttgaaggtactgttcgtggtattggtttcaattctaatagattggttcatatccctgattttggtgactttcaacttaataaaatagaaaaaattagcgagtcctcacaaaagagaaaaaacatcaagaacaaatccaacaacacaggcgatgatctagacttggatttacaaaccgtctttgaaagtgatatgaatagagatactttagacgagtacgctccagaagacgtggaagattggtctgattatgatgatgactttggatacgaagatttgactacagcaagatatgatgatcacgggtatttacctggtagagaacaagcatccaaaaaggtagcggtccccaagggaacttcggattatcaagccaaatggtacctagatgacgttattgaagctgccgatgaagaagaaatggaacaggccgatgaagaagaggaaacaatgatggatgttgacgacggaatgacggtgatagaccaagacaatgaagagatggaaaacgacgaaagatatgaaatagaagatgatgaaaaatttgaagagttttcacctgaagaagaagaacgtcaattgagagaattcagagatatggaaaaggaagacagagaattcccagatgaaatcgaactagaaccaaccgaatctgccgtggaacgtctgaaaaggtacaggggtttgaagaacctatacaactgtgactggaatgttgatgaaaaagaccccacgtcaccacccgaatggaaacgtttattaagagtgggtaattataaaaacaccaaaaatagaattatcaaagaaaccaagaacgaagcacaagctattgcaggtgaccgtattagaatgttcatcaaattccccaaattcttattagaaaagattcaagaccccaaacagctattgtttgccgtttatggattacttctacacgaacacaagaatgcagtggtcaacttctcgttacaaagatgggaagaatacgacaaccctgtaccttctaaggatcctatcgtggtacaatatggtgctagaagatataccattcagccactattttctcaggattcgaatagtcccaacaacgttcacaagtatgagagatatttgcattcaaatacagtatcgatcgccacatgtattgcacctgtagatttcacgcaatcccctgcaattttcttcaaaccttcacaaacagattctaagcaagttgagttgattggtcacggtacattcttaaacgcagaccattcaagaatcttggccaagagagctatcttgacgggtcatccatttagattccacaagacagtggtcactgtacgttacatgttctttagaccggaggatgtggaatggttcaaatctatcccattattcaccaaatctggtagatctggtttcattaaggagagtctgggtacacacggttatctcaaggctacgtttgacggtaaactttctgcacaagatgttgttgccatgtccttgtataaacgtatgtggccattgccttcattaccttggaatggtatgtaa

SEQ ID NO: 394 - DNA, 987 bp, Saccharomyces pastorianus
atggaaaagagaagcgttggtgtgaaaataccagatgctcctcccacttatattaaattagatcaaaacgaaaaattcttatatattactagcaaaaccaattatgcgtcttatcagatagcagctataatctcatacccaggtatggaagatgtgccaaatgttaatttagaaaatggaaaattaccaagtgaagacaataaactagcactactgctgcacgggagccaatctcacaagagtgcaatttatcagaccttattagccaagagactggtccaatcaggatattgggtactaagaatcgattttagaggtcaaggggattcgactaataactacgacgctgccattggcaggacgctcgatcaagatttagaaggtatgagtgttgtgtaccaaacaatgcttgatagatctgtcagggagcagctatacaagacagacacgatctcactgggtgtgatcgtggcacactctagggggtcccttgctatgttcaaattctgtctgaaattgctttcaatggaatacccgttgccttctcacctgattaattgtgctggaaggtatgatggaaagggacttattgaacggtgttcacggctacacccgaattgggaaaaagaaggagggttctgggccaacggtccacgatatggtgaatacaacaatttttggatcccatcaagcgaaacttatagtatagccaacgtttgcgtcccggactttgccacaataccgccaacttgctcggtaatgtcgtgctatggtacctgcgaccacgtagtgccgcttagtgcggcttcaaactatgcaaaactgtttgagggtagacatacactgaagcttatagagaatgcggaccacaactattacggcattgaggatgatccaaacgagctaaacctaccgacaagaaggggcagggtcaactactcaccactagttgccgatttaatcatggagtatctgaacaatacatag

SEQ ID NO: 395 - DNA, 1086 bp, Saccharomyces pastorianus
atgaaaggtttaattttagtcggtggttacggtaccagattgagacctttgactttgaccgttccaaagcctttggttgagttcggtaacagaccaatgattctgcaccaaatcgaagccttggccaacgctggtgtcacagatattgtgcttgccgttaactacagaccagaggtcatggtcgagactttgaagaagtacgaagctgaatacggtgttaacattactttctccgtggaaactgaaccattaggcactgccggtccattgaagttggctgaagaagtcttgaagaaggacaactctccattcttcgtcttgaactccgacgtcatctgtgaatacccattccaagaactagcagacttccacaaggcccacggtggtaaaggtaccatcgttgccaccaaggttgacgaaccttccaaatacggtgtcattgtccatgacatagccactccaaaccttatcgacagattcgtcgaaaagccaaaggagttcgttggtaacagaattaacgccggtctgtacattctaaacccagaagtcattgacttgatcgaaatgaaaccaacctctattgaaaaggaaactttccctatcttggtcgaagaaaaacaattgtactctttcgacttggaaggtttctggatggatgtcggtcaaccaaaggatttcttgtcagggtccgttctttacttgaactccttggccaagagacaaccagagaagttggccaccggctccaacatcgtcggcaacgccttgatcgacccaaccgccaccatctcctccactgccaagatcggcccagacgtggtcattggtcctaacgtcaccatcggtgacggtgtcagaatcaccagatccgttgtcttgtgcaactccactatcaagaaccatgctttggtcaagtcctccatcgttggttggaactccactgttggccaatggtgtcgtttggaaggtgacactgtcttgggtgatgacgttgaagtcaaagacgaaatctacatcaacggtggcaaagtcttacctcacaagtctatctccgataacgttccaatggaagctattattatgtga

SEQ ID NO: 396 - DNA, 1470 bp, Saccharomyces pastorianus
atggctctatcaaaggtagagcattgcctgtcgtatcatacgcgcttattgttaccccatgttctatccctcaaatcgtcacaccgtattgcatacatcttctcactattatctgcagtctcggccggcttcatcactttgatatcgctttattctcagccatggcaaaaccatttgaactactcttcgtggcaaatcaataccatcgccagtatgactaacttggggatgtacctgacaccgccgatccttgggatgattgccgattctcacggccccatcactttgagtctgctttccatcattgggtttatacccagctattcgtacctggcttatgtctttaatcatccggaattatcccttgaggggaatagtgactcatcgttcaatctgtcaatattgtgtttcgccgtcataggtatatcgacaagtgccttgtacttcagcgcactgttgacgtgcacgaagctgtaccctcacacgaagctattatccattagtctgcccaccacgtgctacgggatatcttcagtagtggggtctcagttattaagggtcccgtggttctggtcctatagagcacaatcttcttcatcgtccgctaacgacctgaacctggggagggtattccaaacgtttgcatgggtttacgttattatcgggttacttgcatggatagccaccagtgtggtgtcgctattgcatttcaacgaagaacaggataaccagaaacggctggatgaccagactgatgccgagcagttgccgttattggaacaagacagccacacccaagacaagttcgcgcaaacagtactaagaattttcagcgaccctgtgacgtacattctggcgctgtcgattctactatccttggggccattggagatgttcattgccaacatgggatctctaaccaacctgctggtccaagtcgatgcgcccgccttgtccacgaagttactgtccacttatgcgctctcctccacttttgcaagactactcacgggcatagtggcagatttcctcgccaagaaaagaatatccatcaaatggatcctgctaacgctgctgtccctcgggctctgcgcgcagttgaccttgttcaaactggtctcctcgaagacggtgtcgtcctgggggttagtgcccacagggtcgctggtcggaatcatctacggtgggctgttcaccgtctatccgacattggtgttgttagtatggggcgagcgctcgttcgggaccgtctacggcagcctgctcattgcacccgcggtgggctctacgatattctgcatgctgtatgcgaaagtgtacgattccggctgtacagacaacgccggagaccagcgggggtcggcatgcatctcggttgtctacaagtatagcagcattgcattcgttgcatccatcgtcctttcgtcagtggtattctggaagttgaaacgtaaaaatctaagggtatga

SEQ ID NO: 397 - DNA, 909 bp, Saccharomyces pastorianus
atgagtgtgttgggcaagatcttgtactacttgagaaccgtgttggccgtactggtgctttcaggctgcggtctttatggtgtagtggcctctatcttttgcacgttaatcggtaagcagcatttggcgcagtggacgactgcccgttccttttactatgccatgaaactggtgctcggccttgacgttaaggtcacaggcgaggagaatctgcttaagaagccttatatcatgatttccaaccatcaatccactttagatatctttatgttgggtaggatcttcccacctggttgtacggttactgccaagaagtcgatgaaatacctcccatttttgggttggttcatgactttgagtggtacttatttcttagacaggtcctgtaggcagcaagccgtggagactttgaatagagggttggaaaacgttaagaaaaacaaacgtgccctatgggttttccctgaaggtaccagatcttatacaactgatttgacaatgttgccctttaagaagggtgccttccatttggcgcaacagggacatatccccattgtcccagtggttgtttctaacaccagtactttgactaatcctaaatatggggtcttcaacagaggttgtatgatcgttaaaatcttggaacccgtttctactgagaatttgaccaaggataaagtcggcgagttttccgaacagattagaacccgtatgcttgatacattgaaggaaatcggttactctccagctatcaacgataccaccttaccgccagaggctctcaagtatgctactcttcaacaagaaaaaagaaaggctgctataaagaatgggtccgtgccttctgatgacatgaacgaagacgttagtgtccatcacgaagggtcttccatgaagaagatgcattga

SEQ ID NO: 398 - DNA, 1467 bp, Saccharomyces pastorianus
atgcctgtatcgccttcatttgcgtcgagtatagatttgataatatctcatgaagccgtctctttgccaagaaatcctccctttatagatacttcgaataaaatgggtaacccaacgacttcaccccacgccacccttcaacacttaatagatccgcctttgttgtccagcacaacgtcatcttcccgctccaccctcagttctgcgttgaactcgcctccacctccaccgtcgatcacttcgtactcttcttataattcctctgcatgccaatccatcacgagttcgcccacagacaacactactctgccacagagctcgaagttctacttccctcatagcctctcgcctaccccgctgtcttccaacagctcaagccatgtcatcttaccccccatatcttccttcaccaatctgattaccgtggcggaaagagaattcaatggcagatcaaactctctgcatgccaattttacagcacccgtcccaagaaccgtgctggaccaccaaagacacgagttgtcactgtgcaaccccatcaccgcggctactgtcaagaacactacgccctcgccaccggcccaacacacccagcatatactgtccactgtggaaggtgtaccgagatcaaaatcagtttctagtctgcctgttaacgggtttccggcactgatgggcagacagcagcagcaaaacaccggtagtagcactgcctcgaccctaccatctattcattctccattaaccaatgaacacactaacaaatattcttcgtcgctcagggattcgtccaagataatcaagcaaagaaagaaaaaggaatgccccatatgccacaatttctacgccaacctgtccacgcacaaatccacccatttgaccccggaagacaggcctcacaagtgccccgtttgccaacgtggctttgctagaaacaacgacctgataaggcacaagaaacgccattggaaggacgagttcatgcagatatacgcaagggatccgcaaagcaatagcaatactgacgatactgacgataccccacacgtttccgcaaccaacgacgttgacgattctgacgataaatcggctgctttggcctcatcttcttccgaggacacgaaactactgaagaaaaatcaattaagatcactatacaagatcaaaggtgccttcaaatgcccctacaactccaccttgatcaacttagacatggaggtgtacccgcacaagaccagatcgctttattttgagccaataaactgccatcaaacaggcgtcttttcgcgctgtgacactttcaaaaaccatctcaaggccttgcatttcgaatacccacccaaaaccaagaaggaagatagaagcattgtgcccggaaagtgcaagcactgtgggctacagttccccaacgtcgacgtctggctgaacaaacatgtgggaaaaggatgtggttacgcataccactag

SEQ ID NO: 399 - DNA, 936 bp, Saccharomyces pastorianus
atggtatcaagaggccccgacgaatggctagagaccataaagaaatgccaggcgctgaccgaaaacgaaatgaaacaactatgtgaaatggtaaaagaacttctgatggaggaaagtaacatccaacccgtacagacccccgtcacggtatgtggcgacatccacgggcaattccatgacctgctggagcttttccgcactgcaggcgggttcccggacgatataaactacattttcctaggtgattacgtggaccgtggctactacagtctggagactttcacgcttttaatgtgtttgaaagtcaaatacccggccaagattactctggtgaggggcaatcacgagtccaggcaaattacccaagtgtacgggttctacgaagaatgcctgaataagtacgggtccaccacggtatggaagtactgttgtcaagtatttgactttctgacgctagccgctatcatcgacggcaagatcctatgtgtccacggtggactatctcccgagattcgaatgctcgatcaaatcagagtcttgtccagagcccaagaagtgccccacgagggcgggttctcggaccttctttggtcggaccctgacaacgtagaagcctggcaggtttccccccgtggtgccggctggctgttcggcagcaaggtcgccagagagttcaaccacgtcaacggactcaacctgatcgccagggcgcaccagctggtgatggaagggttcaagtaccacttccctgaaaaggatgtcgtcaccgtttggtccgcaccaaactactgttatagatgcggtaacgtcgcgagtgtaatgaaggtcgacgaggatttggaacccactttcaaaatcttctctgctgtccccgatgactacataagagaatcaacagccaaccacaacaaccaaagagccggctatttcttgtaa

SEQ ID NO: 400 - DNA, 522 bp, Saccharomyces pastorianus
atgaatcaaggcttaaaacttttgttcggtttgctatttctctacacagccgcagttcaggcaggcgtaatcagtatattcaatgcactacctccgccaaactccaagccaattagcggtgaatcaccactgtaccagtgtgatgtttcggataagcaactcttagaaattaaggagattgatctgtctcctaacccaccagtccgtggccaaaacttaaccattacggccaacggtgaggtcttcgaaatcatagaagaaggctcttatgtcgaagtcgaagtgcgtctaggttatatcagactgctatcccagactttcgacttgtgtcaaaccctggaagacaacgacatcgagggcttatcctgcccaattgaaccaggttcatacgacgtaaagaaattggtcgaaattccaggtgaagtcccacctggcaggtacgtcgtcctagcaagagcttacactgagagcgaggatttgatcacttgcgtaaccggagaagtcgtcttccccccaaggtga

SEQ ID NO: 401 - DNA, 288 bp, Saccharomyces pastorianus
atgtccggaaaaccaccagtatataggttacctcccttacccagactaaaagtgaagaaacccatcatcagacaagaagcaaacaaatgtttggttttaatgtcaaatttattgcaatgctggtcttcatatggccacatgaaccctaagtgtgccgctttggtgacagaactgaaaagttgcaccagtgaaaatgccctcgggaaaagaaataacgtacagaagagtaatataaattaccatgctgctagattatacgataagattaacggtaaacctcatgattaa

SEQ ID NO: 402 - DNA, 921 bp, Saccharomyces pastorianus
atgcagttaagtaaagctgctgagctgtgctatgagataacaaactcttacctacagatacaccaagagtcccagataatatcaagtacacaagaagcaatacggttgacaaggaagtatttattgagtgaaatttttgtacgctggagtccactaaatggagaaatatcattctcatacaatggcgggaaagattgccaggtattactgctattgtatttaagctgtttatgggaatattttttcatcaaggcccaaaactctcagtttgatttcgagttccaaagcttccccatgcaaagacttcccactgttttcattgatcaagaagaaactttccccacactagagaattttgtactagaaacctcagaacgatattgcctgtcattgtatgaatcacaaaggcaatccgaaacggccatcaatatggcagatgcgtttcgagaattcataaagatataccctgagaccgcagctatagtgataggtatcaggcacacagacccatatggtgaaacgctacaacctattcaaagaacggactcgaattggcctgatttcatgaggctgcagccccttttacactgggacttgactaacatatggagtttcttgttatattctaatgaaccaatttgtgggttatacggggaagggtttacatcggtgggcggtgtcaacaattctttacccaacccatatttgaaaaaagatttaagtgatataccattgctttttgaatgggagattgcccacgcatttggcaagaatgcagcgggagagcatgatcctattgtaaatacttcaccgatatctgtggtggataaagaaagattcagtgaataccaagacgattattatcctggttggtatctgatcgatgatactatagaaagggccggcaggattaaaaactaa

SEQ ID NO: 403 - DNA, 1332 bp, Saccharomyces pastorianus
atgatcagggcgtcgtcgatacttaaaaattgtaactataggtacatacattccattcatagatgtttactgaatgaatccagttcaaaggatggcaaaaccaacaatacagaaggagcttcagcaggaaaagcgtttgaggaagcttttgaggaggaacgtagagtgttcggtgaatcgttcgaagctggagcaagggttgaaagcatgcgacacactaatgctagcaagataattgacaagtattacaacgggctcagtgaggattctaaggggactagattcaagaaagaaaaaattgtctttgatcatagtcaaagagctcaaaggaagcttccaaataaagatcatgaatttttgaaagaaactgcaggcagcgattacgtgtaccagggaaccaatccttctgctgttagtgctaaaaccataagtgagcaaacaagaactttattggagaagatattcgatgaagataatgacgttaacaaaaaggatcgggaatcaaaaaatcatgatcagtacaaagactttgccactggagtgaatctggcatttgaagagccaatcccacacttaaatttgaagtttagcgaggaagtgatgcaagaaattggtaataggatccgttaccaagctacattagaccaggttttgaaactccacaccgattacttgaaggaaactgttcaaagtgattatgatcttttggaatatttaaaacggttgttggaagcatataaaaaaagagacaaaaatttggaaataaagatgaattcagagtcttcaaacatattcgaggatattagagatgcttgtataagtaaaccgaacgagctaccaaaaccatatacaattactttgccatatgttatattgaaatcgcttacatcaagtgattttggttttccatcagatagaaaatacatgttgatatcttatgtttataatgaatgcaagaatagtatggatgtgtctttatacttgaccatttgtaatgttgacttctacaatttactgatgcaactgttgtgggaaaacttccaggaagttcgttatttaaaacgtgtggtcactgagatgagcgtaaatggtgtcatcgggaatatcgaaacggtggatatacttgataaaatcgtcaaagaaatgagaaacctaaatgaagatgtatttttggaagcagaagctgagtatgatacagttgagggcactatatcaaaagacaaccaaattgtaaatgtgggcgtattatggaataaagacacgaatagtgatttactaaatatcgaaaactatctgaaaagtctcaaaaaaaacttaactagagataggtag

SEQ ID NO: 404 - DNA, 2568 bp, Saccharomyces pastorianus
atgtctaggaaaagaggtagtaaggccaagccaatagctaaagcaaacttgaaaaaggaaaatgatcaattcctcgaggccttgaagctatacgaaggaaagcaatacaagaaatctattaagctgctcgacgcaatcttgaaaaaagatggtaaccacgttgattccttggcactaaagggtctagatctatttgctataggtgaaaaagacgatgctacttcttatgtggctaatgccattagaaaaatcgaaggcacttcagcatcgccaatctgctgccatgtattagggatttacatgagaaataccaaggagtacacggaatccatcaaatggtttacagcggctttgaataacggttccactaacaagcaaatctatagagatttggcaacattgcaatcacaaattggtgatttcaagaatgccttgatttccaggaaaaaatactgggaatcattcctcggataccgtgccaattggacatcgttggctgtcgcacaagacattaatggcgaaaggcaacaagccatcaacacgctatctcaatttgaaaaactcgctgaaggaaaaatatctgattccgagaaatatgagcataacgagtgcttgatctacaaaaatgatgtgatgtataaagctgctggcgacattcaagataagttgcaaaatgttttaaagcatttaaacgacatcgaaccatatgtctttgacaagtttggtttattagagagaaaagcttctatttatatgaaactaggccaattaaaggatgcctcgattgtttatagaactctcattaaaaggaatccggataactttaagtactataaattgctagaggtatcgttgggaatccaaggtaacgatagagttaaaaaggctttgtacgctaaacttgaacagttttacccaagatgcgaaccacctaagtttattccattgactttcattcaagatgaagaagaactttccaaaaaactgagaggatatgttttgccccaattaaaacgcggtgttccagcaaccttctctaacgtgaaatctctctatcaaagaagaacttccaaggtctctccacttttggaaagcattgttcttgaatacttgtctggaattgatggtaaacaagacccaattccattcatctggaccaattattatctgtctcaacattatttgttcttgaatgattttcccaaagcccaagaatatatcgatgctgctttagaccatacccctactctagttgagttttacatccttaaggcgcgcatcttaaagcacttaggattaatggatacagctgtagatattttggaagaaggtagacaactagacttacaagataggtttatcaattgtaagaccgttaaatatttccttagggcaaacaacatcgataaggctgtcgaaattgcatctttgttcaccaagaatgacgattctattaatggtatcaaagacttacatctcgtagaagcttcttggtttatcatggagcaggctgaggcttattatagattatacctggaaagtaagaagacattagatgatttaacgtcatccaagaatgaggtagaaagcgatgaaagcgaagaaaccgcaaacgttattaaggataatcaatggcttgttcacaaatataaaggcttggcgctaaaaagattccaggctattcctaaattttataaacagtttgaagatgatcaattagatttccattcatattgtatgaggaaaggtacgccaagagcttatctagaaatgctagaatgggggaaggagctttatacgaagcccatgtatgttcgtgccatgaagggagcagcaaagctttacttccaaatgtatgatgatcatctgaaaagaaaagcagatgttattgacgacgattctgaaggtagtggaaataatggggccagtagtaacagtagtcaaaaaaagaaggctaaaaaagaggctgctgccatgaacaagcggaaagaagctgaagcgaagagcgttgcagcttacccaactgatcaagatgacgatgtgttcggggaaaaactgatagaaactgccaccccaatggaagacttcgcggacaccttttacgatgactactctaaacaagccagagacgatgaaagagatttcgttttggattttgagttcaactataaagttggaaagttggcgttatgtttcgcttctctgaacaaatttgctaaaagattcggctccacaaatggattgtttggtagtatggctattgttttgttacatgctacaaaggataacacccgttttgatgcgatcttgaaaaaagtagttacgaaaagttttgaaaaagactactctgaagtgttaccattgaacgagagctctaacgacagctttgattggttgaagttttaccaagaaacattcgatggaaatgatataagaggcctactattcctgtaccgttatcgtgaagaagtcgctttggaagaacctcgtttaaaagaagcgataattaataatctttctcttttggaacctcacgctcaaaacgaggttctacaataccaactataa

SEQ ID NO: 405 - DNA, 2280 bp, Saccharomyces pastorianus
atgtcaacaaattcatttcacgactatatggatccaaagtcgagaataaacgctcgacagttttcagatgatgaagaattcactacacctccaaagctaagtaatttcggatcagctttactctcccatactgaaaaaacctccgtatcacaggaactgtcaaataaagatgacaagataacgaaacctgtttttgaagaaatgaacagaagttcctcgaggagtcatcctccatcatcaatgggtaatttaacgtccggccacactagcacctcttcacattcaactctatttggacgatatttaaaaaacaaccatcaaacaagcatgacaacgatgaacactaatgatatagaaataaatgttgggaacagccttgacaagagctttgaaagaataagaagcttacgacaaaatatgaaagaagatattacttcaaaatatacagaaagaagaagcaaacgatttctaatatccaatagaacaacgaaactaggacctgcaaagagagcttccacactaacaagcatttttgatgatgtgcctaactcttctagccaactaattagcaatttaagagagacaacggaatcaccacttgacgacccttcggaaacgaagaagaattcggactacgaatcgataaattttggagacttaaatccgatacaatacattaaaaaacacaatctaccgactagtgaccttccaatgatatctcaaatttactttgacaaacaaagagaagagaacagacaagcggcgcttcgaaaacatagctcccgagaactgctctctaaaactagatcatcttccactcccctcgccagcagtaactcattggtcaataaggacaattctataacgtctaataataattctcaaccaagacgaaagatatctactggttcatcttcttcgaaatcatcaattgaaataagaaaagttctcaaagaaaatattgatgctgataattatagtaacctgaagagcccggttcacaaaatttacaaggaaacttcaggatacaaaggttcagattctgaaaagagagaagtactgcgcaatataagtataaatacgagtcatgccgatagcgcacttcaacaggataacaagagactaaaaagatcacttgacgatgccatcatacatgacaatgaaaacataaagaaccaggaagtattttatcacaggccagctccaaaaccacctgttactaaaaaagttgaaattgtggagcctattaaatcagcctccttatcaaatagtaggagtgtaattacagttaatgactctcaatatgaaaaaatagaattactcggtagaggtggatcttccagagtttataaggtgaaaggagcgggcaataaggtatacgcgctaaagagagtctctttcgatgcatttgatgattcaagtattgatggattcaaaggagaaatagaactattggaaaaattgaaagaccaaaaacgtgtgattcaactagttgattacgagatgggggatggcttattgtatttgataatggaatgcggtgatcacgacctatcgcagattcttaatcaaagaagtaatatgcccctggatttcaattttgttaggttttatgcaaaggaaatgttacaatgcatcaaagtagtccacgatgctggtattgttcattctgatttgaaacccgcaaattttgtcttagtaaagggcattttgaaaattattgattttggtatagctaatgcagttcctgaacatacagtaaacatataccgtgagactcagatcggtacaccaaattatatggcgccagaggcactggttgccatgaattacacacaaaacaatgaaaatcgccaggaaggaaataaatggaaagtcggaagaccttcggatatgtggtcatgtggttgcatcgtatatcaaatgatttacgggaaacccccgtatggtagctttcaaggccaaaacagattgttggctattatgaatcctgatgtaaaaattccatttcctgaccataccagtgacaatgagaggattccaaagtctgccattgagttaatgaaggcatgcttgtatagaaatccagataaaagatggactgtggataaagtgttgagttgtactttcctccaaccttttatgatatctggatcgatcatggaagacttgattaggaacgctgttagatacggttctgagaaacctcaaatatcgcacgatgatcttaatgatgtcgtagagactgttctaaggaagtttgcggattacaaaatctaa

SEQ ID NO: 406 - DNA, 1254 bp, Saccharomyces pastorianus
atgtttagactgccattgggattagtcatcagaggaaaaacggttgcgaacatccagacattcaatagcacaagactttttgatccatgtttgtttagacaattaagtgtatcttctaaaccgttaccgttgttacgtgtaccttctagtggcacgtgttctagaatggagagccacaagtcttataagctgtcttcgctctctcataattctggtttgtaccttcgccgtcctgtatccagtccggtaaactcggttttcaagttgacggataaaagagctttccattcgtcaccacatgcacgaatcaaatttatgttttcttcaagatcgccaaagaatggtggcaagccgtttgtgaaagtatacaaagtgtcaccacttctcatcgtattcgcagcagtgagtcttttcacttttatcctaacttcgacattgattgttattcccttcatcttccattttttcttgccttttcttattatgttcatcttctttaaacagttcaaaaggtggcagaaaaatgttttttacaaggacatcttaaattctttaccaaaaaccgaattgaaaataacagtacctaccatgaggtcattacagatgcaaccaatgattcaaagctggaaggatatttcatcgagaatgggcattcctaatgaatttgccaaaggtctaaatgtggatttagtgaagcaagatgaaaccaggaagcaatttttgagttttttggaaaaaagagtattagagtcctttactaagaatgaaatgggaataaggtcatactttttgggcgataacgttgagaagtggatcaaagaatcatatgacctggaactggatatcgagaactgtcgtagcgaattaaggaaatttcaagattccatattcgccagtgtccagtacaaattgtatctagattcaatgaaaaatttaccattgaacccatcgaaaaaacttgagggtaagaaacaccttgcgaatgtgtatgttctcattttagataagtctttccccgaagtaatgtttaatggtggaggttattcaaaggccgattttttcaagatattgcaggaaagtgaaactgccaatagcaagagaatgcacaatatgattatcgcagttaagagcgtcaatacactactatctcgtcactttgttatcacagccaagggtgattcgggcgatttcttttcaagatatcatgtttcaaaagtagatggcaaccacaccgaatatactttgagagaatag

SEQ ID NO: 407 - DNA, 1848 bp, Saccharomyces pastorianus
atggtcaaggataattccttacgctcatcttcatcggcttcgctatcgtcgctatttagaccgaccaaattgaagaacctatcagctaaattttttaacggtggtacccaatcacattcaaagccagatgatatttcaagatcttcctccagatcgtccaggaaactcgctgattctgactatgaagatcacaagaatcatagtaagcctaacgaccgaaggtcaactactgacaagaataccgtgggaaacagcccatcatcaaaggagtcacatgccgcagcaaatttttcactattagcctcttctcctacttcggttaagaaggcagctattgactcccctacatcaaggcctttacacaatactaatactcctgtgcgtaccgggcataatacaccacacttgccccatagtatccacaatccaataaattacattcatcaaggtgcaaaggatacttttcaccatcctcatcctgtccatccaacagcccataataacatctccaccgtctcctcagcaaaatctgaggcatcttcaaatttttcataccaaacgcatatgcatcccgtagaaatactccaaaagcaaatcgaagataaacatttaatggaatctcaatcctccacccctggatctttggatttgaaccatcattcttcaagcggtagtgatgacgtcttaactaaaaagaaaaaatccttaaaattgacgaggtttttcaaaaaaattcataatgattatcacgacaaccaccataaccacaaccatagatctactcctacaaaaccaaaggttagttcgcatactaacggaaatgtagtagaaagtaatgggaaatctttatacgaaacagataatccagtggaactgttggaaaagtatggtatacctggtagaaaattgggcgagggagcttctggttcagtatctgtagtggaaagaaccgatggtaaactatttgcctgcaaaatgttcagaaaaccctcactaaacaatgatggaaccaaccattcccaattggccaattactctaagaaagttaccacagaattttgtattggctccactttgcaccatgaaaatatcattgaaacatttgacatgttgaccgagggtgacacgtatctattagtgatggagtacgcaccatacgatttctttaatcttgtcatgagcaatttaatgacacaagacgaagtaaattgttatttcaaacaactttgtcatggtgtcaattatcttcattctatgggtttagctcatagagacttgaaactagacaactgcgtggttactaatgacggcattttaaaattgattgacttcggtagcgctgtcgtttttcaatacccctatgaagataccatcgttaaatctcatgggatcgtggggtccgatccataccttgctcctgagctactaaaacaaacatcttacgacccaagagtagcagacgtctggtcgatcgctattatattttactgtatggtattaaaaagatttccttggaaagctccaaaaaaaagcttcaattcctttcgactgtttaccgaggagcctgaagacgaagatgatattgctaggggcccaaataaaatactaaggctattaccaagagactcacgaaaaataataggtggaatgttaacattagacccaaaacaaagagtgttgatgaacgaagtggtaaagaatgattggctggtatccgtcccctcttgtgaaattgaccctatatcgggcgagttggttgaaagaacaaaaaaccacaaacatcatttggtcactgaagaagaactaaacgagttgagcaaagaacatggaaacaaggattcaaactaa

SEQ ID NO: 408 - DNA, 936 bp, Saccharomyces pastorianus
atgactgcaaatacaaaatcaaatgtcatgagattgttcttgttgaggcatgggcaaagcgaattaaatcatgagaatatcttttgcggttggattgatgctaaattgactgaaaaaggaaaagagcaagctcgtcattcagctgaattgattaaacagtattgcgagacaaatcaattggatttgccccagatcggttacacatcgcgcttgatcagaactcaacaaactatagaaacgatgtgcgaagagttcaggttggaaccgcaactgcaagttgtctatgactttaataaagtcgaacttgggagtaaattcggtggtgacaagaaaaatactacaaaaatccccattcttcaaacttggaggttaaacgagcgtcactatggctcttggcagggccaaaggaaaccaaatgtcttagaagaatatggtaagaaagaatacatgtttatcagaagagattacgaaggtaaacccccaccagtagacctaagccgtgagatgatccagcaagagaacgagaagggttcttccaccgggtacgaattcaaagagccaaatagacaggtcaaatatgaactggaatgtagcaatcatggcatcgtcttaccagactccgaatctcttcgtgaggttgtttatagattgaacccatttttacaaaacgtcatactgaaattagctacccaatacgatgaatcgtcctgcttaatcgtgggccatggaagttcagtaagatcgctcttgaaaattctggaaggcatatcggatgatgacattaaaaatgtcgatatcccaaacggaattccattggttgttgaattggataagaatgatggtcttaagttcatcaggaaattttatttggatcctgaatcggccaaaattaatgctgaaaaagttcgtaatgaaggtttcgaaaaaaacccttaa

SEQ ID NO: 409 - DNA, 1614 bp, Saccharomyces pastorianus
atggcatccacagaactgagcctgaaaagaactttaacagatattctggaagacgagttgtaccacaccaatccggcacataaccagttcgcaggtcactaccaaaactatcacccgaatgctagcatcaccccatacaaactggtgaacagcaacaaggaaaacaacaattttacgtggaacaccgcattccaacagcagaatgagtctaatacggcttctcagcctccacaacaaacttaccatttcccaatattcaacaaatatgctgaccccacactaactaccactacttcgcttacaaacggtgaagcaacagcgaatgacaaacaagttgttggtaataatgttcacctcatacccagtgatagtaaggtcgccaatgaaactccattgcaaaagactgttgatttgaagaatttaatgaaagtctcagatccttatgtgccgacgcgaaatacattcaattacgatgtcaaaatatccaacgatttttttgataacggtgacaatctgtatggtaatgacgaagaagtgctattttatgaagacaattataatccaaagatgcaatggtctcttcaggacaatagtgctgcaataaataatgaagacgcaagaactatcttcaataacgaatttgactctgatgatgacgatatcagtgacgatgaagaagacgaaattgaagacgaagatcgtttgcaacaacaagaggaaatccttttgccattagacgtcacctcagtatcgatatttgatgccgatcataaaataaatcatttaaagagtgctggtcatgtatttaatgaatacagttacgttgattctaatacagacgacacaaccaacatcacacccaaaaatacgttagaagaacaggaaaatgcaaacgctgaggaagggggtgaggaggaagataacgatcttctcgacgaagatgatttatatgatatttctcttttgaagaacaaaaggaagcaaagttttgtactcaataagaataccgttggttttgaaagactatcgtctccatcaactccggtaaaggtaccgtctaacactactactactactactaaaaggaaatctacaaagtcgttcaataatagtggtggcactaacagtaataacgaaaacaccccgatggaaagaataaagaaaccgacttcgtccgtgtcaaattctaatagtagtaggcggaaactaattaactataccaaaaaacatctatcatcacatcctacaccattcagttcgagcccaagtcctacaaccacatcatcttcggcacacgcgtcgtcttcggacggtagcaacgaaatatttgcgtgccaaatcatgaatcttactagtaatgaaccatgtggtgcacaattttcaagatcatacgacttgacaaggcaccaaaataccatacatgccaagagaaagattgtattccgttgctctgaatgtataaaaattctgggatcagaaggttatcagaagacattttcgagattagacgctttgacgaggcacataaaatcaaagcatgaagacttatcatcggaacaacgtcaagaggttacaaaatttgccaaagctaatattggttacgttatgggttaa

SEQ ID NO: 410 - DNA, 3879 bp, Saccharomyces pastorianus
atgtctagtgaagaacagtctattgtcgaaggttcaaaccaggtaagtaaaccattgcttagagtaaagctattggaagcattgggccaggggaactttaagctgttggagactcttgttgatagcgaatttcagcccagagatgacccatctgtgcaacaagttcttaatttgttgctacactacgctgtccaagtagctcctattctccttattaaggaaattgttgcccactgggtagaccaggctgatgaagacgaaagggcgggtaaaactagcggtaaaatttgcttagatttgaactatcaggatgaaaacggcaatacaccgttgcatctagctgctgctcaatcccgttctgatgtaattagcttccttcttagccagaaatctattaatgattgtatcaagaataacgctaacttgcaacctatatatatgtgcaaagatttgaatgtagcgcaaatgatgcagttgaaaagagacgaatattttgtggaaacggttaattctttaaaagctgccatagagagcagagactttacgaaactggatttgatttggaaaagtccaagaaatttgaatatgttagatattaatggaatagatcccgaaactggcaagacattattatatgaatactctgaaaaaaaggacattgacatgtgtcaatggttgctagaaaatggtgcagaagcaagaattaaggacgcaaaaggaagatcgcccttggatttagtgaaaaacataaaattacctgctaaatcctctaacaatgttaaggttactcctgaacttaaattgaagagtctgcttgaaaaaaatttgaaagaacgatctgttcacgaaaacgtttcattaatcaagcctccaacatataagggttttttaaaaaagtggacgaattttgcgcatggttacaaattgcgttggtttattttgactggcgacggaaatctgtcatattacaaagaccaatcgcatactgataaacctcgtggtaccttgaaagtttccgcttgtcgtttacatattgattcttcagagaaattgaacttcgagttgctgggtggtgttaatggtactaccagatggcgattaaagggcaatcatcctgtcgaaactactagatgggtcagtgaaattcaaagcgctgtcaggttcgccaaagacaaagagatgttaaagagaaaaaaagctgtgccaccatcgttagctataaaaaacaaatcaccggcccttatatcgcattccaaaacacaaagctctcctcctgaagtctcgcagggccatcaacacgctttgcgtaaggaatcgattcaaccttcctctaccagtctgtaccggagaccaagcaataacctatctgttgcatctaacgaaattcaattgaacgataatttaactgaatcaggtaagcgctttgtcagtaaaatgattgaaaatcgattggacggtagtaaaactcctgtggcagttcacacaggttctgcattgcaaaggatttacagtaataacacctcaaaaagtaatagaagtatccgaagtgcttcaggcgtaacaagccctgtggataaggctccaaatagcagtaataatacaaacaataatagcgttaatatgagccaagtcaatacagcagcaggatccaccacttctttaagtgacaataactttattgctaattttgaaggcgacgaagcaaattcagatgacgacgaggaagatcttggaataaactttgatcgtgatgaagaatacataaaagtacaatatgggccctacaaagagaaacttgacatgtatgaacaggcgatcagtattgagttgagttctttgattgaattagttgatcaagaggagccgagccccgaagtttggcttacagtaaaaagaagtcttatcaatacatcaactatctttgccgaattgagaaatttgatttctaaaagagacaaaagactggtaagcatggtttctaaacaaggcgatgtcaacaatgtttggatacagtctgtcaaggagctagagattgagctatctagcaaaaccgaacgtctggcttcgattgataaggaaagaagaagtttaaaaaagattctccataataaactgctggaatcacagacccccgttaataaaaaagaacacttgcaatttgacgaagaacgagaatcgaatacaactgcaagtacactaggtcaaattgcaaaattcattagtgctacaaaggaagaagatgaagcgaatgatgtcgatgaattttatgatgctgaagaattagctgatgaggtggcagaattaacagaggctcatccggaaacctcaatggtagcagctcccacgcatgctgctcctctcgttccaaatagagcggctaacgaaagccaacatctcgaggacgaagacgggaaaacagaaataaaggacgaaaaaacaagccaaaacttaggaaaacaagatattttagcggcggaagaggaaaaagaaactgaacaatcatcgaaggatgtcatagaaaaagacaaggaaagtcaaataatggagaaaaccaaagaggtagcatcctcatttaccgctgatagaaatattgttgcagtcaccacagtgcaaaagagaaaagaagaatatttactcagtgaggggtcctatcttggttatgaagatggtgtaagaaaaagactatccatggataaggatgaacgacccaaaattagtctttgggctgttttgaagtccatggtgggtaaagatatgacaagaatgacattacctgttactttcaatgaacctacatctcttctgcaaagagtcgcagaagatttggaatattctgaacttttggatcaagctgcaacgtttgaggactcgtctttgagaactctatatgtggccgcctttacagcatctttgtacgcctctaccaccaagagagttgcaaaaccctttaacccactcttgggcgaaacatttgaatatgctcgaccagacaaacaatacagatttttcactgagcaagtttctcatcatccacctatctctgcgacatggacagaatcgccaagatgggatttctggggtgagtcgttcgttgatacgaaattcaatggtagatctttcaatgttaagcatttgggtctatggaacattagcctgcgtcctgataataatgacaaagaagagttgtatacttggaagaagccaaacaatacagttataggtattcttgttggtaacccccaggttgataaccatggtgaggttaatgttgtcaatcatacaacgggtgatcactgcaagctgtatttcaaagcaagaggttggaggtcatcaggagcatatgaaatcacaggtgaagtctacaacaagaagaaacagaaaacatggatactgggaggtcattggaatgaggctatgtttgctaagaaggtagtgaaaaatagtgatctctcgctggagaagaccaaaaccgcggcatcggtagggaatgggccaacaaacgacgggacaaaattcttgatatggaaggcaaatgaccgtcccgaggagccattcaatttgaccccttttgcgataactttgaatgccccacaaccacatttgctgccatggttagccccaacagatacacgtttcagaccagatcagagagctatggaagatggacgttatgacgatgccggtgatgagaaatcgagggtagaggacaagcaaagagcagcacgcaaaaagagagatgaaaagaacattgaataccatccacagtggttcgttaaggaaactcatcctatcacaaaaaccaaatattggaaatatacaggaaaatactgggcaaggagaaaaaatcatgacttgaaagattgtggtgatatattttag

SEQ ID NO: 411 - DNA, 678 bp, Saccharomyces pastorianus
atgtctagtttgtgtgtgtttctgtttcacttgcttttcttgacgcagtttttcgctaaagcatcaccattgacattccagctgaagaagggtcaaaaagaatgtctatacacacttactccggatacagactgttcaatctcgtattattttgcagtgcaacagggagagagcaatgactttgatgtgaattacgaaatatatgccccagacgacaagaacaagccaataattgagaggtctggtgaacgtcaaggagaatggtcgtttgtgggccaacataagggagaatattccttctgcttctacggtggtaaggcacatgacaagattgtagatctagacattaagtacacatgcgagcgccaagatgatgttcgaaatgaaaggcgcaaggtaagaaaagcgcagaggaacctaagagactccaagatcgatcccttgcaagataccctggaaaattcaatagataccatagaaaggcagctccacgttctagaacgtaatgtacaacattacaagactagaaataccagaaaccatcacacagtttgttcaacggagcgcagaattgtgatgttttccatttatggtatcttattgattatcggaatgagttgtgcccaaattgctgcattggagttcatttttagagaatcaaggaaacacaacgtatga

SEQ ID NO: 412 - DNA, 1524 bp, Saccharomyces pastorianus
atggcaagtaaggttgaaaagatcgataatatacctgccgagatcagggaggagatgtcccagctgtacagcgatctaccaggaataggcagggaatataagcttatagataaaattggcgagggtacgttttcatcagtgtataaagcccaagatatcactgggaaaataacaaaaaaatttgcatcccatttttggaattatggttcgaattacgttgctttgaagaaaatatacgtgacttcgtcgccacagagaatttataatgaactcaatcttctatacataatgacaggctcttcgagagtggcccctctatgcgacgcgaagagggtacgagatcaagtcattgctgttttgccatactatcctcacgaggagttcagaactttttatagagatctaccaatcaaaggtataaagaagtacacttgggagttattaagagcactaaagtttgtccattcaaagggaatcattcatagagatatcaagcctacaaatttcttattcaatttagaattgggacgtggtgtgctggtcgattttggcctagctgaagtgcagatggattacaaaggcatgatctccagccagaacgattacgataattacgcaagcacgaatcatgacggtggatattcaatgagaaatcatgaacaattctgtccatgtataatgcgtaatcaatactcgtcaaactcgcataaccaaacaccccccatggtcactattcaaaacggaaaagtggttcatttgaataacgtgaacggagtggatctaactaagggttatcctaagaacgaaactcgtagaatcaaaagagccaatcgagcagggacccgtgggtttcgcgcaccggaagtattgatgaagtgcggtgctcaaacaacaaagattgacgtatggtccgttggtgttattcttttgagtcttttaggtagaagattcccgatgtttcaaagtttagacgacgcagactcgttacttgaactctgtacaatttttggttggaaagaactgagaaaatgcgcggctttgcatgggttgggctttgaagctagtgggctagtttgggataaacaaaatggatatccaaatggattgaaggaattcgtttatgaattgctcaataaagaatgcacagtaggtacttttcccgagtatagtgtcgcttttgaaacatttggatttctccaacaagaattgctcgataggatgtctattgaacctcaattacctgattctaaagcgagcatggatgccgttgatgcatatgagttaaaaaaatatcaagaagaaatttggtctgaccactattggtgttttcaagttctggaacaatgcttcgagatggatcctcaaaaacgtagctcagcggaagatttattaaagaatccattttttaatgagctaaatgaaaacgcatatttacaggatggcgatagtaccgacgaagatgacgtagtcagttctagtgagggagatttgctcgataaagatgtcctattaatttccgaatag

SEQ ID NO: 413 - DNA, 933 bp, Saccharomyces pastorianus
atgcccgctactattaagagtcgctccaaaggtttgaaggacactgaaatcgatctatcaggaaagcctaccctagatgatgttttaaagcgaatctctgcaaacaatagaaacatcagcaagtatagaataagattgacctataagaaggaatctaagcaggttcctgttatttcagatactttttttcaagaggaggctaataattcaatggaatttttcatcaaggatttgggtccccagatctcatggagattagttttcttctgtgaatacctgggcccagttttgattcactcacttttttactatctatctacaatccctaaggttgtagagagatggcatagtagtagttctgagtataatccctttttaaatagggtcgcttattctttgattgtagcacattatggtaagagactgtttgaaactttattcatacaccagttttctttagctactatgccaatctttaacttgtttaagaattgtttccattactgggttctaagtggtatcatttcattcggctactttggttacgggttcccatttggcaatgctaagttgttcaaatattattcatatctgaagttggacgatttgagtacattgattagtcttttcgtcgtttccgaattgtggaacttatactgtcatatcaaattgcgtttatggggtgattaccaaaagaagcatggtaatcctaaggttcgtgtcccattaaaccaaggtattttcaatcttttcgtcgctcctaactataccttcgaagtctggtcttggatttggttcactttcgtcttcaagttcaatctatttgctgtttttttcttgactgtttcaacagcccaaatgtacgcatgggctcaaaagaaaaacaaaaagtaccatacaagaagggccttcttaatcccatttgtcttctga

SEQ ID NO: 414 - DNA, 993 bp, Saccharomyces pastorianus
atgtcattcagaccaggtagtagaggtggttcccgcggtggttcccgtggtggtttcggtgatagaggtggcagaggtggctccagaggtggcttcggtggtagaggtggttcccgtggtggcttcggtggtgacagaggcggcagaggtggcttcggtggtagaggtggtagaggtggttctcgtggtggcttcggtggtgatagaggcggcagaggtggcgcccgtggtggtgctgccggtggtgcccgtggtggtgccaaggttgttatcgaacctcacagacatgctggtgtctacattgccagaggtaaagaagatttgttagttaccaagaacatggccccaggtgaatctgtttacggtgaaaagagagtttccgttgaagaaccatccaaggaagatggtgttccaccaaccaaggtcgaataccgtgtttggaatcctttcagatccaagttggctgccggtattatgggtggtttggacgaattattcattaccccaggtaagaaggttctatatctaggtgctgcttccggtacttctgtttctcacgtttcggatgttgttggcccagaaggtgttgtctatgctgtcgaattttctcacagaccaggtagagaattgatctctatggctaagaagagacctaacattattccaattattgaagatgctagacacccacaaaaatacagaatgttgattggtatggttgactgtgtcttcgcagatgttgcccaacctgatcaagctcgtattatcgcattgaactctcatatgttcttgaaggaccaaggtggtgttgttatttctattaaggctaactgtattgactctactgttgatgctgaaactgttttcgctagagaagtccaaaagttacgtgaagaacgtatcaagccattagaacaattgactttggaaccatacgaaagagaccattgtatcgtcgttggtagatatatgagaagtggtttgaagaaataa

SEQ ID NO: 415 - DNA, 1896 bp, Saccharomyces pastorianus
atgcacagtgctggtgatgatcgaacaaagagtgatcatactccgtcggtcagccatccagaccactcgattattttgatagatagtgacaaggaggaagacgcttctatccgcgaggcaaacttgccagtgaggttgtatccagacagaagagtagggagacgacgtgatgctctgaatagatttattagatcggatacagcggatgcgactcctcagaggattaatacaacagtacgttcagattgccccgacactcaaaatgatattgatgacgtaaccataatacgagaagttgggcggtttttcggggatgatgggcccattgatccctctgcgcactacgttgatcttgaccaagaaccaggctctgaaacagtagaaactccaagaataatacaagtaaataatacgaatgggtatttaaatgaaaattctaacgagaacaataacgataacgataatgataacgatgatggattgacaatagttgaagagaggacaacacgacctagaataacgctaaatctgccgggcggagaaaggcttgaggttaacgcaacgccaacagacataccgacacgcaggtcgtttgagtttcaagaagacttggctgcatcacgtaggcagctcttaagaagaagtgcagcacgagctcgtaatttgtttgtggaacggtctgacgaagatgatgaaaacgatgaagaatggacggaaaataccaatgacttgcctgaaactattcaaagggctcgtagagagagccatatgcgaatgagccgaagggttgcagaaagacagcatagaataagagcacaacaacagaggatggtgagtaacgacaatatgggtacaggtattaggctgcagtcaatcagagaacggattcaagcgtatgtcccagacattcgcagtgcttttcatcatgcagaatcactacatgagttcaggtccattctacaaaatgttgctccagttaccttgcgagaatgtgagggagagctaatggcattatttactgaatttagaaaccaacttttacaaaactgggctattgatagagttagaaacacacaggaagaggctttaaggcttcatcgggaagcattggaaggacaagaaagagtagccagaggagctttccatcatggggggccgtatcgtgaatcgatttcgagctatctaaacttcaatggtgaggatggcttcttaactcgtctgtggggtggtccggtactaaatgaagctgatgaagagcgccacactcaaaatattattgatatgattcaagagagagaagaacgagaacgagacgtggttatgaagaacttaatgaacaagaccaaagcccagcaggatgaatttgaagagagagcggcaaacttgcctgaaggatatagtgcttcatttgataccacaccaaagatgaaattagatatcatgaagaatgggaaggaagaaactatcactgttttagacgatgatctggccaaaaccctggaagatatttcagtatgctgtttatgtggcgtagaattgggtgtaggaataccggacgatttcactgggatgagccaaaaagatcgtggcatttcatttgaagggttagtatcgagatacaaatttcattgcccataccaaactttagcgagaccctcagtattggatagagatttatcaaagcgaacatttgttgcatcctgtggccatacatattgcggcaggtgttacgccagaattgacaatgcaaagaagaaatctaaatcccccaaaaagaaattggccgagctgaaaggttcagctcatcctgataactatgggcccaaattatgccccgcggaatcgtgcaagaagctgattcgctcaagaggaagattaaaggaggtttacttttaa

SEQ ID NO: 416 - DNA, 702 bp, Saccharomyces pastorianus
atgatactttccaataagagaaatgctagaattttaagcataacgatgctactattgttattagttttctttatagcacagaatgcgaactttctggcaatagagacaaaggaagaggagaagcccccacagttatttagtgttggtagggataatatagctggtagatcgtcaaggggaactgctgccgtgccaacatctaccacaaagaagggaaactctgaagtagatgaagagattaacgaaataaagcaaagagtgggactccagcagcccatagcttcggcggatgacagtttgtctgctatcaagagtgataaaggtacgggaacaggtaaaggattcaatgtgcaacaggaatactcgctcatgttagatttggcaccggtcataatattcagtaagagtgtctgttcatatagcaaaggcttaaaagaactgcttgaaagtgaatatcaattcgtaccgaactattacatcatagaacttgacaaacatgggcatggcgaggagctccgagaatacatcaagtccgtgaccggtaggggaacggttccgaaccttttgatcaatgggatatcaagaggaggtagtgaagagattaggagattgcactctgaaggtaaacttctagcttcactgcaagagtggagcggtggaaaattcactgtcgagcaacgtgaaaagccttcaaacaattga

SEQ ID NO: 417 - DNA, 1314 bp, Saccharomyces pastorianus
atgggtcaaggtgtatcatcaggacaagacaaaaagaaaaagaagggctctaatcaaaaacccaaatatgaaccgcctgttcaatcaaaatttggtcgtaaaaaaagaaaaggaggtccagctacagctgagaaattgcccaatatatatccaagtactcgttgtaaattaaagcttctaaggatggaacgaattaaggaccatttgttactagaagaagaattcgtctctaactctgaaattttgaaaccgtttgagaaaaagcaagaggaggaaaagaagcaattggaagaaatacgtggaaacccactgagcatcgggaccctagaagaaatcatagatgacgatcatgcgatagtaacaagtccaaccatgccagattattacgtatctatcttatcctttgtcgacaaagaattactagagcctggttgttcggtactgttgcatcataaaactatgtccattgtaggcgttttacaagacgatgctgatccaatggtttcggtgatgaaaatggataagtcaccaacagaatcatacagtgatatcggtggtttagaagctcaaattcaagaaataaaggaatccgtggaattaccattaactcacccagaattatacgaagagatgggtatcaaacctcctaagggtgtgattctttacggtgctccaggtacaggtaaaacactgcttgcaaaagctgttgcaaatcagacatctgcaacattcttaagaattgtcggctctgagttgatccaaaaatatttaggagatggacccaggttatgtaggcaaatttttaaagtagccggtgaaaatgctccaagtattgtcttcattgatgaaatcgatgctatcggtaccaagagatacgattccaacagcggtggtgaaaaagaaattcaaagaaccatgttggaattgttaaatcagctggatgggtttgacgatagaggtgatgtaaaggtcattatggctactaataagatcgagacactagatccagcattgattagacctggtagaatcgatcgtaagattctatttgaaaatccagatctaagtactaagaggaagattctaggaattcatacttcaaagatgaatctgagtgaggatgttaatcttgaaacattggtaacgacaaaggacgatttatcaggtgcagatatccaagctatgtgtacggaagcaggtttattagctcttagagaaagaagaatgcaagtcactgcagaggacttcaaacaagctaaggaaagagtcatgaagaataaggttgaagagaatctagaaggtttatacttgtga

SEQ ID NO: 418 - DNA, 846 bp, Saccharomyces pastorianus
atgagcaacgattctgaaactttagaaggagctgaaacaccctatgacataagttatagagttggtgtagcggaaaataaaaactctaagttccgtagaacgatggaagatgttcatacatacgttaaaaacttcgcatcaagattagattggggctattttgcggtattcgacgggcacgcaggtattcaagcctcgaaatggtgtggtaagcatcttcatacaattatagaacaaaacattttagccgatgaagcacgagatgttagggatgtattgaatgattcattccttaccattgataaagaaatcaatactaagctttttggaaatagtggctgtactgctgcagtttgtgtaatacgttgggagttgcccgatgcagcttccaaagattcaatggatttaactcagcatcaaagaaagttatatacggcaaatgttggcgactctcgaatagtactatttagaaatgggaacagcataagattgacgtatgatcacaaggcatctgactccttggaaatgcaaagagttgaacaggcaggcggactaataatgaaaagtcgtgtaaatggtatgctagcggtaacgagatcactaggcgataaatttttcgatactttggtagtaggaagcccatttacaaccagcgtggaaataacttctgaggataaatttttgattttagcatgcgatggattatgggatgttattgatgatcaagatgcatgtgaactaattaaggacattaatgagcctaacgaagctgcgaaagttttggttagatatgctttggagaatggcacaacagataatgtgacagtaatggttgtcttcctttaa

SEQ ID NO: 419 - DNA, 1191 bp, Saccharomyces pastorianus
atggtagtgcaaaatactccggttccatctgttcatacatctagttcactagaacaaggaaaaagtacaaagacaacgacatataagaacaagcttaccgtttgttttgatgatatcttgaaagttggagcagaaatgatgatgcaacagcaattgaaaaatgtacagttagattcttaccttgttaatggttttagtcaatctcaacaaaaattgttaaaagaaaaagtcaaattatttcacggaattctggatgatttagagacttctttgaaccagagctcttcatacgtaaagactctcacagcactaggaagagagaaggaaaaggaaagggaagaagctgaaatgagaaaggctgaggaggaaaatctgagaaaacttaaagagcaagaagaattgaagaaacgtcatgaactagaagaagcttcccaacaacaacaacaacaacaacaacagctgaagcagcagcaaaatccaaaagagagcgatggtctcggccttgattttcccgcagcagcaccttcaagcgcagtaggtaccaaccataggaggcaaaataaccaagaacatggatctctccaaccctctaaccaaatacaaagtgaaaacacaaataatgctcctactagtggcaccaatttctcccctgtagccgctactcagagtcagggtcagcaagggcagccttcggatgcaatgtttaatgatttgaattccatggacatttcgatgttttcaggactcgataatgcggctttcgactcaacagccttcaatgcaccagcgaatggtacgaagggtcttgaagatagtaatttatctaatactaacaatgatattaacataccctccgctaataataatatgagcacaaataccagtagcaatagcaacaagaataataacattaacattaacagcaacaatagcaacaacaacgataacgacaacaacaacaacgacaacaataacaacaacagcaatgacaacaataacaccagtgacaatggaaacaatataggcagtagtgacttacagacagcaaacgtccccaatactggagataacccccctccagctgacaacggtgatgaatatttgacattaaatgatttcaacgacttgaatatcgactggtcaacaacaggggataatggcgagttggaccttggtggcttcagtatatag

SEQ ID NO: 420 - DNA, 483 bp, Saccharomyces pastorianus
atgttgcgttcgactgttggcaaaagcaccctaagatcattgaatttcgttgctaagcgtgcatatgctgaagctgccgctgcaacaccaagtttgaaattgcaatttgcattaccacatgaaactttatatagtggctctgaagtgactcaagtaaatctgcctgctaaatcaggacgtattggtgttttggccaaccacgttcctactgttgaacagttgcaaccaggtgtcgttgaagttatggaaggatccaagtccaagaaattcttcatatctggtggctttgcgacagttcaaccagactcacaattgtgtgtgactgccattgaagctttcccattggaatccttttcacaagagaatataaaaaacttactaacagaggccaagaaaaatgcaagttcatcagacgctagagaagccgcagaagctgcaatccaaatagaagttttagaaggcctacaatctgtgttgaagtaa

SEQ ID NO: 421 - DNA, 1704 bp, Saccharomyces pastorianus
atggctacagaaaacccccaacgtctcactgttttgaaactggccaccaataaaggtccattagctcaaatatggctagcctcaaatatgtcaaatatatcgagaggttccgccattcaaactcatattgctgaatcagcaaaagaaattgcaaaggcctccggttatggtgatgaaacagaaaacgtagaacacatcactctacgaacctcaggtgaattattacaaggtatcgttcgcgtgtattctaagcaagccactttcttacttacagatattaaggatacattaacaaagatcagcaccttatttaaaacaaatcagggagtgcatgttacagtgagcaggctaaatactgtcacgagggttgaccaattgattttagaagatgcggtgacagaaagagaagttttagttactcctgggttggaattcttagatgacactacaatacctgtaggattaatggcgcaagaaaattcaatggaaagaaaagtacaaggtgctgccccttgggatacatcactggaggttgggagaagattcaacccagatgaagaccttgagcataatcacatgtctagtatggaccttgatttcgatatcgaagaaggcccaatgacttcaaaatcatgggaagaaggaacaagacagagttcacacaattttggtgcacatgaaaattttatacaagatgacgattttcctcttggtgatgctgcaaacgccgattgggatctggggattactgaaaacaatggtcaaagcgataatagtgacgatcattccgttgagcaaggtagaagggtcgatgggtcgatgatgtctgaagaacctacagactttaattttaacttagaaattgaaaaggatgcacccatggatgacatggatttatcgacaggttccctattagaaccacagcagtccaaacaaattagaagaagaagaaattcccagttattaaatacaaaaaatattcagctcgatgaagaaacagaaaattcggaaagtccgacttcttccaacaattacaaccaacaaggatcaagtaattcactcacagctcaacgtgtcaatataacaactaaaagactatggagtgaactcgccgaaaacatggcttacttaccggattcaatctttaagaactttttatcgtacaattctctaaagaaaagaaaagtacaaaatataatagaagggtcaattgaagaacctgagctaaacatgtcattggacctcaatgaagatgtaataagcaacgcggccgtaagcgatggtagtttcaatgatttggatgaggatgttgctggctttgagccgattgacgctgatttaagtgaagctcctttcctagaagaagatcttgccagtacaaatacgggaagcgtagaaaccactacacaaacggaaaaagtccgcctagtgtctggtgaagtggcttctaaagctaccgttcaaatggcggagattttaagaagagaaataaccgcagagaaagaagtgatgtttacaaatgttttgagacaccagctaaatacttcttcagaaaatattactagaagagaagctagtaaaggatttttcgatattttatcccttgctacagagggatgcgttgatttgaaacaaaaagaaacgtttggcaatatcgtgatagacgccaaaccagctctatttgaaagattcattactgcttaa

SEQ ID NO: 422 - DNA, 612 bp, Saccharomyces pastorianus
atgtcagctgacgaaaaaaagcacagacttgaagaattgaaagatcagaatgtggtgcttggacttgcaatccaaagatcacggctttcagttaaaagacttaaattggagtacggcgttttattggaaaggttggaatctaggatagagcttgatcccgagctaaattgcgaagatccattgccaactctggcctcattcaagcaggaactgttgacaaaacctttccgaaaatcgaaaaccaaaagacataaagtaaaggaaagggatccaaatatgcccaagagacctacaaatgcttatttgttatattgtgaaatgaacaaagagaggatcaggcagaatgggtctcctgacgtgacaagagatttggctgagggttggaaaaatctcaacgaacaggataggaaaccgtactataaactctatagcgaagatagagaaagataccagatggaaatggaagtatacaataagaaaatatctagtacagatgcagatgacgataaagaagaaagtgaacaaaagataaaaaacaacgaagaaaagtcacccacgaaagtagatgagattaaagagggtgaagaagaagcgctgattgcctctaactag

SEQ ID NO: 423 - DNA, 2259 bp, Saccharomyces pastorianus
atgagcaaagttaatacaagtcaagggcctgtggctcagggccgtcaaagaagactatcatcactgagtgagttcaacgaccccttttcaaatgctgaagtatactatggtcctccaacagacccaagaaagcaacagaaacaggcaaagcccgccaaaattaaccgtacaagaactatgagtgtttttgataatgtttccccgttcaagacaactggatttggtaagcttcagcaaactaggcgtggttctgaagatgatacttattcaagcagtcaaggtaaccgtcgtttctttattgaagatgtcgataagacactgaacgaactattggcggcagaggacactgataaaaattatcagatcactatcgaagacaccggtccaaaggtcttgaaagtcggtactgcaaattcttatggttataagcatatcaacattagaggtacatacatgttgtccaatcttttgcaagaattgaccattgccaaaagtttcggtaggcatcacgtctttctagatgaagctcgtataaatgaaaaccctgtaaacaggttgtcaagattgataaacacccaattctggaacactttaactagaagaattgatttgaacaatataggtgagatcgcaaaggataccaagattgatgctccaggggccaaaaatccaagaatttatgttcctattgattgtccagaacaatatgaattctatattcaagcttctcaaatgcatccatctttgaaattagaagttgaatatttaccaaaaaaaattactgcagaatacgtcaagtccgtcaatgatactcctggtttactagcattagccatggaagagcattttaacccttctactggtgagaaaaccctcattggttacccctatgctgttccgggtggtagattcaacgaactgtacggttgggactcctatatgatggcactaggtcttctagaagccaataagactgatgtcgcgagaggtatggtagagcattttatattcgaaattaatcactatgggaaaatattgaatgctaacagaagttattatttatgcagatcacaaccaccgttcttaaccgaaatggctttagtcgtcttcaaaaaactcggtggtaaaagtaatcctgatgcggtgaatttgttgaaaagagcctatcaagctgccataaaggagtacaaaaccgtttggactgcatccccaaggcttgacccagaaaccggcttatcaaggtaccaccctaatggtcttggtattcctccagaaactgaaagtgatcattttgataccgttctactaccatatgcatcgagacacaatgtctctttagatgatttcaagcaactttataatgatggtaaaataaaggagcctaaattggatgagttttttcttcatgaccgtggtgttagggaatctggacatgataccacgtatagatttgaaggtgtgtgtgcctacctggccaccattgacctaaatgctcttctttacaagtatgaagtcgatattgcaaatttcgtgaaggaattctgcgatgataaatatgaagatcctttggatcattctataactacttctgatacatggaaagaaatggccaaaacaaggcaacaaaagattacgaaatatatgtgggatgacgagtcaggctttttcttcgactacaatacaaagatcagacatagaacatcgtatgagtccgcaactacattttgggcattatgggctggccttgctactaaggaacaagcacagaaaatggtagaaaaagccttacctaaattggaaatgcttggtggtctagcagcgtgtacggaacgttccagaggcccaatttctatttcaagaccaattagacaatgggattatccatttggttgggctcctcatcagattctcgcttgggaaggtctccgctcttatgggtacgtaactgttgcaagtagactagcttatagatggctctttatgatgacgaaggcatttgttgactataatggtattgtggtcgaaaaatatgacgttacaagaggcacagacccacatcgtgttgaagcggaatacggtaatcaaggtgcagactttaaaggtgcggctactgaaggctttggctgggttaatgccagctatactctaggtttaaaatacatgaacagtcatgcaagaagagcacttggtgcttgtattcctccgatctcgttttttagcagtttgaggccccaagaaagaaacctctacggactttag

SEQ ID NO: 424 - DNA, 2718 bp, Saccharomyces pastorianus
atggaccagccaaggacccattcaggacccacaacggccagtaatcccgctcccagctccgccaactcatcatcttctcccgccacggccaaatccaaacaggaaagaccctccgcgtcaatgtccaaaccttcgtccgtggcaccttcccaagactcaccagatggcaacgctatcgccaagacccaagccgccgcttttaaaaacgacatgaaaaccggtgattccggtacgatagatgggtcatctcagaatatgattcccaacagggcttcaatgcaaaagtatacggaccaatcgtcggacctgctgtccaggagttccggtgttataaccccgtccatgtctttgaatacgggcactgctaccaatagtgatagcagtggcaacgcagctggtagtagtaatccagagattgccactgatagggacaacactctattcaaaacatttgacaaaaaaactggtcagtttttgaaaagcgatagtaacgacgaagaaatgagggcaaataagaaagttgtctccttaccacccaaggatactcatacgaatatgaacaattcatctccatcaccacctccctcttcgcaacagcctccttctgcgtcagctctacaactgccattggcttcgcagcaacagcagcaacagcagcaacaaacagcggggaatgcttctaattttttaaggattttttcaaataataaaatgagatcgcattctgtacccactattttgcattcttctttgagaaaattatcgtctcatacccaatactatcgtaatcaaaatattcttttaaatcaccaaactccttctggaatatcgaagaaaaaatttcccagaaatcatcaccaaccttatctgcattctaacaaccctcttagtacaaaccccctctcaataaaacgcgccatttttctaaatcaacagatatccaacagctctagtagaaataatgacaacatcaacgacaccacagccaattcgatagcaaattcaaatctcaatacaagatcagattttgaattgactttggaagacagaataaactacataaaggctaccccaacaccggtcccatttcctccgataaacttacagggcttaaaggagatagatttgcaagaaatcttgaaaaatcctcagcttagacacgatatcatattcgacccgcttttgcaattcagaccgaatcttgatggtgaaagaggtaataaaaaaagacaattagctgatatctactggaacgacgttcaaaatgaaatctacgtttattctaaaaaacctgaaatcttccagtacaacaggtcaagactggttccactttttgatactctaagggatgtgctactaaccatagtgccacaaaaagaatctccgatgataaataatgttttagacactgaattgaacattcaagaactactaaagggttcgctaataatgtcaaacctgtcaggttggttagccgatctatttaagcatcattgtgctcccatgagagatccgtgggtagacaaaatgagcaacaaattcaaagaagctgaaagagattcttctttaactagattaatagaaggtttaagattggtcttccaaattttggaaacaatgaaactagatatcgccaatcaccaaataagaatactaagaccagccttattgagtaatgctgtggaatttgaaaaacagtatttcaacactcttatagcctcaaaaagggtcaatttaaacacttcgttactttggtttgacaagaaattcaacgagaacgtttccatgggccttgtcaataatcctaacctcgtcactatcccagacgtctacaaaatttgcattagaagtataatcaacctactatcatgtagaaaaatggtcagagactacccgactccactttcgtttgatcatgcgaggttgatccttttgcgtgcggatattcgtcaaattgtttgcattttggtctgccgcttgctatttcaacaattagtagccaacgatacttcaatgaataaagccacaaaggaatacgtcattcatacatacacgacaaaaaggttgaaaaccgaaatcattagtatcataacagatgaacatggtaattgcagatggactaagaacacaatgtctatagctgttcatctttgtaaaatcatcgatgatcttcacagagagtacgacaacaacaacaacagcaacaacaacaacaacaacattggtgaccacgaaaagtctgcaagaactcaattaccttcattggacaacgccaaaatcacatttgctaaatcatggctatccaaacaaactcagccactcagtgaagtttatggtgtactagaaaatagagtattcaaatcgttagaggactctatttccagcaaatccgaatgtaccattgatggacgtgttaaacaagatttcgtctacctttacaacacaaataatggcaacgtgaatggcacaaaccatccgaccaccactacggatgccagcgtcaaaatcagcccctccttaatgtctccttctaaatcctctaccaccggccctagtagtaatacggctgcgtctaggggtttattcgcagcaacggagctggatgaattcgacaacgtctaccgccatttatatgcattaataaatcttcattggtccgtttttggtcctcattatattgaaatgttaggagacaaagttagcaaaaagggaatataa

SEQ ID NO: 425 - DNA, 4485 bp, Saccharomyces pastorianus
atgagcaatactaaaaatgcacatggcggcataagtgctagtcccttgactagtagctcgagcgcctcgtatgcagcttcagaagtgtccttttccggcagtactcacaacaataatgagcagaataaagactccaaaacgctttcacagcatgcaagggacagcatgagccagatcagcattgcggcgtctaatatgacaccagatgtcatttccaaagtggaatctatggctgatgcactatcccgtcatacaacaaggagcggcgcctttaatatggattcagacgatggattcgacgcgcacgccatctttgaaagtttcgttagacacgccgatgaacaaggtatccatatccgtaaagccggtgtcaccatagaggacgtgggtgctcaagggttcgatgaaagtgccctagagggcgctaccttcggtaacatattgtgcctacccttgaccatcgtcaaaggtatcaaggccaagagacataaaaaaatgagagacattataagaaacgttaatgcattagcagaggcaggtgaaatggtcttggtcctcgggagaccaggtgccggttgttcttcctttttgaaagttactgctggtgaaattgaccaatttgctggtggcgtcagcggcgaagtatcatatgatggcatcccacaaaaggagatgatgaagaaatataaggcagacgtgatatacaacggtgaattggacgttcatttcccctacttaacggttaaacaaaccttagactttgccattgcctgcaaaacacctgcagtaagagtcaataacatttccaaaaaagagtacattgaatccagaagagacttatatgccacgattttcggtctaagacatacttatggtactaaggtgggtaacgatttcgttagaggtgtatccggtggtgaacgtaagcgtgtttccattgcagaagcattagctgctaagggttctatttactgttgggataatgccacaagaggtctagacgcttctacagctttggaatacgcaaaagcgattcgtattatgaccaatttgttgaaatccacagcatttgtcacaatttatcaagcaagtgaaaatatatacgaaacttttgataaagtcactgtcctctattctggtagacaaatttattatggtccaattcatgaagcaaagccatatttcgcaaaaatgggttacatatgtcctccaaggcaagtaactgctgaatttttaactgcactaacagatccaaatgggttccataaaattaagccagggtacgaaaacaaagttccgagaaccgcaaaagaattcgaaacttattggacaaattctccggaatttcttcaattgaaaaacgatattgctgcttacaaagcaagagttaataccgaaaaaacaaaagaaatttatgacgcatcaatggcccaagagaaatctaaatacacaagaagcaaatcctactacaccatttcatattggcaacaaatcaggctttgtacgcaacgtggatttcaaagaatttatggtaacaagagttatacgatcatcaatgtttgttccgccattattcaatcttttattaccggttcattatattacaacaccccttcatctacttcgggtgcattctcaagaggtggtgttttgtatttcgctctattgtactactctttaatggggctggcaaatatctcttttgatcatagaccaatcttgcaaaaacacaagggctattcgttataccatccttcagccgaggcgatcggttccactttagcatctttccccttcagaatgattggtttaacatgtttcttcattattttattcttcttatctggattgcacagaacggcaggttctttcttcactatctatttgttcctagtcatgtgttcagaagcaattaatggtttatttgaaatgatttcctccatgtgtgacactctttctcaagcaaactctatctccggtattttgatgatgtccatctccatgtactctacatatatgattcaattgccttcgatgcacccatggttcaaatggatctcttacgttctgcccattagatatgctttcgaatctatgttgaatgcagaattccatggtagacatatggattgtgctgacactttagtacctagtggaggaaattacaatagtttatctgatgactacaaagtttgtgcattcgttggttcaaaacccggccaatcctacgtgcttggtgatgattacttgaaaaatcaatttcaatatgtttataaacatacttggagaaactttggtatcatgtgttgctttttaataggttacgttgttttaaaagccgtttttacagagtacaagagacctgtaaagggtggcggtgacgctcttattttcaagaagggatccagaaagtttactgcaccagctgacgaggaatccccagataatgtgaacgatatcgatgcaaaggagcaattttccagtgaaagtagtgccaacgatgatgtttttgaagaattggaagctaagggtgttttcatctggaaggacgtttgctttacgattccgtatgagggtagcacgagaatgcttttggacaatgtttcaggttactgtattccaggtacaatgaccgccttaatgggtgaatctggtgctggtaagacaaccttgttaaacacccttgctcaaagaaatgtgggtataatcaccggtgatatgcttgtcaatggtcgccccattgatgcaagtttcgaaagacgtacaggttatgtccaacaacaggatattcatatcgcagaattgactgttagagaatcgttacagttttctgctcgtatgcgtcgtccacaacatctacctgattctgaaaaaatggattacgtagaaaagatcatcagagttctaagcatggaggaatatgcggaagctcttgttggtgaagtgggttgtggtttgaatgttgaacagagaaagaagttgtctattggtgtcgagttagttgctaaacctgatttgttattattccttgatgaacctacatcaggtttggattcccaatcttcatgggctattatacaactattgagaaaattatcaaaagcaggtcaatccattctttgtaccatccatcagccttcggcaactttattcgaagagtttgacagattactacttctaaaaaaaggtggtcagactgtttatttcggagatattggtaaaaattcatctactcttctagaatattttgaacgcaatggagctagaaaatgtgattctagtgaaaatcccgccgagtatattttagaggcaattggtgcaggtgctactgcttccgttaaggaagattggcatgaaaaatggctaaactcctctgaatataatcaaacacaagacaaagtacaagaactaattgacgatttatcaaaacaagaaaacaaaccggaagtcggagacgagccttccaaatacgctacctcttattcttaccaattcagatatgttttaatcagaacgtctacctcattctggagaagtttgaactatattatgtcaaagttgatgttaatgctggtcggtggtttatatattggtttcactttttacaatgttggtaacagttatgtgggtttacaaaacgcaatgtttgcagcatttatttccattattttgtctgcgcctgcaatgaatcaaattcaaggtcgtgctattgcatccagagagctttttgaagtcagagaatcccaatctaatatgtttcactggtccctagtattgatcactcagtacttgagtgaacttccataccatttacttttctcgacaattttcttcgtctcttcttatttcccattacggatattctttgaagcttcaagatctgcggtatacttcttaaactattgtattatgttccagttgtattacgtcggccttggtttgctaatcctatacatgtctccaaatctgccatcagccaacgttattttaggtttatgtttgtcgtttatgctttcattttgtggtgttacacagcctgtttcattgatgcctggcttctggacttttatgtggaaggcttctccatacacctattttgttcagaaccttgtcggtataatgctgcacaaaaaaccagtcgtatgcaaaaagaaagaattaaactactttaacccaccagatggttcaacgtgtggggagtacatgaaaccattcttagaaaagtctactggctatatcaaaaatccggacgctacctcagattgtgcatactgtgtttatgaggtaggtgataactatttgacacacattagctctaaatatagctacttgtggagaaactttgggatattttggatttacattttcttcaatatcgtcggtatggtgtgcgtgtactacctcttccacgtgagacagagttctctcctaagccctaaatttatgttaaaaaaaataaaaaacataaggaaaagtaagcaatga

SEQ ID NO: 426 - DNA, 627 bp, Saccharomyces pastorianus
atgtatggagatctagccaataagctggttttagaagccaagaggacgaaacaattgtacacaagaagcaaccagaatgccaagctacctatgtatcacgaagatataatacgaaatatcttaaaggaaatttcgaatctacgcaaaaatacagagtacctaaaagaacaacaacaattgggtaagctcgacgacaaggtggccaagtgtcaatacttcgtcacgttattatgtatggaacgaaataagagatgcctcttggcatatcacaaattaaggactgatatgctggattctatggcttggaataataacggcctagacttgatgaatagcatagcttttagtcagcaggatacaaatgacctttctcatcaagagcaagagtatctaaaagaatactcggatttgatcactgagctgaaaagtggtgatctggctgatatcgatttctctggctctttggtacctccgagtgatgtttttatcgacgtcagagtcctcaaagacgctggcgaaatccaaaccgaatatggtgtgttcaacctaatcaaagattctcaatttttcgtaaggcaatctgatgtagaacgattaattcaacaaggttacctacaaaagatatga

SEQ ID NO: 427 - DNA, 3174 bp, Saccharomyces pastorianus
atgaatacttctgacaaaaatcatgataaaaaacctaatacgtcgagagaacaactgcaacccttgcaccaaaaagagtccgaagaatgcataaaaacgctaaaagatcttaatgtgccagagacgaagaaactttcttcggtcttgcatggtagaaaagcaagtacgtacttgagaattttcagagatgatgaatgtttagccgataacaacaacagtaccgataataataacaatgagaaatcttcgtcttacgcgggcaaaaagccaaggtcaaaatcgtcttccaaaccgatatcagaagcattacggccctcaaacaaaaaaacatactcagacgctttgtcttcatcattgtcattgtcatcttcaattctatcacaccacgagaaaccggcaatacagcacaacgagcacgtggcgcagggcgataatattaacacgatcaatgagggggttcaagtctctgatgaggatgttgggaaacaacaatcgcaccaacagcagatgatacatcaacaaacctttccaaaaacaagccaagatatagatgacggatccatctcacctaaatccacttaccagaatactctacacggactatcagaggatttaacactgaaacctgtctcttctgcaacgtactaccctcataaaagtaaagctgattctggttatgaagaaaggggtaaaatggaaaatgatatcgacaccattcaaccttccaccataggtttcgtgcctagcatagcaacactacccaggacatacaataggcacacctttagagtcaagactcattcggccttgtcacagtccttgaagcaagaaaacatcaacaatcgtggcattaatcaaaatgctcaacaatctgaatctgtgcagcaaggcgaaccaaacagaaaacaaatcaaacctcctgcacagaatagcaaagatgagcaggaggaagaagaggaggaagatgagcatagggaatacccattagcagtagagctaaagccatttacaaatagagttggaggccacactgccatatttagattttcgaagagagccgtttgtaaggcactagtgaatagagaaaatagatggtatgaaaatatagaattaagtcacaaagaactgttgcaatttatgccacgttatatcggtgtcctgaatgttagacaacattttcagtcaaaagatgattttttgaatgatttagatgagggagataacaataacaataacaatagcaataacaacataaaaagtaatatttatcgcaatggaaatgacgatgccccaattaacgcagaaccaacagggactcccttgaaccacatacattcttttcccttggaaaactcatcgagacaaatgcttgaaaacacgcttcctgagacggaatcggttcaaccacatgttcagagatctctttcgagttctaaccaaccttctctactgcctgaagttgttttgaatgataacagacatattatcccagaatccttgtggtacaaatattccaattctcccaattcagcgccaaacgattcttacttttcttcttcttcttcccataactcatgttccttagacgatcatggcaatatgaacaaattaaaaagacgcgactctggatctacaatgataaatacagaattgagaaatctagtaattagggaagtatttgcaccaaaatgcttcagaagaaaaagaaattctaacacaatttccacaggaaaacacaattcgcacacagattcaaacccaccttctcacctgcaaaaatcgcgagcttcatcgcatgatgcctcgaatacatccctaaagactctcgatgattcatcgtcattagcgaacttagatttacaaactggcaattctaattccggttcaagtccacatggcccactgctaaaaaagtcgcttcatgaaaaaatatccaatgcattagaaagctcgcattcagttatggatttgaagcaatttcataagaacgaacaaatgagacacaaggattcattttgcaacactttgtcgcccattttgactgcatctaattcgagagatgatagcgagttcagctcttctcctaatcatgccaacaacacacaagaaggtgtatttgatatggatgaagatacggggaatgacacgataaagatagatagccatgatcagtgtggcgcccctgatactaacatgattataaaatcattgggttataacgtttcaaacgactacagccatcatgacattgaatcagtcacattcgaggaaacatcccacaccattgtctctaaattcattttattagaagatttaacaagaaacatgaacaaaccgtgtgcattcgatctaaagatgggtacaaggcaatacggtgtagatgctaagaggaccaaacagctatcacagcgtgctaaatgtctaaagactacgtccagaagattaggcgttagagtctgtggcctaaaagtttggaataaagattattatatcaccagagacaagtatttcggtagaagagttaaggttggttggcagtttgcaagagttcttgcacgattcttatatgacggtgaggcaattgaaagtataattaggcaaattccaaggctaatcaaacaattagatactctgtattctgaaattctcaatttaaaaggttacagattatacggtgcatctttactactaatgtatgacggcgatgccaacaaggcaaactataagaagaagaacggcgctcgtgtgaaagttaacttaatcgactttgcacgttctgtaaccaaagaagatacaatggaatgcctggataaattccgcataccaccaaaatcaccgaatctagaagacaaaggattcttaagaggtataaagagcttgaagttttatctgttactaatatggaattatctgacagctgattcgccattaatttttgatgaaacagaaatgactgatatgattaatgatgagacagattcgaataatacttcttcctctgcgggtcccaaaaccaaatttagtgggaaatgggattggctggacgaatttgaccgagaagatgaggaaatgtataatgatccaaatagcaaactaagacaaaaatggaggaaatacgaattgatttttgatgctgaaccaagatataatgatgatggcgaagttagtgattaa

SEQ ID NO: 428 - DNA, 702 bp, Saccharomyces pastorianus
atgaataaacaagctgttgaagagagaagaattgtaatttcgattggcggggggcatgctaccggtgtgggagcaatcgcagtggagctacaaaacacttttaagaacctctttaattctattaatataagagtaataaacctggacaaaatgatagagggagatgtcaagagctacaataacggcgactatgattttgacaacattcttaacctagtatatgaaaagcatgctataacttcgcaaaatgacgtgatacagcatgactacgaggacccaatagatttaataatagtctgtggatgctatgctttatacgataaacgaatcaatgcaatctcccaattgaaggtattcttggatagtgatgcggataaaagattaatcagtttgatcaaaaaaaataaagtggataccaatgagcaactggctcaattgatcacggagtacatggaccacctgcgcccggagatgcagcaatacatagaaccaaccagagtctttgcagatctgatcattccttccacaaatgaaaacctgggccgcgctattcttgttgacggtatagtgaagacaatcgaggagacgagaagccaaatgggcgaagccaacaatgcaaacagcaaagtacgtccacgtttatgggattttgaagcagagacaatggacttagaaaaggatagatactacgatctgtcgtga

SEQ ID NO: 429 - DNA, 1200 bp, Saccharomyces pastorianus
atgtcgtttaacagagaagaagatcaaaagttgaaattcaaaacatccaagaaattaaaggtgacttcgacttttgaaagcatggatttaaaggaagatttacttcgaggtatatattcatacgggtttgaagcaccatcctctatccaatcgagagccatcacacagattatctctggtaaagatgttattgcacaagcacaatcaggtacaggtaagacagcaaccttcactattggccttttacaagctattgatttaagaaaaaaggatttgcaagcactgatactgtctcctacacgcgaattagcaaaccaaattggacaagtagtgacaaatttaggcgattatatgaatgtcaacgcatttgcaatgacaggtggtaagaccttgaaagatgacttgaagaaactccaaaaaaatggctgccaagttgtcagcggtacaccaggaagagtattagacatgataaaaaggcaaatgttgcaaacaagaaatgtccaggtattaatcttggacgaagctgatgaattgctgagcgaaactttgggtttcaaacagcagatatatgatatttttgctaaattgcctaagaattgccaagttgttgttgtaagtgcgacaatgaataaagacattttagaagtgaccagaaaattcatgaatgatcctgttaaaatcttagtgaagagagatgaaatatctcttgaaggtatcaaacaatatgtcgttaatgttgataaagaagactggaaattcgataccttgtgtgatatatacgactctttgaccatcacacagtgtgtaatattctgtaatacgaagaaaaaggttgattggttatcgcagcgtctaactcaatctaactttgctgtggtttcaatgcacggggatatgaaacaagaagagagagataaagttatgaacgattttagaactggtcattctcgtgtgttgatatccactgatgtttgggcacgtggtattgatgttcagcaagtttctttggtcatcaactatgatttgcctgaaataatagaaaattacattcaccgtattggtagaagtggtagatttggcagaaaaggtgtggctataaacttcatcaccaaagctgattcagcaaagctaagggaaattgaacagttttacgttatcaaaataaaaccaatgccagcaaactttgcggaattatcatga

SEQ ID NO: 430 - DNA, 594 bp, Saccharomyces pastorianus
atgaatatcactgtaactgtttatgataaaaacgtcaagcacaaattagaagaaaataaagccaatgacaagagaacaagcaacaatgatctgccaacatacaataatgaatctaagggcgctgacggaagtgattgtgccatgtttccgactaccataaagtgcttatttgaagatagtgaaggggaccctgcagacctaagcggtactgctttaacagcagggatagataaggaggaggatgaaccagagaatgtcattattgttcagttaaacgaatcaggatctctggaagatgtcacgctggtcagtgatcaatacgaacttctatctcacagagtaagcagccctggattggaggagaatcagttaagaacgcttgtatcgcataatagtgacgataaactaaatgatgatggggaaggagttagtattgacagcgataaactaggaatggacttggatttagaacttgacgtaatttcacagttctgtgacctatctccttctgttcgagagttaagcttaaatgacttgattaaactctacgtcacacaaaatgaacaattacaaatggtttccaactctatatga

SEQ ID NO: 431 - DNA, 1707 bp, Saccharomyces pastorianus
atggatagtgcgtcaagctcagtcgtaaaaaaattccagaatgataaagatcccaaggaatcagtagaagaggcggtactgaagtatgtcggtgttgacataaaggatcatggcaaaaagagtaagaagaggtcgaagaaacatgataagaagaaaaagcacggttcgaagaagtctcatagcgataaggatattgaaatggattggtttttgaagacgtctgaggcaaataattcacgcaaattggatgacattgaaccggattctgttgctatggctgccattgctgctgcatacaacagtacagtcaaagagaagcacaagaaaaatcgccacaaagacggttctggtagcaaatcagagaagaagaagcaccacaaatcaaaaaaattcaaagagagaacagcaaagataaaaatggttctcgatccagagttaagaacactagatgatgctctgacaacacctgcattttcacccgatgatctcattgctgaaacagctttcgataagtatgtagatgcggagaaggcatactcggtaagaaattcgagtaaaccaacacacgttgacgagaattcacaagaaaacaatgctaataatgctcttgtcaagaactacgccgaattagagagaatttcaagtaatggcagctacatcaagcgaacagcaaaaataccggagaaagatgttaaattagaagagccgcaaccaacatcagatgaggataaagagggtactgtgttactacgatctgacgttgttaaagcgtctgatatggatggtgctattacaaaatccataggcaggaaatttagtcctagcgaggaagatgctttggaccaatttattgaaaaatacatgcaaataagaaacctagatagacagcaaatgtgtgagagaatttggtctactgatggagttattagagatggattttgggcgaatatcagcaaagttctgtcttataggactagatcttcgatttataaacatataagaagaaaatatcacattttcgaacagcgtgggaaatggacaccagaggaagatcaagaactggcgagattatgtttagaaaaagaaggccactggactgaggtaggaaatcttttaggtagaatgcctgaagattgtagagaccgttggagaaactacatgaaatgtggctccaaaagaggatctaaaagatggtcaaaggaagaagaagagttactgacgacagtagtaaacgaaatgatcgaagaagcacacaattatcaaaggatgaaagaaactgaggcagctaacaacgaagatggatacaaccaaatgtataccagaggtccaaaggggaagaaggtcagtgataatcctactttcaaagatatgattaactggactgtggttagtgaacgtatgagtggaacaagatcccgtatacaatgtcgctacaaatggaacaaactagtgactgatgaagcctataagagcatgttgagcattccctcttccgaaaggaaatggttgttagaacaactgaagcagttcgccgaaacatcatactcaaatataaattgggacagtttagccgcttctaaacctgattccttaaggactggtcttgaacttagattatgttacgagcagatgagagaaaggattgaagggtacaaagaaagacccatggccgatataattaatatactactagaacagatgaattaa

SEQ ID NO: 432 - DNA, 2682 bp, Saccharomyces pastorianus
atgtccgtcaatgaagcacctcagaataaaggccagggacttcgaaaggcaagcactcgtcccaaaattgttatacccgagggatcaccttccaagaatagtgacgctgcttcctttaatatagaaggcgatacatccctcaacgatgatcttttaagtatatccggcagtgtcacaccaaaggcgagaagatcttcgagaatgagtctggattcattaacgccacgaagaagctttgattccagaactatatccgtcgccaatagtagatcttttggatttgagaacgaaacgcatagtggatccatggatttctcaccattagggaacaactctatttatgaaatcgttatgaatacaagaaggaaaaactggctgaattatccaactgtcgcagatataccaccggtgagcctaagcaaaacagaactagatgaccactggaaaagacacgtgaaagattatgtcgagaacatcaagaatgaatatcaaatatttcaaagtacaaataatataagaaacatgaaccaaatggagcaattaaaagagcttcgagaggaagacaacagaaacggagagtcatttgaagaaaaccttagacaaaatgattctgaactaataagcaatgtacccggcttctacttttccgacaagtttcaattagataaccctcggacgttccacaaggttttggacggaatcgatttgtttttaacgaagttagatatgaaagaacaagcccagagggaaggcgccttttttgagttgagggataaattaaatgattacttggatatcgtagaaacgttgctggttacggaaatatccaagtcgtcacataaattcttccacgcgctaagtgaggttgacaatattcagcaaagagcttatgatacgataagtgaactaaaggaattatctaaaaatatcaaaaccatcgatgatgagaatatcaaaaaaaaaatatcgcatctggagatgattttcaaaagaaagaatgtagagaagctggaacaggggctattgcaagcaaaactagtattaagcaagacggacgaatgcaaaacgctgtataacgaggagaaatttgatacctgtttagaactaataaaatcaatcgaccatttgatcaagggtaacgattcgaatgatggagatgttcaaaactggacccggccatggccatataagctgagtgatttgaaaaccatacctgccctatcggcaacaagagagtttttaacgaatatgaagatcgagataggagggaagtttagtctacaattatcaaaccttcttatagatgatttgaagtctttctgccaatcaatcgagaccaaagagacgttatgtagactaaaaagcggatctaatgataaaaaacagaccatattcaccgatactttttcctcagagatagaaggattgatagtcaagttaaatagatgtgaagagttaaccagtgccttcgacctctacagagaaaagtctattgctgagcttaaatctgttatcaagatttatctcccaactgaaaatgcatgcttagttgacaaagatggcaatactctcgacgaaaagcaatgtaacaacggctctacgagcggatccaaactttcacggctaataaaagagcaaacacccgctgaatttcagtctatgcttgtaaatatattcacacatgccttagaggctcttcgaagactttacgggcatcaaaaattactattagacatatctctcaatgaattagcatcagtgaagaacccaaacgaaaaccaacacaacatgattacgcagttggatattcgtaccggtattaacgaaatcattagaattattcaattacgtacaggtaaaattattgctgtaagaagagagttgaacatatcattgcggtacgactatttcctaaaattttatgccatatgtgttatttttattcaagagtgtgaaatattaagcggggaatttttaacaaaatatttgagtgacgttttagcgtcccagattaaacattatgcaaacgcacaaagctcaagaaactaccgcaatataaagaaaaagatcgacaccgaaaaatgggtaccgtacatcgtcgatccgtccatccaaagcgatgttaatgatattatatccagtatagacatagacccactaagatggacggctattttagacatgacacgtagtttctatgcttccgaaaacaacggaagtgaagacaaacgcaaagaggaaggggatgaagcgtcccaaggtcatagaaaatcggttgtcgttggcgataaaacatttgtggcgagtcagtctttactcactgccattgaaactataaaggaattgatggtgctttcaataaaccttccttctatgtatttgccgaattttgagaagttgtgttacgatgtactacaatattataatagtagcgccatggcttctgtcacacaacctggaaattcgcttttaaaaacgggtagaaacttatctattatgggagaatcattagattgccttgccgaatttgtggcaattgttcaaagcttttaccgaaggctttccaactccagcaaggattttgaaccgtttgatccgagccattatacgagcttactgggacaataccaaacttcatcgaacaaaatatacatggcgaatgcccctccaccacctgtatga

SEQ ID NO: 433 - DNA, 1524 bp, Saccharomyces pastorianus
atggatctatttttgcaatacagactgggcgacatttcatttgatgaatttcacagaagaacaattcaaaacgagtttgaaagaattctcgaagagccctcgttaaacttaaaaaactactgtttcagtagacggtccattcatgatacaggcaagagcactcacttaaatataggcgttagctgtcttgatattgataacaccggtcaagtgttattaggaggtggtgatgacggatcactttcagtatggggtttagatgaatcatctcatcaaaacgatgaaggtcaacaagaactaatcaacaaaagactaaatttcatcaaacgacagcctcaccaaaatgatagtgaacacactcaaacaccgtatcatgaggataaaaaacaacgattacatgattctaatgctacaagattagttcacagtttccaaacacaaagaaacaaataccgaatgtatagacaaagtactgcaacagattcgggttcaaggtcacatatgacaagtgcaaataacggctgcacaggcgttagaaacacttcactatcagaaactgatgcagaagatgtaatatcgcatcataggtatggaattactactttgaaatggtacagaacggacaatggcatgtttttcacaggatctaatgataagactgtcaaactatgggacacaaataggtttgaggcagttcaaaatataaatttagggtacaaaataaaccaaattgacaataacattgctgatagtagttctttgcttgtcgtagcaagtgaagactattacccaagactgatcgatttaagaaccatgaattcaggtatcaccacactcggaatgggaaacaagacacgaatgcagtccgaaatcttatgctgtaagtttaacccagtgagagaacagatcattgcatgtggcgacatgcagggcggaataaaattatgggatttaaggatgaggaataagttatatttgcaactgaaaagaaataaaaaaggactagacattataggaaacaataatgacagtggagatgatgtgtattttagttccaacgaatcgaacgctcatttgaaatgctgttgtgacattgtatggaataacgaaggctcggaattatgttctactggtgcggatggaaaattgattatttggagaccgtttactgagatactacgaaaagacgatattacgagttataagcagttaggaccgcaggatctgaaccgcatcaaatacaagaagagactttcacaaagattgctctggtttgacaagttcttactgtgcatcactgataatggggaaatacaaatatacaacacagaggaaggaaaactatggaacaaacttgaatacccaatggggcataatcaagtaaagagaagtttggcctcgcattgccaatttagttccatggccttacagacaaatatgatgaactctgttggtctcagactgttcttgggaactaacagcaacactgtcagtgatggagggtccatttttgagtgttcctga

SEQ ID NO: 434 - DNA, 597 bp, Saccharomyces pastorianus
atgccaagagtcgctattatcatctacacgctatatggccacgtcgctgccactgccgaagctgaaaagaagggtatcgaagctgctggtgggtctgcagacatctaccaagtcgaagaaactttgtcgccagaagttgtcaaggccctcggcggagccccaaagccagactacccaattgccacccaggacactttgaccgaatacgatgccttcctgtttggtatcccaaccagatttggtaacttccccgctcaatggaaggcattctgggaccgtaccggtgggttatgggctaaaggggctctacacggtaaagtcgctggctgtttcgtctccaccgggaccggtggtggtaatgaagccactattatgaactctctatccactttggctcatcacggtatcatctttgtcccattgggttacaagaatgttttcgccgaattaaccaacatggacgaagtccatgggggttctccctggggtgctggtaccatcgctggcagtgacggttcaagatctccttccgctttggaattacaggtacacgaaacccaaggtaagactttttacgaaactattgctaaattctaa

SEQ ID NO: 435 - DNA, 975 bp, Saccharomyces pastorianus
atgtctacctttgaaactttaattaaaagaggtggtaacgaagccatcaaacttaaccctccaaccggtgctgatttccacatcaccagtcgtggttccgattggttttggacatgtttctgttgttacttattgttcggcctaattttaaccgccttaatgttcagaaaacccgttaacgacagattcttctactacaccggtattgctccaaatattttcatgtgtgtagcttacttcaccatggcctctaacttgggttggattgcggttaaggctaaatacaatcatgttcaaacttctacccaaaaggaacatccaggttacagacaaattttctacgctagatatgtcggttggtttttagctatgccatggcctattattcaagtctgtttgctaggtcatactccagtatggcaaattgctttcaatgtttgtatcactgaattcttcactgtttgttggttaattgccggttgtgttcactccacttacaaatggggttactacaccatcggtcttggagctgccattgtcgtatgtatcagtgttatgactactacttacaacttggtgaaacaaaagggggataacaatattagaatcgtcttcctcactatcttcagcatcattatgttcatgtggatcatcgcttacccaacctgtttcggtattactgacggtggtaacgttttgcaacctgattctgccggtatctttttcggtatcatcgatctaattgttatgtgtttcatcccaaccttatttgttccaattgcttctaactttggtgctgaaagattgggctaccacttcggtgatgacgcttctgaatcacacgtggggtctttcactcctagaccagttgctagtccaaaaccagctgccactccaaagttaggtgaaaagaaggacaaaaagaagtccaagaagagcaagaaatctaagaagtctaagaagtctgaggaatag

SEQ ID NO: 436 - DNA, 2352 bp, Saccharomyces pastorianus
atgtttgaacctgtcaatatggatgaaagttccccacaagataaggagctggctaaatttctctccccaccgggtagttatctctctccagcttcactagacagcagttcatcattcacgaacggtggtgagcgatacaacacttcggctagctgttttgaaccaaaaagtaatttaccctctttgtcgtttttaaatgctagagcaggatctttaggtaccgtatttaatcatagacagatgacttcgcctctgaactctaatactagaagtgaaacttttgattcaagcgcgaacagtaataacagcagcgatagtaatgaaaatacaggatatcccgctagctcacaacaaagtgatgatgggcgttcttctttgactccaaatgccgctgtaacttcaactgtcagagataagaagggaaatacagttaagcgaaagtattccaggaatgggtgttctgaatgtaaaagaagaagaatgaaatgcgacgaaaccaaaccgacttgttggcagtgtgcaaggctaaaccgtgaatgcgtttacgttttaaatcccaaaaataagaaaagaagaacttccaatacgaacaggataaaagaatccagaaagcataacagtattcatgatgacgatcatcctcatggccctcacaagcgtcagcaccagtctagtaaacctgagaaaaaatcacttcgaccaaacttagatgatgactccacagacacaaagcaaattatagacagctctaagactgtgccgttgaatgagatagaatccttagagatcccaaaccttgaccccacgactactatgaacggttacgatgttaacttactaatgcaaaatttaaatgatatggttaatatgaagctgcatgattctttcttgttaaatgaagaactaaaagaattcgatttgcccgatctggacattcctgaactcttacctgcgccgaactcaaatagcactgtacctatatcttttttggtgaataatgtaataaccttcaatacaaagttaaattccttcaaactgggtggtatccacgataaatatctaaagatattttattacgactgtttggattctatcgccccattttttcaaaaccaaggaaatcctctaagagacattttactttcattcgctaaaaatgaggcttatcttttatcttctattttagctacaggcgcatccatagcatacagaaaatccaataacctagaggatgaacgaaactattgcgcgtatttatcacattgtctgagcctcttgggtgaacaattcaaaaatgaatcgaacgttttgaataggatagaacctattattctaacagttatcatgcttgcctgggattgtatttactcgatgaattcccaatggagatctcatttaaaaggtgtcacagatcttttcaaaaaaatcaattccgggaattcatcaaaagtactgaacgttgccaaaagctggtttaaggttatggagacatttgcaagtataagtacggtattagggggatctttaattgataataatgatctagacgccattttcgatccatatgattatcagtatgttgattcattaaaatttctgaatatcatgactccattaaatgagtttaatctattaagaggtcataaagaagatttcgaccttgttattaaggaagtctttaaatcactcaatacaattaggtcatctgaaaaaagttatttttcaaaagatgaaggtttgttcaccaagaaattagattattactttggtcgtctcacttcggccgaaaaatttaaagatcatttatcatacttcaatacacagaaaattttagtggagattgacaagcaactagattacgaatttatcaacaagacgggaattataccgtcagacaaccaatcacacccgaaaactagcaacattcacgacaatgccatcgatatggtgacattgaagaacggcgaagaaattgccattagttggtatgacatttcgcatcagacacaagttttatctttcttgttgattgtcctattaaaacttttgggtataccgaaagaatcaatcactattcaacaagtggtgaaaaggataatgtcattttttaaatttttaaacagtgattctccacctcacaattcaagaacttgctattgcaattttgccgtattgattgcgggtttaaacgcaatggacgaggagacaagggcgattgttaaaagatactataagatcaatggtggtaaattccaaagacttacagagcataaccttaatagactagaaaaggtttggtatggtaaagatcaaagttataggctagaagaacaagatgttttaacatggtag

SEQ ID NO: 437 - DNA, 159 bp, Saccharomyces pastorianus
atgagacatcaacaaccgcatatgaactacccccctcaacaacaaccaatttatattcaacaggctcctcctaaggaaaaatcaggcggctgctgcaaaacttgttgccattttctctgctgcctctgcttgatcaacctatgttgtgacgttttctga

SEQ ID NO: 438 - DNA, 1113 bp, Saccharomyces pastorianus
atgttcattaaaaacgaccacgctggtgacagaaaacgtttagaagactggagaatcaaaggttacgatccattaaccccaccagatcttcttcaacatgaatacccaatttcctctaaaggtgaagaaaacattgttaaggcaagagactccgtctgtgatattttgaatggtaaagatgaccgtcttgtcatcgtcatcggtccatgttccctacatgatcctaaagctgcttacgactatgccgacagattgtctaagatttccgaaaagttgtcaaaggacctattgattattatgagagcttacctagaaaagccaagaactactgttggctggaaaggtttaattaatgatcctgatatggacaactctttccaaatcaataaaggtctacggatctccagagagatgttcataaaactggttgaaaagttgccgattgccggtgaaatgttggataccatctctccacagttcttaagtgattgtttctccttgggtgccatcggtgccagaaccactgaatcccaactgcacagagagttggcatctggtctatctttccctattgggttcaaaaacggtaccgacggtggtttacaagtcgccatcgatgctatgagagccgctgctcacgaacattatttcctttctgttacaaagcctggtgtcactgccatcgtaggtaccggaggtaataaggatactttcttgattttgagaggtggtaagaacggtactaactttgacaaagaaagtgttcaagacaccaaacaacaattggaaaaagccggtttaaccgatgactcccaaagaagaattatgattgattgttctcacggtaacagtaataaagatttcaagaatcaaccaaaggttgcccaatgtatctatgaccaactgaccgaaggcgaaagcaatttgtgcggtgttatgatcgaatcaaacataaatgaaggtagacaagatattcctaaagaaggtggaagagaaggcttgaaatacggttgctctgttactgatgcttgtattggttgggatagtaccgaggaagttttggagttattggcagaaggtgtcagaaacagaagaaacgtccaaaagaaataa

SEQ ID NO: 439 - DNA, 1503 bp, Saccharomyces pastorianus
atgctcagaaacgcattaaggtgtgcccagtcatcgtctaaatacggatctaagactgcaatacgtacatttatgaatactcaagtacagttgaatagcgctgccgccccccctgtattatttacagtgcaggatactgctagggttataacgctgaataggcccaagaagctcaatgccctgaacacagaaatggctgaatctgtgttcaaaactctgaatgagtatgccaagagtggtgctaccaatttagttattttgaagtcctccaatcatcctcggtcgttctgtgctggtggagacgtggccgctgtggcagcatataatttgaataaggaattctcgaaatctatcgaactattcgcccatgagtattctttggacttccaattagccacttactcgaaaccaattgtcgctttcatggatggtatcacgatgggtggtggtgttggtctgtctattcatacgcctttcaggatcgctactgagcataccaaatgggccatgccggagatggatattggctttttcccggacgtaggttcaacctttgctctccccagagtcatcacattggctaactcaaactcacaaatggctttgtatctatgtctcacaggggaagttatcactggtgtagatgcctatatgcttggtttagcatctcattacgtttgtagtgaaaatttagaagctttacaaagaagattgggtgaactcagtcctacactgaataacagttcacaatctgcagcattttttggaatggttaacgagtctattaatgaatttcaatctccactgccaaaagattatgccttcagatactctaaagaagaattgaacgttatcgagactactttcaacgtgcccaaaaatggtaccattgaagacatcatgaaaaaactgagccaatacgaaggttcgacagagggcaggcttttcgcacaagaaatcaaaacaaaattatcaaccaaatcgccatcttctttacaaattgctctaaggctgatccaagagaattctaaagatcacattgaatcagcaatcaaaagagatctgtatacggctgctaacatgtgcatgaatcaagattctttagtggaattttcagaagccacaaagcataaattgatcgataaacagaaagggccatatccatgggccaagaaagagcaattattcacatctcagttgacatctatcacgtctcctaagccatcattgccaatatcattaagaagaaatacctcgaatgtcacttggactcagtacccctatcatctgaagtatcaattaccaaccgaaaaagaaattgaagcgtttattgaaaagaaaacaggtgatgatacgggctctaaagttaccgaaaaagacgtactaaatcattttgctaatgtggattcctttagaagagggaaacagggcattcaattattatgcaaagctgtctgtgaaagaaagtgtgaagaggttaatgacggtctaagatggaaataa

SEQ ID NO: 440 - DNA, 609 bp, Saccharomyces pastorianus
atgcttagaaacacctccacatcgaaagcgtttatcagaacacagtccacgcgtccgtatccagttaatttgcaggctgtctactatgcacctttaaagctgcctatcaaatatggtgatctggtagcggacattcaattaagatcgtacgataacgaaaacatggatttttactcagattttatattgaggacgggctactatttgggtatcccgttaactggacccaaacccttgcccactagaagagagcgctggacggtaataaaatcgcccttcgttcatgctaaatccaaagagaattttgaaagacatactcacaagagactcatcagggcctgggacacgaacccagaggtgttacagttgttgatatcttacattacaaaacattctattgcaggcgttgggatgaaatgcaatttcttcgaaagatcagagatatcgcagagttttgattccgacaccaatgaaactcaatcactaagcaatgtcaataaattatattccctaggtaaagatgataaaactcaggatagcgctattggtgaaaaagtgcttgaactgttaaatagtcctgattttcagaaacatttggaaaagaagtga

SEQ ID NO: 441 - DNA, 699 bp, Saccharomyces pastorianus
atgttttatccatataattacagtaacgtgaacgtttctgcgatacccgtactaccaggaatttcggcgtttgatagaagttcagatcaagaagaaatcgttgagttgaatccggaaagaaaataccagacactgctgccagttttaactaattcgcatgtggtggagaatgagcttaaacataaactaaataagactgcctttgattttcgatatcacaatagatcagaagatagttctgaaaatgtggaacccaaatacttgacaacacccaatttgcagatgagaagcgtttctttcgatagttcatcactacaatacaattcagattcttcggaaaaaagcccgctatcccaactgaatgccaattcgtcaataatacggcaaaccgatagtgggacggtttctaatgacgattatgataacatgggaaacatacggtattctctaaaaacgcggaagcagagaaccgatcccaaaaacacattatccgatgaagaggaccttgagcaacggcgcaagtatatttgcaaaatttgtgcaagagggtttactacgtcaggccaccttgcaaggcataacagaatccatacaggtgaaaaaaatcattgttgtccgtataagggctgtactcaacgatttagtagacatgataattgcttacagcattatagaacgcatttgaaaaagggagaataa

SEQ ID NO: 442 - DNA, 987 bp, Saccharomyces pastorianus
atgcccgctcctcaagatccaaataatctcccaattagacaacaaatggaagctcttatccgtcgtaaacaagcggaaatcacacagggtttagaatccatcgacacagttaagttccatgctgatacatggactcgtggtaatgatggtggtggtggtacttccatggttattcaaaacggtactaccttcgaaaagggtggtgtcaatgtctccgtcgtttacggtcaattgtctccagctgctgtctctgccatgaaggcggatcacaagaacttgagcctgccagaagatccaaagaccggtttgccagttactgacggtgtcaagttctttgcttgtggtttgagtatggttattcaccctgttaacccacacgctccaaccactcatttgaactaccgttactttgaaacctggaaccaagacggaaccccacaaacttggtggttcggtggtggtgccgatttgacaccttcttacttatacgaggaagacggtgaactattccaccaattgcacaaagatgccttggataagcatgacactgctctataccctcgtttcaagaaatggtgtgacgaatacttctacatcacacatcgtaaggaaactcgtggtattggtgggatcttctttgacgattatgatgaacgtgatccacaagaaattttgaagatggttgaagactgtttcgatgctttcctaccatcttacttgacaattgtcaagagaagaaaggacatgccttatacaaaggaagaacagcaatggcaagccattagacgtggtagatacgtcgaattcaacttgatctacgatagaggtactcaattcggtttgagaaccccaggttctagagtcgaatccattttgatgagtttaccagagcatgcctcctggttatacgacaaccacccagcccctggttccagagaagctaaattattagaagtcactactacaccaagagaatgggttaaataa

SEQ ID NO: 443 - DNA, 333 bp, Saccharomyces pastorianus
atgctttcgttttgtccttcatgcaataatttgctgctaattacgagtggcgatagcggtgtatatacgttagcgtgccgttcgtgtccctatgagttccctatagagggtatagagatatatgatagaaagaagctaccaagaaaggaagttgacgatgtccttggcggtggttgggacaatgttgatcaaactaaaacccaatgtcccaattatgatacgtgtggtggtgagagtgcttatttcttccagctacaaattaggtctgctgatgaaccgatgactaccttttacaagtgcgtgaactgtggcaatagatggaaagaaaattaa

SEQ ID NO: 444 - DNA, 1815 bp, Saccharomyces pastorianus
atgtcagatccaatcgtaacgtcttccaagatggagaagactgccgagttcgaagtaacggattcggccttacgtgataactttaatgcatcaacaacagcatcattttccccagaggtaaaagagcattccgaggaatctagaagtgggttagtccataggtttgtcgattcattcagaagggctgagagccaacgcctagaagatgataatgatttggaggatggtaccaggtctatgaaatccaataaccatctgaaaaaatcgatgaaatctagacatgtcgtcatgatgtctctaggaacaggtataggcacaggtctgctggtcgccaacgccaaaggtctgaaacttgccggcccgggatctttagtcattggttatgtcttggtctccttcgtcacatatttcatggtccaggcagctggtgaaatgggtgttacctatcccacgcttccgggcaatttcaatgcgtataactcaatcttcgtttctaaatcgtttgggttcgctaccacctggttattttgcatccagtggctgaccgtgctgccgttggagttgattacttcttcgatgaccatcaagtattggaacgacaccattaatgctgatgtgtttatcgtcatcttttatgtgtttttattgttcatccatttctttggtgttaaggcttacggtgaaactgaattcatctttaattcttgcaaaattttaatgattgccgggtttatcatcctatcagtcgttatcaattgtgggggtgctggtgtggacggctacattggtggaaagtattggcgtgatcctggttcatttgcggatggtagcagtgctactcgcttcaaagggatttgctttattcttgtgactgcgtatttctcctttggtggtattgaattgtttgttctttccatcaacgaacaggccaatccaagaaaatccacgcccgtggctgccaagagaagtatttaccgtattctgatcatttatttattgacaatgattttgattggcttcaatgttcctcacgataatgaccaattgatgggttccggtagttctgctacccacgcatctccttatgtgttagcagcctcgatccatggtgtcaaagtggttccacatattatcaatgctgttattttgatatctgttctctccgttgcgaactctgctctctacgctgcaccaaggttgatgtgttctttggctcaacagggctatgcaccaaaatttttaaactatatcgatagagaaggcagacctttacgtgccctaatagcgtgctcttttgtaggtctaattggtttcgttgcttgctctccacaagaagaacaagcttttacatggttggcggccatcgcagggttgagtgaaatttttacatggtcgggcattatgctttcccatattcgtttcagactagccatgaaagcgcagggaagatcacttgatgaaattggctataggtccaatactggcatatggggttctatttatggggttcttttcaacatccttgtcttcatggcacagttctgggtagcactgtcgccaccaggttctggcgggaagtgcgatgttgaatctttcttccaaagttatcttgctgcccctctatggatctttttgtatttgggttacatggtctacacaagagatttcacctttttgaatccgttggataaaattgatttagactttcacagaagagtttacgatcctgaaataatgagacaagaggatgaagaaaacaaagaaaggctgagaaattcttcactatttttcagaatgtacaatatgtggtgttaa

SEQ ID NO: 445 - DNA, 1092 bp, Saccharomyces pastorianus
atgagccactttcccgccccaaagaacgatttgatattaagggctgccaagggtgaaaaagtcgaaagaccaccatgctggatcatgcgccaagctggtcgttatttgccagaatatcatgaagtgaaagacaaccgtgatttcttccagacttgcagggatgcggaaatcgcttccgagattactatccagccggtgagacgctacaggggccttattgatgcagccattattttcagtgatatcttggttattcctcaagctatgggcatgaaggttgaaatgctcgaaggtaaaggtccacattttccagaacctttgaggactccagaagacctccaaaccgttttagattataaggtcgatgttttgaaagagctagattgggctttcaaggcaatcactatgacaagaatgaagctggacggtgaggttccgttatttggtttttgtggagggccgtggactttattggtctacatgactgaaggtggcgggtctcgtcttttcagatttgccaaacaatggattaacatgtatccagagctttctcataaactattacaaaagattactgatgtagctgttgagtttttgagtcaacaagtggtggcaggcgcccagatattgcaagtatttgagagttggggtggcgaactatcatctttggattttgatgagttttccctacaatacttgagacaaattgccgaaaaggttccaaaaagactacaagaattgggcatcaagaaaaaaatccctatgatagtctttgccaaaagttcctggtacgccctagacaagctgtgcggttctggatacgatgttgtttcattggactggacctgggacccaagggaagctgtcaagattaacaaggaccacggtgttaccttgcaaggcaatttggatcctggtgttatgtatggctctaaagaaacaataacaagaaaagttgagcaaatgattgagggtttcggcggtggaaaatcgcactacatcgttaatttcggtcatgggacccatccttttatggatccagacgtcattaagtttttcttggaagaatgccacagagttggttctcagtag

SEQ ID NO: 446 - DNA, 1005 bp, Saccharomyces pastorianus
atgtgtgacaaagatgttcatgtcagtgaagatgttgctggcgacgaaggtccttttagaaatgctagacctagattaattgtgcttgtaaggcacggcgaaagtgagtcaaataaaaacaaagaggtaaacggttacatccctaatcacttgatccctttaactaaaacaggccaaattcaagctaggcaagccggtattgacttactccgtgttttaaacgtagatgaccataatttagtggaaaatctggctgaaaaatacattggggatgaaagtagcaggagaactttacctttaaaggactataccagaataagcaaagaaaaggacgtgaacgtgcttttctacacatcaccttacagaaggggcaaggaaactttgaaaggtattttggacgtcattgatgaatattatgaattgaatagtggtgtgcatatctgtgaagatttgaggtatgacccctgcggtaaacagaagcatgccttttggcccagaggaatcaataacagtggaggggtttacgaaaataatgaagacattatctgtaaaggaaagcccggtaaatgttacctgcaatatcgggttaaagatgaaccaagaataagggaacaagattttggtaacttccaaaaaatcaatagcatgcaagatgtcatgaaaaagagatccacgtatggacatttctttttcaggttcccccatggagaaagcgcagcagacgtatatgacagagtagccagttttcaagagactttattcagacacttccacgaccgacaagagagaagacccagggatgtcgttgttcttgttacacatggcatctactccagagtttttctcatgaaatggttcagatggacgtatgaggaatttgaatcattcactaatgttcctaatgggagcgtaatggtaatggagttggacgaatcaataaacagatacgtcttgaggaccgtattacctaaatggacagattgtgagggagacctcataacatga

SEQ ID NO: 447 - DNA, 894 bp, Saccharomyces pastorianus
atgagcagtcgcaaaagcaccgcttccagcttgttgttacgacaatacagagaactgacagaccccaaaaaggccattccttcttttcatatagagctggaagacgattctaacatctttatttggaacataggtgtcatggtactaaatgaggactctatttatcatggcgggtttttcaaggcccaaatgaggtttccagaagattttcccttctctccaccgcagtttcgtttcaccccagccatctaccatccaaacgtctacagggatggtaggctttgtatttctattctccaccaaagcggggatcctatgactgaagagccagatgctgaaacgtggtcccccgtgcagaccgtggaaagtgtcttgatctctatagtgtctttattagaagaccctaacatcaactcgcctgccaacgtggacgctgctgttgactataggaagaaccccgaacagtacaaacaaagagtgaaaatggaggtggagagatcgaaacaagatatccctaagggtttcgtaatgcccacttccgaatcagcttacatatcccaaagtaaactagatgagccagaatcaaataaggatatggcagataatttctggtacgacagcgatttggatgacgacgaaaacgggtctgccattctacaagatgacgattatggtggtgatgacggaaatagtcatgtcccgttcgatgatgacgacgtttataattacaatgacgacgatgatgacgatgaaagaatcgagttcgaagacgatgacgacgatgatgatgacagtatagataacgacagcgtcatggataggaaacagcctcacaaggccgaggatgaaagcgaagacgtagaagatgtagaaagagtttcaaagaaaatataa

SEQ ID NO: 448 - DNA, 1317 bp, Saccharomyces pastorianus
atgaaactacagtcgttgatcgcttcgtccgccctcttaataacgtccgccctcgctgcttcggcatcctcctcttcttcccaaccaccctcttcctgttctataagctcgcatgctacagctacagcgcagagcgatttggacaagtatagcggttgcgaaacactggtgggaaacctcacaattggcggtggcttgaagacaggtgctttggccaacgtcaagaaaataaagggttcgctcactatattcaacgctacaaaactaacttcattcgctgcggattctttacagtccatcacggattctttgaacctgcaaagtctgaccattttgacttctgcttccttcgggtctctggaaagcgtcgacagtataagtctgattactctccccgcaatttctagtttcacctccaacatcaaatctgctaacaatatttacatttctgacacgtcgctgcaatctgtcgatgggttttctgttttgaaaaaagtcaacgtcttcaacgtaaataacaataagctgctgacctcgatcaagtctcctgtcgaagctgtgacggacgctctgcaattctcgttcaacggtaaccaaacaaagatcatcttcgatgacctggtttgggcaaacaatatcagtttgaccgacgtgcactctgcttcttttgctagtttgaaaaagattaactcttcattgggtttcatcaataattccatctctagtttaaatttcactaaactaaacacagtgggccagaccttcagcatcgtctccaatagtgagttgaaaaacttatccttctctaacttgacaactatcggtggtgctcttgtcattgccaataacacacacttacaaaaaattgatggtttcaacaatctaaccaccattggtggtactctggaagtcattggcaatttcacagttttggatttgaactctttgaaatctgtcaagggtggtgccgatgttgaatccaaatcaagcaacttctcctgtaacgctttgaaagccttgcagaagaagggcgaaatcaaaggtgactcgtttgtttgcaagaacggtgccacttctacctctgtcaaactatcatccacctccaaacagcaatcgagccaaacaacttccaagacctcttccaaatctgaggaaagaaagttcacctctggcgatgtcaaggctgctgtttctgcatccagcgctgccagttcaagctcaaagagctctaagggcaacgctgccattgtggccccaatctcccaagttactacattgattgggcttttgaccgctaccatcatgtccctgatataa

SEQ ID NO: 449 - DNA, 1704 bp, Saccharomyces pastorianus
atgcagactaaaaccatacattccttgagcataattccggctctgatacaactggtgtcatcattgctagcacccatcgcggatccaatagtatcgaacaaatacctcatatcgtatgtcaatgagaaccagtggaacgatagaatattacagaatcagtctgccatggactcggggtctattgtaaatatggggggtaattttgagtgttttatacaggatgcgagttcccagttcaaggatgtattggaaaaatcaagtgaatatggaaatgcagaaaagaaagcgttgttaaccgacactttaaatcaaggcgtgaagaccatttttgacaaattaaatggacaatgcattttctaccaagccggtttttggatttatgagtattgtccaggcaaagagtttgttcagtttcatgcccaaataaatacgcaaactggcgaattcgtgaatcgagacgagtccttagtgttcggattgggcaaatcgaaggaaagtttagacgagagagaattcgagttactttatgacgatgtaggatattacattagtgagatcataggctcgggtgatagatgcgataagaccggagctgaaagaatggttgaaatccaatacgtctgtggtggttcaaactctggaccagcaaccatccaatgggtaagagaaacaaaaatctgtgtttatgaagctcaagtcgccattcctgaattgtgcaatttggaattactggctaaaaatgaagatcaaaaaaacgcttctccaatactttgcaaaacgtctcgcactaatggtggtaactctgttgatcttattactcaaaatgaaccgattttcctgggaaatggaatatattttttaaggccttataatactcatgaaagagtcaagttaatggtcactgacaaagtgatgtcaaactgggatatgattacagacatatattaccaaaaattcgggaatgctatcaacaaaatgcttggtttggaattggtgtcgttgcctaacggacatattctccagcctggtgattcatgtatttggttggcagaaatagttgacattgaaggccagtttcaaaccattttatcgttgagcatatttaattcacagagagcagagatgtccttcaacaagacccttacatttgatggggttaatggaaactttatatcttacaaaatcagggacccagatgagccagttgagtccggccaattagacaattcggatgaagagaatagagtcatagaaaacacccagctagaggaacgattaattggctccagtaatgagctattcacaaaactttctaaagaaataactgaagtgaaagagttactgaaccaaattgtcggaccacaagaaatggaattaatactcgaaaatatgaggaatattcaaccgaatagtgatttcgaactcgcgttaatgaacgggttgaaatcgtcgctagttatcggcaacgacattgatgaagcaaaacaggtcaaaattggcgaagatggaagcataaagggcaccaaggataatacagaatcatctacccaaatggaagaacttaacgacgtcggtcaaaagaaagaaagcatggcgaatggtaaaacttcaattgaccgtgaggtatcggaagaaattgatttaccaggaaaagatgtgagaaatgaagcagctgatatccttgttgagcatgatgagctttag

SEQ ID NO: 450 - DNA, 981 bp, Saccharomyces pastorianus
atgttggataacgataaagcccaagatgtaacaatagattctctaatactttctgattcatatacacccccaaaaaatccgattgtattctgccatggcttatcaggatttgatagattaattctgattccttcagtgtttcaattgacaactctaatctccaattcaatagcgcacaatatgacagaaaatttcatgaaagatggggaagatgaaagcgatacgaaatatccaaatttagtagagattgaatactggattggtgtgaaaaaatttcttcaatccaaagggtgcactgtgatcaccacgaaagtgccagggtttggtagtattgaagaaagagcaacggccttggacgctcagttacgaaaagaagtacagaagatcgattcgaaggataagcgacattcgttgaatttaatcgcacattcaatggggggattggattgccgatatttaatatccaatatcaaaaacagaggttacgatattctgagtttgaccactatttccactcctcacagggggtcggagatggcggattacgtggtcgaccttttcgaaaacttaaactccttacgtgtgcctcagaagatactgcccataagtttctaccagctgaccacaacctatatgaaatattttaatttggttacaccgaatagtccaaaagtctcttatttttcgtatggttgctcttttgtacctaaatggtacaatgttttttgcacaccctggaaaattgtttatcagaggtcgaaaggacgacccaatgatggtttggtaactatagatagtagtagatggggagagtatagaggaaccttaaaaggtatggatcatttggacgtgattaactggaaaaataaattgcaagatgattggagtaaatatttccatactaatactattgaggaaaaaatcgatatcttgaacttttatttaaagatcactgacgatctggcaaagaaaggcttttga

SEQ ID NO: 451 - DNA, 1686 bp, Saccharomyces pastorianus
atgagcacccctgcaaactatacacgtgttcctttgtgtgagccagagaacctgccagcagatatacaaagagaaaacgaatatggtacactagactctacggaccatttatatcaggtcatacaacgtgatggtaaaccattaacagaaccgattattgacactccaccctattatgcttctctgctgacgtatctaaattatttgcttttgatcatactgggccacattcatgatttcttaggtatgactttccaaaagagcagacatttagatcttttagaacgtgacgggcttgctccttggtattcaaacttcgagagtttttacgtcagaagaattaaaatgagaatcgacgattgtttctctagaccaactactggtgttccagggagattcattcgttgtattgatagaatctctcatgatataaacgagtattttacatactcaggcgcagtataccaatgtatgaacttatcttcctataattatttaggttttgcccagagcaagggtcaatgtactgatgctgctttggaatgcgtcgataaatactccattcaatctggtggtccaaggactcaagttggtactacagacttgcacattaaggctgaaaagttagtcgcaaaatttgttggtaaagaagatgctatgatattttcgatgggttatggtacaaacgcaaatttgtttaatgcatttctagataaaaagtgtttagtcatctccgatgagctaaaccacacatctattagaactggtgttagattatcgggtagtgctgtgagaactttcaagcatggtgatatggtgggattagagaaacttatcagagaacaaatagtacttggtcaaccaaagaccaatcgtccatggaagaaaatcttaatttgtgtcgaagggttgttctctatggaaggtacgttatgtaatctgcccaagttagtagaactgaaaaagaaatacaaatgttacctatttgtcgatgaagcgcattcaataggtgccatgggtccaacaggtcgtggtgtctgtgagattttcggtattgaccccaaggatgttgatattttaatgggtactttcaccaaatcatttggtgctgctggtggttatattgctgctgataagtttatcatcaatagattaagactggatttatctactacaagttatagtgaatcgatgccagctcctgttctagctcaaactatttcttcattgcaaaccattagtggtgaactgtgtccaggccaaggcgcagagagattgcagcgtattgccttcaactcccgttacctgcgtttagctttgcaaagattaggattcattgtgtatggtgtggccgactcaccagtcattccacttttgttatattgtccctcaaaaatgcctgcattttcgagaatgatgttacagagaaggattgctgttgtcgttgttgcataccctgctactccgttaattgaatcaagagttagattctgtatgtcagcgtctttgactaaagaagatatcgactatttattgcgtcatgttgatgaggtcggtgaaaaattgaatctgaagtcaaattcaggtaaatcaagttatgacggcaagcgtcaaagatgggacattgaagaagtcataagaagaacacctcacgactgtaaggacgataaatactttgttaattaa

SEQ ID NO: 452 - DNA, 450 bp, Saccharomyces pastorianus
atgtcaaatctttataatattggatccgaaaccaaaaataagatcaaaaagtttcgcataactacagcaagagccgattctattaaggccctgtcaatcaaaattgagccaaagccctcctatgagataattattgatgaagatgaacaagaggaactggaagaattagaagatcttagcgaattagcagaaatcctgcccgacaactcacctaggtttcttcttaccgcatacccgatcacaacgaaagacgggattaaacaaacccctttaattttgatctattggaagccaatgacggtcgtttcacaagaatggaagatgctttacgcgggtgcattagaaatggtcagaaacgagtgtggtactttcaaattagttgaagtttcttctggcctagaagacgattcggacttggatgaattgagagagcagttagagagttgttga

SEQ ID NO: 453 - DNA, 1104 bp, Saccharomyces pastorianus
atggctcataattttgggagaataccttcacaccaatgttatgtgctgaatctctatcgcactattctcagaaacattccaaagaattgtcactcttatgcatttcaaaaagaaatcaagagtaacctttcgaggcaactaaccaaacataagcatgacaaatctagttggagtgtgtatattctcctcaataaattcaaccaattgaacaactaccttttggaaggcaaattgcaggaaatcaaacacttgattcaaccactgaaaaaggtatcgaaacaactgaagacgacaaggattcttaaaactttgaatgatctaggtaatggaaattcactacaaagtccagaggagataagagaacttcatgtgttaagcacttatatcaagcaaaagcaaaacctaggccttttacccaactgcattcctaaagaatataagcttaagcttctattaccgttagcattaaacgagagtgcttgtgtgaagttgtacaacattcaccaaaaattagaaaaaggttctccctctgctaggctatcatataccaaagaaggaagaaatcaaatatggtttgttcgatcaccaattaataagggcaagagacaatcaaaaatgctgggaatcttgatacggcaagaaagaaaagattctcaaaagaatattgacgatctcaacttttgtgaatcaaatgcttcttgggcactccatgaggctatttgggaagagtatttagagtctaagaggataattgaaataaacttggcaaaatatttagagtacaatatagataacccaaagaaacccgctaggtacaacccagccagtcaaaataaaaaaattaacgaatgggtggaccctgtgagagaggtgatctttaacttgcaggccaaaagcattcaaaaggttgagtactataacgattataaggaaaaactgttgagtaaagatggtcaattagcatattttgataagttatcgaaagctatgtacgctaaaaggttagaatcttttgaaaagatggcagaggaagccttaccatatgtcacaccattcataccaaagaaggatttattaaatgccctgacaaaatacggtttctaa

SEQ ID NO: 454 - DNA, 675 bp, Saccharomyces pastorianus
atgtcgttggtaaccccgttacaattttctacagttcagccaaacttgtatagaggatcatatccacgagaaatcaatttctcattcttaagaacccttcgattaaaatacgtgctgtcattgacaccggaacctctggataatgatccccaaatgcttaagttttgtgaagagaacaacattaagacaattcatattgaatgtcaaagcgaaaggaagacagacaagactaaacccaaaatcaaaaggaaaaagaaaactgtccccattgaatatgacgtggtggtacgatgtgttaagtttttaattgacaaaagacattatccctgttatatgcactgtacaaacggtgaactaataatatcccttgttgttgcctgtatgaggaagttttcatattggagtacggtatccatattaaatgaatttttggtatacaattccagtattaatattcatgaaaggaatttcgttgaaaatttcaagtctgaaattgaagttgataatttggatataaaggataaagttccctggatcacagtgcgatatattgcacgagcacccgtagaatcaaaagatgatgcacaaaccgaagacgccaacacatctgaaaaggttgcgagagtgagcagtgtgcccaatatgctgccaaaattgaaatttcatagtatgtag

SEQ ID NO: 455 - DNA, 930 bp, Saccharomyces pastorianus
atggactttttttatgaagagcaagtagctaacattgagggtggtaggctgagtaatcaaaaggaatcttccaccgaggaatctgttgatgcaacagaacgtaattcgaatagtggggttcagggccgagatgtaaaaacaaatgaagcgttccaaaagctagaagaggaagtcaacaagcaatatgaaaagaccacaagtgcatttaagaagttggtcgttgaaaaggatgacggtattgaaattaacataccaattagcgatgaaactacagaggctgcacagaaatacttaaaaaagctagatgataacatacacaacgtggagaatctcgctcagtcatattggagcaaaatgaagactaccagtttttggtccggttttggtagcatcaacgatacaacagatgacgcttccgctgacaattttgagggtctggaagagaaaggaattgctgttggcggaaatagaacagaagctgaactaaggacattatcaaaagacaggtcggtttatttaaataacaaaatggatttagagaaggaaccgtttgacgtagatgaaaaaactgatgaaatatgtttgattttacagggtgataaggatattgctagattaatgaatgacatcgtaccccacaaaatcagctataagaatttctggaacatatacttctcagaaaaaaatagaattttagacaaggaaagcaaaaggaaagaaatattacttaagaaggaaaaggaggccgaggtagcctgggatgatgaagatgaagaaatagaagcgggggccagtttaaaaaacgaagatgaggcaaaagtcgaagaaccaaagaaggaagtagaagaggagaagaaagatggcggcaacggcgaggatgatgatggtgatgatgatgacgatgaagacgacgacgatgactgggaatga

SEQ ID NO: 456 - DNA, 2784 bp, Saccharomyces pastorianus
atggaacagaatatcattagtactataaatgatgaaaacattcaaaaccggtcaaagtacctcacgatagcacaactaaccgctatcgcagaaactaaaataaatgaattcatcataaatggcaaaacaaaagatcgagatttaagcagcctcttagataaatgcatcgatattctatctatctacaagaagaactccaaagatatcaaagttattatatcttgtcgaaataagggtgcaatgactaattcgaactatgatatcaaaatacagctaaattatatctactacaagatcattcatatcatagtgactgccaagattcctcatctaaatgaatttgcgaaaatcaaatcacataaaagttcgaagaatgacggcgatagcaatagtagcaataatgaatttcaattaatgaacatatacaacactttactggagactttactaaaggatgaaaatatcacaaagattaaaaattttatcaagtcatctatacaacaaatgaaattgcaccacgaacaagaggaatgtcacctgatgcaaactggttctcacatcacacccgatcagctaaattcactaatagttttatcaactagctcctcctcatctcaaatggaaacgctgttaatagatatacgatcaagattagagttcaaaaaatcccacatcgatttcaaaaatatcatttgcctggagcccgtttcatttaaaatgtcgtactcagatcgcgatttggaaaagaaatcattgattacatctcccaacgatgaaattaaactctttcaaagcagaaaccttttcaaatttatcattctttatacagactcgaacgactataacgtcaggcaacaagccgtattattagatattttattgaatcgttcttttgagaaaccaatatctaatgactttaccaaaatttttattttacaatctgggttcccaggttggctaagctcaaatcatgtaaatcaaacatcttcgtcttgtccacagagtaacaacataaaggatgatagtgtgtatgtgaacggtaatacttctggtctgagtttacagcatctgcccaagatgtctccaagtataagtcattcaatggacgattctatgaaagaaatgctgatttcaccgattccaattaaccacctacaacaacagcaacaacaacaatccgacaatagttataaattacaaagatcttcaagttttaaaaaactgttttcaaactatacgtctactagccccaagaacatgaattcaaatttatattctatatcctcattatccatctccaactcgccatctcctttacctctgtcttcgcctaattcgatgaaaaacgattcattaccatttaattatccagagactccacatctctggaaaaacaatgaagcagattccatgacaaatcaaagggaacagttgaatcacaattccttcactcatattacacctattaatacaagagcaatcactactccatcaagaaccaccacaccaaagttgcagcggttcccgcaagcaattagcatgaacttgaatttgaattccaatagcaacaactcttccacgtctactatacaaccagcatgtctcactttatccaacagtagctctttagaccatattgatgtatcccaaacttcgccctctcataactatgacctcgatttcgctgtcggattagaaaatctaggaaattcatgttacatgaactgtatcattcagtgtatattaggtactcacgaactaacgcaaatatttttggatgattcatatgccaagcacattaatattaatagtaaattgggttcaaagggtatattagcgaaatatttcgcaaggttggtgcatttgatgtataagaaacaggttgatagctcaaagaaggactctatatcaccaatcaaattcaaattggcgtgtggatcggttaattcattattcaaaactgcatctcagcaagattgtcaagaattctgccaatttcttctagatgggttacatgaagatttaaatcaatgtggctcgaatccacctttgaaagaactttctcaagaagctgagacaagaagagaaagattatctttgaggattgcctcctcgatagaatgggaaaggtttctgactactgatttcagtgttattgtcgacttatttcaggggcaatacgcatcacggctaaaatgcaagacatgtaatcatacttcgacaacgtatcaacctttcacagtattatcgattcctatcccaagaaagaactctcagaataaaatcaccattgaagattgttttaaagagtttaccaaatgcgaaaacttggaaatagacgagcaatggttgtgtcctcattgtaagagcagacagccatccacaaaacagttaacgataacgaggttaccacgaaacttgataattcatttgaagaggtttgataacttcttgaacaaaaataacgattttgtcaaatatccgttcttgttggacttaactccattttgggctaacgattttgatggcgtctttccaccaggtgtaaatgatgatgaattacccataagggggcaaataccgccttttaagtatgaattgtatggcgtagcgtgtcatttcggtactttatatgggggtcattatacctcctatgtgaaaaagggattgagcagaggatggctatattttgacgataccaagtacagacccgctaaaaataaaacagacgctattaattctaacgcatacgtcttattttatcatcgtgtatacggtgtttga

SEQ ID NO: 457 - DNA, 282 bp, Saccharomyces pastorianus
atgttaagagcaactatttcacgcactccaagacaatggatctgtaagtcaccaaaggcggccctttccaccaccgctaagggtttctacccgcacttgaagcacgatcaagacgcggcggaacagaaggaacaaaatttgtttaacgataacaagaagaaactggataacttggaacatgggaagaatcctgatttcaaacagcctggaatggaagatttgaagaagaaaggtgatgatgccagaattgaacaaaacagaccggatgatggcgtttattga

SEQ ID NO: 458 - DNA, 576 bp, Saccharomyces pastorianus
atggcctcctcaactagcactctaccgcttcatatgtacattagacctttaattatcgaagatttggaacagatcttaaatctagaaggtcaaggtttcccgccaaacgaaagagcttcggaggaaatcatcagcttccgtctgatcaattgtccagaattatgttccggtttgttcatcagagacatcgagggcaaagaagtcaaaaaggagaccttaattggacatattatgagtaccaagatacccgatgagtacatcaccattgaaagcatgggcaaactacaagtggaatccagcaacaatatcggtatccactccgtggttatcaaaccagaattccaaaagaaaaacctagctactttactattaaccgactacattcagaaattgagtaaccaagaaatcggtaataaaatcgttttgatcgctcacgagccattggtaccattttacgagagagttggtttcaaaatcattgctgagaacaccaacgttagtaaggataaaagtttcggcgagcacaaatggatcgacatggaaagagaactaatcaaagaagaatacgacaattaa

SEQ ID NO: 459 - DNA, 462 bp, Saccharomyces pastorianus
atgaacagcgaaattgcaagcccaaacctaaataccaccaccgccactaccactgtaaacgggaaccctcatgccggcatcggcgtggatgcggatttgaatgcagatttaaacctccctacggtggacgaacaaagacaatacaaagtacaactgctactgcacatcaatagcatactgcttgccagagttatccagatgaacaacagcttgcaaaacagtctacggaacaatataaataacagtaacaacgaaaacatcattagaatacagcaacttatatcccagttcctcaaaagggtccatgccaatctacaatgcatatcccagataaatcaaggcatcccttcggctaaaccgttgattctctctccccctcaactggccaggcagcaacagcctccgcaggacatcctcgccaaactctatcttctattgactagagtgttcgaaatatggtaa

SEQ ID NO: 460 - DNA, 2691 bp, Saccharomyces pastorianus
atgactaccaccgcccaagacaattcccctaaaaggaaacagcgtatcattaactgtgtgacccaactgccctacaagatccagcttggcgaaagcaacgatgattggaaaatatcagccaccacaggcaacagcgcgctatactcctctttggaatacctgcagtttgactctaccgagtacgaacagcatgtcgttggttggactggtgaaatcacaagaactgaacgcagcctgtttaccaaggaggctaaggagaagcctcacgacctggacgatgaccccttgtacctgacaaaggagcagatcaatgggctaaccaccactctccaggatcatatgaagtccgaaaaagaggcaaagaccgacaatactcctaccacctccgctattaacaacgtccatcctgtttggctgcttagaaaaaaccaaagcaggtggagaaactacgccgagaaagtcatctggcccactttccactacatcctgaacccctccaatgaaggggaacaggaaaaaaactggtggtacgattacgtcaagttcaacgaagcttacgcccaaaaaatcggcgaagtttaccagaagggcgacatcatctggattcatgactactacctactactactgccccaactactgaggatgaagttcaatgacgagtccatcatcattggctatttccatcacgctccatggcctagtaacgagtacttccgctgtctgccccgtagaaagcaaatcttggacggtcttgtcggggcaaatagaatttgcttccaaaacgaatcgttttcccgtcatttcgtatcgagttgtaaaagattactagacgccactgccaagaaatccaagaactcctccgataacgaccagtaccaagtctctgtttacggaggtgacgtgttggtagactctttacccatcggtgtcaacaccactcaaatcctaaaggatgccttcactaaagatattgactctaaagttctttccatcaagcaggcctaccagaacaaaaaaattatcattggtagagaccgtttggactccgttcgtggtgtcgtgcagaaattgagggcttttgaaactttcttggctatgtaccctgaatggagagaccaagtcgtgctgatccaggtcagcagccccaccgctaccaggacttctccacaaaccatcaaactggaacagcaggtcaacgaactggttaactccatcaattctgaatacggtagtctgaacttctcccccgttcaacactattacatgagaatccccaaggatgtttacctgtctctactaagagttgccgatttatgcttaatcacaagtgttagagacggtatgaacaccactgctttggagtacgtcaccgttaaatcccacatgtctaatttcttatgctatggtaatcctctaattttaagtgaattttctggttcaagtaacgtgttgaaggacgcaatcgtggtcaacccatgggactcagtcgccgtggccaaatccatcaacatggccttcaagctagacaaagaggagaaaaccactttggaatcaaagttgtggaatgaagtccccactatccaggactggaccaataagtttttgacctcaataaaggaattggcttcctctgatgatgatgtcgaaaggaaaatgacacccgctctcaatagacctgttcttttggaaaactataaacaatccaaacgcagattgttccttttcgactatgacggtacgttaaccccaattgtcaaggatcccgctgcggccatcccctcagcaagactttatacaattttacaaaaattgtctgctgatcctcataaccaaatctggattatttcaggtcgtgaccaaaaattcttaaacaaatggctaggtggtaaattacctcaattaggtttaagtgccgaacatggttgcttcatgaaagatgtctcttgtgaagactgggtcaatttgaccgaaaaagtcgatatgtcctggcaagtgcgtgtcaatgaagtgatggaagaattcaccacaagaaccccaggttcattcatcgaaagaaagaaagttgctttgacttggcattataggcgtacagtcccagagttgggtgaattccacgccaaagaattgaaagagaaactgctaacatttactgatgatttcgatttggaagttatggatggtaaggctaatatcgaagttcgtccaaggttcgtcaacaagggtgaaatcgtcaagagattggtttggcaccaacatggccaaccacaagacatgctgaaggggattagtgaaaaattacctaaagacgaaatgcctgactttgtattatgtctaggtgatgactttaccgacgaagatatgttcaggcagttgaataccatcgaaacctgttggaaaggaaaatacccagatgagaaaaatcaatggggcaactatgggttttatccagtcactgttgggtccgcatccaagaaaactgtggctaaggctcatttaaccgatcctcaacaagttttggaaaccctaggtttacttgtcggcgatgtttcacttttccaaagcgcaggtactgtcgacttggattcaagaggtcatgtaaagaacagtgaaagtagtttgaagtctaaactcgcatccaaagcttacgtcatgaaaaggtctgcttcttacacaggtgcgaaggtttaa

SEQ ID NO: 461 - DNA, 1224 bp, Saccharomyces pastorianus
atgtcgtttggtataccactttcccagttaataatagaaagcccaaagccattaagtagtggtattacaggattggatgaaatactgagccttggattccaagcaagatcgatatatgaaatatttgggcctccaggaataggcaagactaatttcggaattcagttggttagcaggtcgctagaaaacatgaagccgttggaaaagaatgacgataagattctatggatagaggcctttcaagatatgcctatcaacatcttaagggagcgcttcccgaaattcgatattgtagaggagaatgttaaacgtgttcggataatgaagtttgggcaactgttatatttttttcaaaacttgtttaagctgtcacaaagcatgaagtacaaactaattataatcgacggtttttctcaattactatgcgaccatttgtgtacgctgagtaaaagaagtgggggggtgatagataaaactatacatgatttaaaatgccggcacttgatattaatttttacagcgatgaccaaatatactcattctactggctcaactataatactgctaaacgattgcatgaacacagcattccaatccaacgaattcggatccttggaagaagattacgaggtcctagaggacggttccaatttctatgtcaattcgaacagtgatagacgtaaaagtaacgtacacattctgaaaagtgctctagtggccaatattgctatgggaggcaaagattccacctgggaagtgtttttgagggacaggattggtttattcagagactggaatgagcaagcggacgaaacaatatttgtaaagagcaagagagtgaagacgccgtcttcccaagataacgaggcatgcaccatcaaagaaatgagaataaacaaacgaaacttcgaaaactttagaatagctattgttttcaatctgcatggggacgacagggagagagacagagacgggggaagaccaaaacggacgagaaatagcgaagatcgcaaccgtattgttaaattcgactttgatagagcaacaggcctattccgcgatataatcgaccaagaagtaaacactgccaatattggctcaatcccgacattatcagcaagcagcagcagctgttcccaactgtttgtcaacatggagtctgatgataaccaaatgccatatgtagaaggaaaggaggaagtaatttatgatagcgaaggctaa

SEQ ID NO: 462 - DNA, 672 bp, Saccharomyces pastorianus
atgtccaaggatgtaatagagtactcgaaactgtttgctaaactagttaacccgaatgacgatacgaaattagatgatacgatagcatccttcttatactatatgtttccaagggagcttttcattcgagcaatctcattgttggagtcttcagacatgtttatatatgtactagatagggaccgtacgggggaaaccggtaaatgtaaattgttgattgatttgttgatcgatgagttttatagggactcgtcggatgtgccgttagagtaccgcttaatcgtcaaggataatagcgatacagggccgccgatactagtagacatatcgcactggttttgctcatgtgaagagtactgtgagaatttccatgaagcacttgaagaaagtgacggaaatgaagaattatctgaagtgctgataaatgaaattgacgaccacttgcaattttcaaacgataaattcgctcagttggatccgcatagtttgtccaaacaatggtatttcaaatttggtaaggtttgctgttctcatctattggcgttttccataatacttaaatcttcgattaatgtgctgaaattttttactgttaattcaaacaaggttttcatgatatcgatagataatatagatgaatggttgaacttgcatatcaatatagttgaataa

SEQ ID NO: 463 - DNA, 333 bp, Saccharomyces pastorianus
atgggtctatttaatttcaagtttaaatatacaagggcgcaactggaaatattcagattttctttttgtctgctagcacccgttgctgtaatgtactatattggtacagatactgataaaaaattaaatgttccagggttctggccagatcctgctactctgaaccagataccaaaggaaccgtatgagatcaaagctgaactggcaagaatgaagaaagaacgtttggaaaaaagaatcagactggagaaaaaactgcaagaggaatttggtttggaccttgaacaggaaaaggaaaaaatcagacaagaattagcgctcaaaaaaggttga

SEQ ID NO: 464 - DNA, 219 bp, Saccharomyces pastorianus
atggctagagcaaggaagggcgcgctgatccagtgtgatccatctattaaggcacttatactacaaatcgacgcaaagatgagcgatatagtattggaggagttagatgacacccacctcctggtagatccaacgaaagtggaatttgttaagcatgagttaaacagacttttatctaagaatatatacaatcccatggatgaagaagaaaatcaatga

SEQ ID NO: 465 - DNA, 2757 bp, Saccharomyces pastorianus
atgctttccatacagcagagatacaatatctgtctaatggcagagagacacccaaaatggactcagctcgaattggcaaaatgggcttatgagacatttcaactaccaaaaattccatcccagggtactatatcgcggttgttagctagaaagtcaacgtacatgaattgcaaggaacacgaaaaggatgctaatagattaagaaaaccaaacaatcttttggttcgaaagattttacaagagtggatttctcaaagtctgtggaatgggattcctattacctccccaatcattcaagacactgctcaagcagtttggcacagaattcctgcggaacatcgagagggaaatggttcattcagttataagtggatttcgaattttctatcaaaaatggatgtcaatatatctgtcttggatgaggaattacccaagactcctaaagtatggacatttgaagaaagagagatattgaaagcctacttcgccaaaattccgccaaaagatttatttactttggatgaagcgttcctttcttacaatttaccattagattacgcgcaatacgaagcaagtagcattcaaagacgtatagaggttgcaaccgtaatgctgtgttctaatttagatggctctgagaaattaaaacctgtcgttgttggaaaatatgatagttataagtcattccgaaattattttcctaacgaaccgaaagagcctgtttcgcaatcaatgttaggtactaagatggccaaaaaatttgatatctcttatcacagtaacagaaaagcgtggctaaccagcaatctctttcataattggttagtcagatgggacaagagattggtggctgtgaatagaaagatttggattgtcttggatgattcatgctgtcataggataattaacttgcgtttgcaaaacataaaactggtatacacttcgtccaattcaaagttcttgccattcaactggggtgtttgggacgaattcaaaacgaggtatagaatccaacagtaccaggcgcttattgacctgcagaatagaatttccaaaaatactcaaaataaaaataaatctggacaaaacgaatgtttgccgaatggtaaaaaaagtctcataagctttgagcagagtcagttgacaatgtcgaatgcttttaagtttatcaagaaagcctgggacgatataccagtcgatgctattaaggccaactggaaaagctctgggctgttgcctcctcagatgattcatctaaatgaaaatgtcagtatggcatttaagaaaaacgaagtattagagagcgtgttgaatagcctctgtgatgaatattattgcgttaagaaatgggaatatgaaatgttattggatttgaacattgaaaacaaaaatacaaatttcctaagcactgaagaattagtggagagtgctattgtcgatctttgtgaacctgattttgattctgcatctaaagtaactgaagttcatgatgataattttgatttatccgtttttgccaatgaagacgataacaaccacagccagctaagtatgtctaatgccaaccacagcgacgagaaccatagcaacaacaatcataataataatagtaacaaccataataataacagtgacaattccaataataacaataacaatagcgcgaaatatttgcaacaaagtaccattgacaatactaataaaaatgaggatactggacagccgaatggttctaacatggattcacaaagaaatccttcaaccacagacttggtggttgacggcagctatgacgtcaatttcaatggtcttttaaacgatccttataatgctatgaggcaaccaggcccactagattacaatgttagtacactgattgataagccgaacttgtttttaagtcccgacttggatttatctacggtcggcgtggatatgcaactaccatcatcagagtactttagtgaagttttttcttcaaccattcgaaataacgacaaaaacatcacacaccagagtaaatcagtcaatgaagctgcttcaagcacagcaatgccgccttcaaactcaatagcaacggcgcttttggaatcaagaaaccatgcgcagccctttgatgttccacatatgactgagttgctgagcgatacatcgaagggtggacctcctgtggcctccccaaacgttgtgtctcaaaattcattaaacagctttcaacgtcatccatcatccgttgcagacgtttcctctccttcgattacaccttcccctgtgactataaactccacaggagcaccaacaagatctatgacgacagtaccgataggatcagcagcatcctctgcttcatcgccatctggcttaggtcatcttgaaagtgccatttctggcatgtcaccctcttcaaccaccatattaagtaacttacagacaaacataaacattgccaaatcactgagtaccattatgaaacacgcagaatcaaacgaaatatcattaacgaaagcgacaataaatgaactgaatttcaattatatgacgcttttaaaacgaattaaaaaaacaaagaaacaattaaatactaagaacattaaaataaacagtaacaaaaatgcgcaagaccatttagagacccttttatcaggggcagctgcagcagctgcaacatcagctaataatttggaacttccgtcaggcggttcaacccttccagactctagtaacttacatttacctgacgatacaggtttcttttag

SEQ ID NO: 466 - DNA, 600 bp, Saccharomyces pastorianus
atggaccaagcaaagaacttctataacacgattttaaagtcgtcgcacccgttgctactatcattccacttggcaggtaaggccgtacctatagtcttttatatcataggttcaatgtttctgaattttacacctcaattcatcaccgtcgtgcttttactttcgtttgatttttacttgaccaaaaacattaccggcaggaaactggttcaactacgttggtggtatgattctacagacgtaaacaaaaattctagcttcacttttgaatcatataagcagtatgcgcctggcccaccgataaatgccatcgattctaaattattctggtggtcaatgtatttgacacctataatttggggtatctttgccattttgtgtcttctaagattaaggattttttacttagttttagtcatcgtggcagtgtgtttgaccgcttggaacacatatgggttccgttgttgcgataaatgggaacctgctaatggacagtccggcgatgaggacgcaaattcctggttccctatgccttctcttccaggattcgaaaatctttcaaggctggccaatatccagtcatttttccaaagacaataa

SEQ ID NO: 467 - DNA, 243 bp, Saccharomyces pastorianus
atggctagagtcagcgaaaagggtgaagaaaagaaatcaagcaacaaccaagttgaaaaattggtcgaggcaccagtggagtttgtcagagaaggaactcaattcctagctaagtgtaagaagcctgatttgagggaatactccaagatcgtcaaagccgtcggtatcggttttgttgccgtcggtatcattggctatgctatcaagttgattcatattcctattagatacgttattgtttaa

SEQ ID NO: 468 - DNA, 1143 bp, Saccharomyces pastorianus
atgaataataataataggaataataaaaacagaaacaataatatccgaaacagaaggcaacaacagcaagcgaataacaaaaatgaaaatatacatataccaaggtatattagaaaccaaccatggtattacaaggataatccaaaagagcaggaggaggaagatgctactaaggatagtatagaccctccagaaaaaggaaaaaaaggcgattacttattgcatcatagacaaagagcaaaggggggagctttagacatagataacaattcagaaccgaaaattggtttgggtataaatgatgaatttgaggtgataaaattgcggaaaacacacattagggatacaaacttgtcaaagtactgtaaaaactgcggcgaaacaggacatacggggaaggattgcatggaaaagcccagaaaggcgcagaagacaactccagattctcgttcaaacattagcaaggatactgttctaatacgaggcaccaatgatgactgggactccaggaaggataggtggtacggttactcaggtaaagaatacaatgagctgatccgtaagtgggagcaagacaaacgtaataaggataagggccaatctcaagctgatgatgcactttgggatacagacgaagagatagaacttataaagttagagctttacaaggacgctgtaggttcattgaaaaaagacgactctgaaaactcccaattatatagggcatcaacgaggttaagagaagataaagctgcatacttgaatgacataaattcaacggagagtaattatgaccctaaatcaagactatacaagagtgagacactgggatccgttgacgaaaaatcgaagatgttccgcaggcatttgacaggcgagggtttgaaattgagcgaattgaaccaatttgccagatcccatgctaaggagatgggcgtacgtgacgaagttgaggataaagaaaaaatacagcatgtattagtggccaatcctacaaaatacgaatatttgatgaaaaagcaagagcaagaagacgccaatgagcccaaaacagtcagtgtaagtgaactggaagccaagaaagtggatggtacaaagcaatcagaagaacaacgcaaacgcttaagagatctctatggctag

SEQ ID NO: 469 - DNA, 2610 bp, Saccharomyces pastorianus
atgaaatttgaagatcgcatattgaataaatcagttcctgaatggaagttttataatatcaactatgaagagctaaaactagtgattaaaaaagtgactacctatgatcgtcacaatttgaaggatacaaatattgagaagctgttatgtcaatgtactgtggcttttaattgtgaattccaaaatgtcaatttgtttgtatctctaaaaattaaagaaatatcaacacgtattctttctattgaatcttccataattgatttttctaagagtttgaataaaaatttcaggagccgcttcaatttgcgtaaactgaaaattattaatgctcatgtagacgattgtaactttgaattacagttattatcaagattcttgatagtacagaggatcgccttgagaaagctgttcaagaaattgctaaatgagtttcctcaaaagaaggaaaatccttcattggcaactgagtatattgcctcgataagaaactcagaaaatttaagaaaagggcacgaaggcgtatcgttcatgaacctcgatttagatccatatcttttggaagtgtcgctgatcgtcgatgttttacacgatttagagaataaactcgaaggtgtaaatgactcagtggaagggctaagtcccatcaaccgcccaggcgaatccattcatactaattcaagtccagaagcaagcaattccatttcgtcgacttctccgaggtcaatcccgttactatcaaaaaacaaaagctccaaaatggtcgattcctcggtagagtttgatactgcacttatagacaaatctgaaactctaggaaggtttttgatatcgtctgaagatgtagaggggctaaagttcatgttgttgaatttaggattcagaataatagacgacagtattatttccacctcgagagagatcttggatactactgacaacatccgttcgatggacaacaaatccgtaagatcagcgaaatcatttaacgatctgcagcattctatgtcccggcatagacaaaaaggcatactgccttctgcggtgcagcctaatgagacacatatctccctcagtatactagagactaaaggcaacaaacgtaatcctgtattattaactgacgaaaatattaaccagcacccaaatataataatcagctccactgccgaagataactgtattctaatgtgtcacgttggcggcttaagaaatcacgttgtctcgaacaatttgcttttaaaggatgtggaacatatattctcagccttgaaagacactaacaacaaagagaacatcagtgaatttataaactctctgaacccgtcctcaatcaataaactgtctttggagtggattcaatctcatcggctagggactattgaacccaaaattgattttaaaagaacaagattcaaatcaatagagaacggaagtatatatttgatagcactagacgaatgtattacaataggtaacgtatccacattaccttttccaattttagaggtgaaaaagttgggtcagtctaacaatttttcacaggagtcaaacaacgaggacaatagctttaaacagttgataaaatcctttgttacaaatgagtttcaatgcagtttaattccacctgatttaaccacatggaaattgtgtctggaattagtagattcaaacgatttacagaatgatttgtttcaactattactaagagaccaatataaattaagtcctgatgattctttatcaccagatgaatttttccagctagggaaagatcaccttgaggaagaatttgacttgaacatctccacaagcgtttctcggagaagtgatggcagtgataaaaaagttaaaaccactgacaagccaaaggaaccccttaaagaaattaaaaaaaaaccaatcaagtattggaatgaatttgacgaacaagaggaagataatttagataacacgttttatatcaatactaacggaggcaatggtacatcggatgatgaagagtctttgcttttaagaagctcgccaaccgactatggatttattttgtttagtaggagtttcataaaccatatttacgagttttgtgaaaagctgagaaatttaattcgtcatgacaagagggcaccgttgccagttccgtttgatagttccaaaaggcctcagcaccccactcactatggttcgatggcatcattgagttcacagtcaacaataacatcatatgatgatgttcaaagatatttgcaataccaacaacaagatatagaagactctcaatctgtctatgaatatcggcatgatgaggtgattacattcctatacttgtccgcactacttacttcttgcattatggcaagtgtatgcctaggtattgttttgtctttgtttcgtggacaaaataacaatgaaatagatttagaagttcaaaatatcctcatagccattatcattatatcattattggtttcccttcttttgatctgcgcttgtctgctattgttattcagtaggttcactttggcacctatctggcattatattagctgtttcataatgtttttcacggtaactgggactgtatgctatggcatggttgaaatattcttttaa

SEQ ID NO: 470 - DNA, 933 bp, Saccharomyces pastorianus
atgatctcagaaaaggctgctactgccttggccactgtagccacagtttgctggtgtattcaactaattccacaaatcatttacaattggaagaaaaaagactgtactggactaccacccttaatgatgtttttgtgggttgtttccgggattccgtttgctatatacttctgtgttagcaacggtaatgtcatcttacaagttcaaccccatctttttatgttcttttgtgctataagttttgtccaatcgtgctattatccaccagttagcatggcaaaatcgaaaattgtgtttattatagctactattattgcagcagatgttggtatggaagttggcttcatattgtggttgagacctctttacgagaaaggtactacatggcctgatttaatttttggtattcttgcatccgttttgttagccgttggattacttccaccctattatgaattggctaagaggaaaggccgtgttgtcggcattaactttgctttcttatttattgattcgttaggagcctggttatctattatcagtgttattctaggtaacatggacaccatgggtattatactatactctattattgcgggaatggaactagggatttttatctctcattttatatggtggtgtaggttcaagtggctcgctaaagacaagtttgttgacgaagaaaccgaccagaatgaaaaggaagaaatctacgggaaaactgaacacgtattaaacaaggatgaacaacaagtaactagttataacttggacgataattcaatttgtgacgatgtctcaagcctcgcagacaatttaaatttgagtcacacttctgatggcgatgcattgtcaaggactcaaactcttcatgccgttcatggagttgtggttagaacggaatccgatcattattccaggctaagtgtataa

SEQ ID NO: 471 - DNA, 1827 bp, Saccharomyces pastorianus
atgagtgatagaaacagtcgtatcgctattgttagcactgataaatgtaaaccaaagaagtgtcgtcaagagtgtaaacgttcatgtcctgttgtaaaaactggtaaactatgtatcgaagtcactccgacttctaagattgccttcatttccgaaatcttgtgtattggttgtggtatctgtgttaagaaatgtccatttgatgctattcaaattatcaatttgccaaccaatttggaagctcatgttactcatcgttactctgccaatagtttcaagttgcatagattgccaactccaagacccggtcaggtccttgggttagttggtaccaacggtatcggtaaatctactgctttaaagattttagccggtaagcaaaaaccaaatttaggacgttttgatgatcctcctgaatggcaagaaattattaaatacttccgtggttctgaattacaaaactatttcaccaagatgctagaagatgatattaaggctatcatcaagcctcaatatgtcgataacatccctcgtgctattaaaggtcccattcaacaagttggtgagcttttgaaattaagaatggaaaaaactccagaagatgtgaatcgctacattaaaattttacaattggaacacgttttaaagagagatattcaaaagttgtctggtggtgaactacaaagatttgccattggtatgtcatgtgtccaagaggctgatgtttatatgttcgacgaaccttcctcttatttggatgttaaacagcgtttgaacgccgctcaaattattagatctttgttgggtccaaccaaatacgttatttgtgtcgagcacgatttgtctgtgttggattatctttctgattttgtctgtatcatatacggtgtaccatctgtttacggtgttgttaccttaccatcatccgttagagaaggtatcaacattttcctggatggtcacattccctctgagaatttgagattcagaactgaagctttacaatttagaatagctgatgctactgaagatttacaaaatgatgctgtcaaccgcgccttcacttacccaggtttgagaaaaacgcaaggtgacttcgtactgaatgtagaagagggtgaattctctgattctgaaatccttgttatgatgggtgaaaacggtactggtaagaccactttgattaaacttttagctggtgcgctgaaaccagatcaaggtcaacacattccaagattgaatgtttctatgaaaccacaaaagattgcaccaaaattcccaggtaccgttagacaactatttttcaagaagattagaggccagtttctaaatccacaatttcaaacagatgtcgttaaacctttaagaattgacgacattatcgatcaagaagttcaacatctgtctggtggtgaattgcaaagagtcgccattgtcttagctttgggtattccagctgacatttacttgattgatgaaccatccgcttacttagattctgaacaacgtattatttgttctaaagttattagaagattcatcttgcataataagaaaaccgcgtttgtcgtcgagcacgatttcatcatggctacctatctggctgataaggttattgtctttgaaggtgttccttctaaaaacgctcatgcaagagctccagaatctttgttgactggttgtaacagattcttgaaaaatttgaatgtcactttcagaagagatccaaactctttcaggccaagaattaacaagttagattcccaaatggataaagaacaaaaatcatcagggaactacttcttcttggataataccggtatttaa

SEQ ID NO: 472 - DNA, 2676 bp, Saccharomyces pastorianus
atggaaattaagccggtcgaggttattgacggcgtccccgtctttaggccctccatgatggaatttgcaaattttcagtatttcattgacgaaatcaccaaattcgggttggagaacggcattgtcaaggtcatccctcccaaggaatggctagatcttttggaagattctccctctgtggagtctttgaagactgttcgaatcaactccccaattcatcaaaatgtcaagcagtgggagggacaacaagaaaacggcctcttcactgtcgaaaacgactacgatgataaatcgtatgatttaacgcagtggaagaatatggcctccagttctgatggtcgaataaagcaaagccaggatgatgaagtcttgaaacaaaactatgacttaagcaatcaagatgatttttatgacttgacaaaactacagtttttggaaagcgatttttggaaaactgtttttctgtccaaaccgctctatggtgtggacgaagcctcttcacttttcccctacgatctgactttatggaatttaaataatttatcggattccataaattcaagcaatagacatatactctcaggtctacctaaatcgatgtttccatggcatttggatgaacagaacaaatgttcaataaactacttgcacttcggtgcccccaaacaatggtattccgtaccctgtttgaatacagaccgatttttgaatcttttatcaaaggagttactatttgataagaaaaattgtcctgcatttatgagacatcaaaatgttctaacatctccagatttcttgaaaaagaataaggtgaaattcaatagagtcgtacaatttgaacatgaattcatcatcacttttccttatagcatgaattcaggatttaactatggctataatctttgtgaatccattgaattcaccttagaccagcaaactattgttagaaagcaaccgtttaaatgtgtttgtgcatcgaagaaggaagaagagaagactagtgccttttccaacctatcctacgattctaatgaatctgagcaaagagaatccaacaacgataacgataacgataatgacttattccaaaaagttcgcagtttcgatgagctactaaaccattcctctcaggaattacaaaaccttgaagacaacaaaaaccccttattctccaacatcaatatgaacaggccacaaagtagttctcttcgatctaccacgcccaatggtgtcaaccagttcttgaacatgaatcaaaccacaataagcaggatttcttctccactactatcaagaatgatggatttatcaaatattgtagaacctaccttagatgaccccacttcaaaattcaaaagaaagattctaactccgcaattgcctcaaatgaatattccatccaatttaagcaattttggtactccatctttgacaaatacaaattctttactatctaatatgacaaatgcgtcgactaatccatccactatcacaaatggcaatccaaaccacaacaacgttaacagtggtgctgtgcccgcagctgcaatctctggtgccaatgccactagcagcaccaataacagtaccaataacagtagtaataacaacgtttcaacggtcccttcctcgatgatgcactcgtccactttaaatggatcctcgggtttaggtggtgataacgatgacaacatgttggctttaagtttggccactttggccaacagtgccactgcatctccgagactaacgctaccgccgttgtcttcaccaatgaatccaaacggccatacttcatataacggtagcataatcaacaataacagcagcaatggtaacaacacatactccaacggtactgccacggctaatgccacggctacatcagcaccccacaatttatcgattgtgtctcctaatcccacttacagtcccaatccgttgtctctgtatttaaccaactccaagaacccgttaaattcaggtctcgccccattatctccttctacatccaatattccatttcttaagagaaataatgtggttactttaaatatttcaagagaagcttcaaagagccccatatcttcgtttgtcaacgattataggtctcctttgggcgtaagcaacccactaatgtactcttccacaattaacgactattcgaacggtactggaattcgtcaaaatagtaataatattaatcccttagatgcaggtccatctttttctccacttcacaaaaaacccaaaatactcaatggtaacgataacagcaataacaatagcaacaactttgaatacaatttcgccagcaataaacaagaacctaattcagcaattttgaacaacgatgccaataataatgaaacgtacaatacttcttcgatgaatagtaacggtaataattatcaaccgcattcttctaaattcggtgaaaacgaagtcattatgtcagaccatggcaagatctacatttgtcgagaatgtaacaggcaattttcttctggtcatcatctaacaaggcataagaaatctgttcattctggtgaaaagccccattcttgcccaagatgcggtaaaagattcaaaagaagagatcatgttttacaacatctaaataagaaaattccatgtactcaagaaatggaaaatgctaaattaactgaatcataa

SEQ ID NO: 473 - DNA, 3738 bp, Saccharomyces pastorianus
atggccccagctacccctaaagcttctaagactgcccagtttaagaatggctccacgtcgtcccaaaaaaaaatgaaacagtcaagtttactgtcatttttctccaaacaagcatcttctgcgacgcccaccaaaggagcacctcaagctattccatcgagttcacaaaacccagctactagtaagacaacggagaagtcagaagataaaaagtccaaacagctttttgtagatatagatgacaacaatgatatgacaatggctgaagaaacgccgtcaagtaccagtcattctcaagagttccagtcagataccttactaaacactaatacaactgaagttaagaacgccattgcagatgatgattcgtcatcctcttcacaaactcgaagaaaccataaaagaacgatcaattatgctgaaagtgatgaagaagactctagcactttgtctaccaacaaacgaaagaggagtaaagtgattgacagcgaaagtgatgaagacgaatatgtacccgataaaaatgatgcggaagctgaagatgatgaagataacgatattatagaagccaaagaagacatcaaagacgaattggcagataatgatggtggagatgatgacgatgatgatctgttgtccttagtggagtcgtcttcaaagagaaagtcatcaaatacttctcattcttcatcaccttttgcaagaaacacatcacatagcatttcaaagaatgcgagtagaccaaatcaaggccaaagaaaatcttacactcctcctcacacccaaaaatcaatggtttctaaatccagcaaattcaataaacaaaatgaagagagatatcaatggctagttgatgaacgtgacgcccagcgccgttccaaaagtgatccggagtatgatccaagaacactgtatatcccatcctctgcatggaacaaatttacaccgttcgaaaaacaatactgggaaattaaatccaaaatgtgggattgcattgttttctttaaaaagggtaagttctttgaactttatgagaaagatgccttattggctaatgccttatttgatttgaagattgcaggtggcggacgtgctaatatgcaattggccgggatcccagaaatgtcgttcgaatactgggcagctcagttcattcagatggggtataaagttgccaaggtggaccaaagagaatcaatgcttgctaaagaaatgagagaaggttcgaagggtatcgttaaaagagaactacaatgtatactaacctcaggtactttaactgatggcgatatgttacattcggacttagcaacctattgtctcgctataagagaagagtccggtaattactataacccaaccgaattagatacgtcgaccacggctaaaaagttgaacacgaaaatattcggtgtggcctttattgatactgccactggtgaacttcaaatgttggagtttgaagatgatagtgagtgcacgaaactagacacgttgatgtctcaagtgagacctatggaagttgttatggagaggaataatttgagcacattggctaacaaaatcgtcaagtttaattctgcccccaatgcaattttcaatgacgtaaaagccggtgaagaattctatgactttgataaaacttattctgaaataatatcatctggatacttttctacagaagaagattggccagaaattttaaagacgtaccatgatatggggaagaaagttggttttagtgcatttggtggattgttgtactatttgaaatggctaaagttagatgaaaatctaatttcgatgaaaaatatcaaagagtacaattttgttaaatcgcaaaactccatggttttggatggtatcactttacaaaacctagagattttttccaattcgtttgatggttccgataagggaacactgttcaaactatttaacagggccattactccaatgggtaagagaatgatgaaaaaatggttaatgcatccactattgcataagaacgatattgaaaagagactcgacagcgttgactctttattacaagatatcactctaagagaagaacttgaaatgacgttttctaagctgcctgatctagagagaatgctggcccgtatccacagccgaacaattaaagtgaaagatttcgaaaaagtcattacagcatttgaaacgattgttcaattgcaaaactctctacaaaataataatttaaagggagatgtttcggattacatatcatctttccccaaggggcttgtggaaggtgttgaaaactggacaaacgcgtttgaaagacaaagagcaatcaacgaaaatattattgtcccacagaggggatttgatgtggaattcgataaatcactggataaaatacaggagttgaaagacgaattgatggaaatattaatgaggttcagaaagcagttcaaatgttcgaacatacaatataaagattctggtaaggaaatttacactgtcgaaattccagtttctgcaaccaaaagcgtcccatcaaattgggttcaaatggcagcaaacaaaacctataaaagatattactctgatgaagtaagaactttagcgagatcgatggcagaggccaaggaattacacaagactctagaagaagatataaagaataggttatgtcaaaaattcgacgtacactataattcgatttggatgcccactatacaagctatctctaatatagactgtctgttgtctataacaagaacatccgaatctttaggcactccctcttgtaggccgattattgtggatgaattcgatccaaaaacaaatgccaaaatgaacggttacttgaatttcaagtcattgaggcatccatgttttaatctcggtgctaccaccgcaagagactttatccctaatgacgttgagttaggtaaggatcaacctcaattgggattgttgacaggtgccaatgcggcaggtaaatcaacagtattaagaatgacatgtatcgccgtaattatggcacaaatgggctgctacgtaccctgtgaatctgctgttttgacgccaatggatagaatcatgacgcgtttaggggccaatgataatataatgcaaggtaaatccacatttttcgtggagttggctgaaacgaaaaaaatactagatatggcaacaaacagatcgttgttggttgttgacgagctggggagaggcggttcatcaagcgatgggtttgccattgcagaaagtgtgctacaccacgtggcgacacatattcaaagtttaggatttttcgccacacattacggtacactggcactaagttttaaacaccatcctcaagtaaggccattgaaaatgagcattctggtggatgaaggaaccaggaacgtgacttttctgtacaagatggtcgaaggccaaagtgaaggttcattcggtatgcatgtggcgtcaatgtgtgggatttcaaagagtattatcgacaatgcgcagattgcagcagacaatttggagcatacatctagattagtcaaagaacgtgatttggcagtcaacaatttaaaaggagaagttctctctttatctggtggcttacagagcgatttcgttcggattgtgtacggagatgggttgaaaaattcaaaattgggttccggagaaggcgttttgaattatgattggaacattaaaaaaaatgtcttgaaaaatctcttcagtatgatcgatgatttggattcttag

SEQ ID NO: 474 - DNA, 798 bp, Saccharomyces pastorianus
atgtctcaaactcgtgaagattccgtctacttggccaaattggcagaacaagccgaacgttacgaagaaatggtcgaaaacatgaaggccgttgcttcttcaggtcaagaattatccgtcgaagagcgtaacttattgtcagttgcttataagaacgtaattggtgctcgtcgtgcttcttggaggatagtttcttcaattgaacaaaaagaagagtcaaaagaaaaatccgaacatcaagttgaattgattcgttcttaccgttcaaaaattgaaaccgaattgactaaaatctccgatgatattttgtccgtattagattctcatttgatcccttctgccactactggtgaatctaaagtgttttattataaaatgaagggtgattaccaccgttatttggctgaattctccagcggtgacgctagagaagaggcaacgaatgcctctttagaggcttacaaaactgcctctgaaattgccaccaccgaattacctccaactcatccaattcgtttaggtttagctttgaacttctccgttttctactacgaaattcaaaactccccagacaaagcctgtcatttggccaaacaagcttttgatgatgctattgctgaattagatactttatccgaagaatcttacaaagatagtactttgatcatgcaattattaagagataacttgacattatggacctcagacatttctgaatcaggtcaagaagatcaacaacaacagcagcaacaacaacaaactcctgctgaacaaactgaaggtgaaccagccaaataa

SEQ ID NO: 475 - DNA, 432 bp, Saccharomyces pastorianus
atgtcaaccattcccccaaagttttttaaaattgcaaacatttcaattggctgtttagataccatcgccgcactttcgcaattgaagtaccttttcaccaatttaagcatttttctcctagccgtgtatggactagcacttacaattccaatcatttatttagagtttaaagtgccaccaaacctttacagatacgcgtctttttattttagtttccttggaagggggctttcttatatcttactaggtttaataatcagcttcggcggtattttcaacaagttagcaggaatgtttacctttattttgggggtttccttcatagtcttccatttctcacaatttgtggaagaacctgctaatttcagagcacctggttcatctttatcaattggcgatgatgacattgatgacgatgatgacatgatttaa

SEQ ID NO: 476 - DNA, 2745 bp, Saccharomyces pastorianus
atgatgcaaactccgacagacaatataatctctccatttaacaattatggcagctcagcccaatacaatacgtcgttaaaaactcctaggcaagttacagatattgaaaggccaaatacactatcgccgttgtcgagagggaagaaatggacagaaaaactggccagattccagaggagcagtggcaagaaaaaacgattttcgccttctcctgcttcgtcttccaccttttccttttctcctaactcgagaatcagttcctcgaaatcttctggtaaagaagagggcgatttactaagcacgccctcatccgttctcactgaacatttaccacaacatccccacagaacatcttctttaccaagacctaattctaaactattttatacaagtcatactgacttgtctcgagccagtgagcctccggccgaggaaagcgttaatttttatacgtcacataatataccacccaaggttgctccttttggttatccaattccaagaacttcgagcaaaaaatcctttctgaatgaagcctgtacgctttgtgatgaacccatttctagcagaagaaagggagaaaaggttatagagcttatatgcggacatttaagccatcaggaatgtcttatcatatcatttggcaatacttcaaaggcagatgtaggggaactctttcccccatgtacgaaatgtaaagaggatgctaacaaggctgttcagtgcataccgaagaacgaagaattaaaagatatgcttatttcagatttcttaattaacaaagtcccagattcagagctaccatctacaccgcagtctcaactcccccttccttcaccgttactccctccttttgggttatcatatacaccagttgaaagacaagccatatattggcagactccaaatttaggcccaaatcttatattagccgctcctccaaaggacaggaatcaaattccacaaatgtattcaaaaaaaccatttttacactcttccccgagtcatagaagaacaacatcgagagggagttctgtatttgctacaacatctgtaatatcatctgctaatgacactatttccattacttcggattctgtattatcaagggatgacgaaaccaaaattccactgccacttttaaggtcatattttattcaagtacttctaaacaactttcatgaagaactaaaagattggataatagatgcgaactacggcttactacggctggtagacaaattgatggtttcaaaagatggccaaacataccttcaatgttggtgtttcttatttgaaaatgcacttataacagcaagattgaacggcgaagaagaagatgttctggaaattaaactaaatgaattagaaatatatacaccaataagtgatttgagaatgacgacgctggaggcttcagttcttaaatgtaccttaagtaaagaaaattgtcccaatccggtagacctttacatcatcgaaaagataaattcaaacgaaagcacaacagtacaaaaatggatatcggccttattggaccatgattttgtatttgatgagaaaaacatcacgtcgacattacctactcttccaatcctaaagaatttttcagatgttgcagatggcgacaggtgcgagacaagcaccttcctaggcttaatcaagcctaacaaagttgtcgaggttagcaatatggatcaccataatgatacggtaatcataaggagaggattcactttagatcccaccgaatcgtctagacagagtacagtcaataccatacaatcggttttaactacaattagctcaattctttcattgaaacgtgaaagacccgataatttggtaataattttacagattgatttcaataaattaaaagaaaaagaaagctcaactattatttacaacagtctgaaagcgttaatgctcaaattttctcgtctgcaattttgtttcgttgatcggagcaatcatgtattagactatggatttgtgtcacacaaagtagcttcatcggatgccatttcaaaattggagtcagagcactcttcaacacagttctcttctctttggttaaaggatgttttatatcccaagactattcatgagcatctaggtattatagccgtatcaaataatagcatggaagcagagaagtctgtattatttcaagattacaaatgcttcacaagtattggaagaagacggcctaatgaattaaaagtgaaagtaggttatttgaatgtagattacagcgacaagattaacgaacttgttgaggttggttcttggaattttgttctagaaactctttgttatagtttcagtctaagctttgacgaagacgacgacgacgacgataattcgactgaagacgaatttgatagaagctcattatcggatgttgagtctacgactactattcatatcgactctccatttggtgacgaaaaccttacaggaaatctatcaggtgacagaaattccaatgatgacagtgagtaccacaattggacaaagccagaggttattggtcctgcagcacaatcaccattagtctccaatattagactttcactttattctaacggagaagacattagtgaaagcgagactgacgcatctcacttgttgcttaatgatatagatagaaggatcggcgagatgagaaggcgcggttcgttttcgagtctaatggaaaatggaaacgatacccatccactccatatagattatatttaa

SEQ ID NO: 477 - DNA, 1425 bp, Saccharomyces pastorianus
atgggtgctgtaatttctctgcctgtgagtatggctggatcattcgtggcgtcctgttttggaggctgctgctctaatttagtctcaaaaactgcgtcgtcattaggatcttcctccctggggacaagacttttatatgccgtttggcttctagtgaactcattgatatcgtggatatcgtactctgcgaacaaatctatactctggccgggcaagacatgtactggtactggagaatgtgggtttttcactgtccataggttaaattttgcgttaggatgcttacatttgatactagcgtctgctttaacgggtgtgaagtcaactaacgatgtgagggcagcattccaaaattcatggtggagcttaaagtttatattgtatttatgcctcattgttctatcgtttgttatcccaaatgatttttatatttttttttccaaatgggtatcggttcctagtggggcaattttcatcctagttgggcttatattattagtagactttgctcatgaatgggccgaaacgtgtattagtcacgtcgaatcagaagacgaagattcttcattttggcaacgatttttggttctgggaacaacttctatgtacactgcatcgattataatgactgtggtcatgtacatcatgttctgccaccaacagtgcaatatgaatcaaacagcggtaactgtaaacttaattttaactgttttaacgcttgtcctatctgtgaatcctaagattcaagaagctaaccctaaaagtgggttggctcaaagcagtatggtgtctgtttactgtacctacttgacaatgagtgccatgtcttctgaaccagatgacaagatgtgtaacccgttagttagatccagcggaacccgtaagtttagtattattctgggctcgttatttacttttgttgcgatcgcctatacaacaacaagagctgctgctaatagtgctttccaaggtaccaataccaatggcgcaatatatctcggggatgatatcgaatacgaagggctaggcggacagacaagaaaccaattgagatatgaggctatcaagcaagccgtagaggaaggatctttaccagagagtgccctatatgacacaacttggttgggaacaccttctttgactgatggtgctacagagaaccaaaatgatgatgaaagaaccgggaccaagtacaactacactttgttccatattatattctttttggccacgcagtggattgcaattttgttaacaatcaatgtgactcaggatgatgtaggagattttataccggtcggaagaacatacttttattcttgggtcaaaatcgttagtgcatggatatgttatgcgctttacggctggacagtagtagcgccagcgattatgcccgacaggtttgattatgagaactattactaa

SEQ ID NO: 478 - DNA, 2019 bp, Saccharomyces pastorianus
atgtggaagggtatttggttggctcttcttttatacatagctttagctaaggcgttctctttacctggtgtatcccctaccacatatcatgctaacgatgaaatcccacttctggttaatcgtttgaccccatcaatttactttcagcataaagatgagaatggtaaggatgtttcaagtgataaagagcattttctttattcctatgattactataatgaaaaatttcatttttgtaaaccagagcatgttgagaaacagcctgagtcgctaggatcagtcatatttggtgatagaatttacaattctccgttccaattgaagatgctagaggataaagaatgtgtcgctctttgtaaaaatacaattccaggggaagatgccaagttcattaatacgttgattaaaaatgggtttttccaaaactggctcgttgatggattgccagcagcaaggaacgtttacgatagcagaacaaagacaaattattacggtacgggattcaatttgggctttacagatgtcaaacaaactgtcggcggtaaaacaatccctagtacaatggaagaattggattcagaggactccgaaacaggcgctacattagatgccagagagcctaaaaacataaagcctcatctggttcaaactatagaattaccatatttcgtcaatcattttgacattcaagtggagtatcatgatcgtagcaacggcaattaccgtgttgtcggcgttactgtgaaccctgtatccattgaaagatcctcacccggtgcctgttctacaacagttgagtctttaaccctagtcgaagataaagataatgacgtgtattttacctactccgtcaaattcattgcttctgatacagtttgggctacaagatgggacaagtatctacatatttatgatccgcaaattcaatggttttctttaattaatttctccatcatcatcattttactatcatctgtggttattcattctatacttcgggctgtgaagagtgattttgcccgttataacgaacttcacctagataatgaatttcatgaggatactggttggaaattaggtcatggtgatgtatttagaacatcatctaaatcaatggtgttatctgtgctcgtgggttcaggtattcaattatttctgatgatcatatgtagcattttctttgctgcattaggcctcgtatcaccagcttcaagaggctctttgccaaccgtgatgtttgttctttacgcattattcggctttgtaggttcttatacttccatgggtgtctataagtttttccatggaccttattggaaggctaatttgataattacaccaatcctgcttcctggcgcaatttttctattaatagtagcaatgaacttcttcttattatctgcgcagtcctcgggtgtgatcccagcaagaacgctgtttttcataatcttcctatggttttcggtgtctattccattgtcgtttgctggttcatatattgcctacaaaaagtgtaactgggatgaacatccaacaaaaacaaaccagattgctcgacaaagtccatttcagccttggtacttaaggacaacacaggcaacccttattgcaggcattttctcttttggttcaatagccgttgaattatatttcatttactccagtttatggttcaacaagattttttgtatgtttggttttctactcttttcatttttgttgctgactttaacaacctcattggtaactattttcattacgtatcattcattatgtttggaaaattggttgtggcagtggaggagttttattattggtggtttgggatgttcagtttatatgttcatccatgcaatattatttacaaaattcaaactcggtggattcgtcacaatcatactgtatgttggatattcatttatgatatctgtgctatgttgcgttgtcacaggggcgatcggctttttcagtagcatgatattcattagaaagatttattctagagttaaagtcgagtga

SEQ ID NO: 479 - DNA, 1524 bp, Saccharomyces pastorianus
atgacgatgacacaccaaaaggatttgaaaagtgtctttactacaaaggatttggatttcaagcctgctgcaaagctcactaagaaggacttgaatgcaagcgtcaccaaagcagagtatgctgtaagaggcgctatccccacaagggccgacgaactaaaggaggaactaaaaagaagctcaaattcgttaccgttcaataacatcataaacgcaaacattggtaatccacaacagctagaccaaaagcctttgactttcaccagacaggttttgtccatcctggaatatccagtgattttaaaagtggaccatgaaaagttagcttctttgaatttgttcgccaaagatgctctgaaaagagctcagcgcctactagacgacattggtggttccgtcggagcttactcgcattctcaaggtgtgccagggataaggcaaacggttgccgatttcatcactgagagggatggcggtgagcctgctttcccagaggacatttatctgaccacaggtgcctctgctgctgcaacctctctgttgtctttattgtgtaaggactctcaaacggggttacttcttccaattcctcaatatccattatacactgcatccgcatctctttacaatgcgcaagtattaccatactatttggacgaagaagccgattggtccactgagagtgacgaaattgaaagagtggtgttagacgctttgaaaaagggcattaaaccatcggtgttgattgttatcaaccctggtaaccccactggcgctgttctttctgaaagcaccattgccaagatctgcttgattgctgcgaagtacggcattacagtcatttcggatgaggtctatcaagaaaatgtttttggcgatgtcaaattccattcaatgaagaagatcttaaggaagttacaaaacttatatccagggaaattcgataacgttcaactggcttctttacattccatttccaaaggattcatgggtgaatgcggtcaaaggggtggttacatagaaattgtgggattttctcaagatataagagatgctcttttcaagctcatgtctatatccatttgttctgtagttactgggcaagctgtagttgatctaatggtcaagcctcctcaacctggtgacgagtcatatgaccaagaccgtcaagaaaggctgaaaatttataacgaaatgcttacgagagctaacttattgtatgagacattcaatgaattagaaggtattaaatgccaaaagccccaaggtgcaatgtaccttttcccaaagcttgttttgcctgaaaaggcacttcgtgaaagtaaacgtctcaacatcgagccagatgtgctttattgcacagcactattggaatctacaggtatttgtaccgtccctggttctgggtttgggcaaaaatccggtacttaccacgtgcggacaacctttttgccaccaggaacccaatggattcaagactggagaggatttcatcaagagtttttcgacaaatatcgtgattaa

SEQ ID NO: 480 - DNA, 318 bp, Saccharomyces pastorianus
atgtcactatttgggaggctgtaccagtttcagtcaaggagaatgttttcctccatatcgctcatctctgctctgtctgtattacgtccgcaaaccaacgtgcttttaaacagctcaccattgaaaaccatgtcctctacaccgtttgggtttggtttcattgggcaaagacggtggaagtcaagaggtaacacgtatcagcccagtacgttgaagaggaagagaactttcggattcttggccagggcaaagagcaaacagggctctaaaatattgaaaaggagaaaactcaagggaagatggtttttgtctcactga

SEQ ID NO: 481 - DNA, 858 bp, Saccharomyces pastorianus
atgctacctacaacaacgattccgaagatatgcatcgcaagtcctatgagaaggtatctttcccatacagcgaggtatctatatgccgaggaatataagacaacatctatgtcctccaatgcaccttcgctgacaaaggaccaagccaaaaagagagagttgaaaagactagcacaacgaagagccgaagcaaagagacccgctacgacaagcccactgtatatgccggttgctatggcgctaagatacttgcgtgcagcagaagtaggcagacctcaatctcaacaaacaattaatttaactacattggtggttggcgaaagaggtacggcgcccatatctgggaatgtcacatttcccaagccattgagatatgtgaaagttgccgtctttactaatgacgaaatcaaactgaaagaacttcgtgaaaaatatccaaatcatttaatcggtggagcggatcttgttgcgaagattaaaaataatgaaattcccgttgattttgacaaggcatttgccacaccagatatcgtggctactttacaatcacaagtggctaggatactgggtcctcgcggggttttaccttccgttaagaagggcacagtgaacgatgatataacttctttacttcaagagagcttgggctctatgcccttcagacaaaggggaaatgcgatcagcgttggcatcggaaaatgttactttacagatcgagagctcttgcagaacattatatctacgagagcagcatttaaagccgcggttgagaaccagaaagccaagaaaccaagtatattaagtaagaccacgctatcgagcacacacggccctggtatcgtgatcgactttgcctag

SEQ ID NO: 482 - DNA, 1698 bp, Saccharomyces pastorianus
atgtttaagaaggaacctcacatcaaagctttgagtaatttaaaaaactctgaaagaaagaagttactccaaacttgtaaaaaacagacgaataatgaggagtacacatttccaacctcgactataaagcaaacgaactttagtggtcaaaagaattttgggacagtgtatacagacgaaaataatattccgatattattcaaagaaaagcataatgaacaactttttcccaccgtatactcctgttgggagaaccatacactattacctattgtcttaactcacggatttgttatagaagagcatttgtttaatggtgctaacttgatgatttccggctcaattccgccttttaatcctcattgcaaaataggcactctctgtggtgtggctagtagacaagctcctaagcttgttttagccataggtattgttgaaatggatcttccttcctacaatagagtaatcggtgaaacgggtattgccgtgaaaatcattcatcattttaatgacggtctttcgaaagccttcaaagtaaagttagaaccgccaagtgctttccatgttgcgtcagaagatgaggatatcaacaacacacagatcgaattccaagaagaaactaaaattgttgaaaagacacgtgaaaacgtacaagagataaacacaaatactgaagaaattgctgaagttttggagcacttatccgtctcggacgtggactatttcattacaagggcattatattatacgttaacacaagataaaagtttggcgttacctatttctgcctcaaattttatttcaaaccacattatgcggaatttgccttcgattgatcacaacgaagtcaacgttaagaagacttcgtggaagaagagtgcaaaatttttgaaacatttcgaaaaagaaggcttcttaaaattgaaaggaaagggagacgatttaaccattattggtaaaaacactggtaaggatgaactaaaaaatttcgtgccgtataagcttggagctaacaattccgtcaaggaaaaaggtgagaacactaactccaaagaaaaggcatctggaatgatgtattcgttgacactatataaaccgtttaatcttgcgaaggactttgtgaaggaggccaatttatcctttcagacatactacacctctcaagatattagaaacgctattactcaatacatttctatcaaaaacttggtagatgcaaaggacaaaggaaaggtagttatggatgacttattatacaacatggttaataaaaaaaagagtactcccgatgtagcacgtatcatacctagagcccaaatctcggatcctttactggccaataattttactgagttttaccaaatatataaaagcgatgatacgcttttgtctagaacaccaatgaagggttctctgccacgcatcaagattgtcacagaaatgaaaattggcagaaaagttatcactaaagttagcaattttgaaacgcttcaaatcgacccagaattgcttgctgctgacttaagaaagatctgtagtgggtccaccactattggtgaatcgcaaacattcaaaagtgctgaagtgcaagttcaaggcccacatggccagttaattattgatcatcttaacaaattgggtgttccgaacaaatgggtagattttgaaaataaattgaaaaagaaaaaaaaaaagtag

SEQ ID NO: 483 - DNA, 1008 bp, Saccharomyces pastorianus
atgtcatggaatgcgttatttgtgccactagtggtgattgtgcttttggtagtgctctctccggttttcaagtcaacatggccattttcgactttctaccatagagtgtttcagccctttgtagccgatgaccataaatatcgctggaagtttcatttggttcctcttttctatacttcaatatacctgtacctagtgttcacataccataccagggtagagcccctaatcaagactgaattgttccttctggaacggatactaatcgtgccgatcattatattaccacctgtagtattaggtattttggtgatggtaactaaagccgaggattcaaacaatcataaacaaggctccacagaaaagtacccgtacgactacttactgtattatcctggcgtaaagtgttccacgtgccgtactatcaaggtggctaggtccaaacattgcagtatttgtaatcggtgcgttctgggagctgaccatcattgtatttgggtaaataactgcattgggaaggggaactatttccaattctacttcttcctattttccaacattttttcaatgagctatgctttcctgaggctatactttatatctctcagcagcactgctgtgcttcctagagcagttctgactctaaccatattatgtggatgctttacgattatttgcgctattttcacataccttcaattagccattgtcaaggaaggaatgactacaaatgagcaagacaaatggtatactattcaagagtacatgagagaaggtaaactagtaagatcgttagatgatgaatcccaatcctggtttctcaaatttacagaaaaaagcgacactggcgaacctctccaagaccaacaggtcacattttatagcacaaacgcgtacgaccatcaacgttatagcctaaagcattacataacgatcaaagacgcatccgaaattaccaacttatatgacaaaggtaccttcttggctaacttaatagacttaatgtaa

SEQ ID NO: 484 - DNA, 4551 bp, Saccharomyces pastorianus
atgggcggtactcttgcctcatgggcctgcaagctctgtagatctcctgaagggtttggacctatatctttctatggtgacttcactcaatgctttattgatggtgtaattctgaacctgtcagcgcttttcatgctaacctttggtacaagagatctggttcatctttgtaagaagaagcatcctgggtcaaaatatagacgaaattggataattgtctctagaatggcccttgtcctgttggaaataatctttgtttcacttgcatctttgaattcatctaaggatgagaatggaggttttacagttgtgagtcaatatgcttttactatgttgtccttatttgtcgccttggctttacattggattgaataccatagatcagtggtagcaaatacgatacttttattctattggttttttgaaacatttggaaattctgctaagctattaaatatcctcatcagacacaaatatgagggcggatggtaccctggacaggcaggtttcatattgacatcatttcaagtaattacatgcgctagtatcttactgctagaagctcttccaaagaagcctctgatgccccaccaacatatacatcagaagttgatgagaaggaaaccgaacccgtacgatagtgctaatatattctccagaattacattttcttggatgtcaggtttaatgaaaactggatatgaaaaatacctagtagaagctgatttgtataaattaccaaaaaactttagtagcacagaactctctcagaaattagagaaaaattggcaaaatgaacttaagcataaatcaaagccttcgttatcttgggctatatgcaaaacttttggatataaaatggttttagccgcgttcttcaaagccattcatgatattctggcattcgtgcaaccacaattactaagaattttaatcaagtttgttaccgactacaataaagaaagacaagatgatgacgatcctttaactctcggatatggtgataagcctgatcaaaaattgcccattataagaggttttatgattgcgttttccatgttcttggttgggtttactcaaacatctgtgctgcatcaatattttttgaatgtctttaacactggtatgtatgtcaaaagtgccttgactgccttgatataccaaaaggctttagttttatctaatgaagcatctggactttcatctactggtgacatcgttaatttaatgagcgtggatgtccaaaaattacaagatctgactcaatggttaaatttgatttggtcagggccctttcagattattatctgtctctactctttgtataagctattgggtaattcgatgtgggttggtgtaatcatactagttgttatgatgccattaaattcatttttaatgagaatacaaaagaaattacaaaaatctcaaatgaaatacaaagacgaaagaactcgtgttattagtgaaattctaaacaacatcaaatctctgaaattatatgcgtgggaaaagccttacagggagaagttggaagacgttagaaataacaaagaactaaataatttaactaaattgggttgctatatggctgtaacaagtttccaatttaacatagttcctttcctagtttcatgctgtacgtttgctgtctttgtgtacaccgaagatagggccttgactaccgatctagttttccctgctttaactcttttcaatctactttcatttccattgatgattattcccatggttttgaattcatttatcgaagcttctgtttctattggtaggctattttccttttttaccaatgaggagctacagccagattctgttcagcgcttaccaaaagtagaaaatgttggtgatatagccatcaatattggcgacgacgctacctttttatggcaacgtaaaccagaatataaagtagcgttgaaaaatatcaatttccaagctaagaaaggagaattaacctgtattgttggtaaggttggtagtgggaagaccgctctattatcaagcacattgggtgacttatttagagtcaaagggtttgcctcagtgcacggtagtgttgcatacgtctcacaagttccatggattatgaatgggacggtcaaggaaaacattttgtttgggcataagtacgatgctgacttttatgaaaaaactatcaaggcctgtgcgttaaccattgacttggcaattttgatggatggtgataagacgctagttggtgaaaagggtatttccttgtcgggcggccaaaaggcacgtctatccttagcaagagcagtttattcaagggcagatacttatctactggacgatcccttggcggctgttgacgaacacgtggctaggcatttggtcaaacatgtattgggttcaaatggtttactacattccaaaaccaagttattggcaacgaacaaagtaagcgccttatctgttgcagattcaattgcattattagataatggtgaaattattcaacaagggacatatgatgatattaccaaggacgcggactctcccttgtggaaattaatcaacgattatggtaaaaaacacaataatacacacagcgaaaccagtgaatcttcaactaactcaattcgcgaaaacagtataccgattgaaggcgagctggaacaattacaaaaactaaatgatctggatttcggcaacgctgacactcaaagcttaagaagagctagtgatgcaactttacgcagtattgattttggcgatgatgaaaacgttgctaaaagagaacatcgtgaacaggggaaggtgaagtggaacatttacctagagtacgctaaagcttgtaacccaaaaagtgtttgtgtgttcatattgtttatcgttatatcaatgttcctatccgtcatgggtaacgtttggttgaaacactggtccgaagttaatagccgctatggggctaatccgaatgctgctcgttacttgggtatctatttcgcccttggtattggttcagcgttggcaactttaattcagactattgttctttgggtctactgcactattcatgcctccaaatatttgcacaacttgatgacaaactctgtgctaagagctccaatgacctttttcgaaaccacaccgattggtagaattttaaaccgtttttcgaatgatatatataaagttgatgctttgttgggaagaaccttttctcagttttttgtgaatgcggtaaaagttacgtttactattactgttatttgtgcgacaacgtggcaattcatttttataatcgttccattgggtgtgttttacatttactatcaacagtactatttaaggacatcaagggagttgcgtcgtttagattctatcacaaggtctccaatttattctcattttcaagaaactttgggcggtcttgctacagttagaggttattcacagcaaaagagattttcacacattaatcaatgtcgtattgataataacatgagtgcgttttatccttctgtcaatgctaatcgttggttggcatacagattggaacttattggttctgttattattttgggcgctgctactttatcggttttcaggctaaagcaaggtaccttgactgcgggtatggttggtttgtcgctaagttatgcattacaaatcacccaaacattgaattggattgttagaatgaccgttgaagtggaaaccaatattgtttcggtggagagaattaaagaatacgctgacttaaagagtgaggcgcccttagttatcgaaggtcacaggccacccaaggaatggccaggccaaggtgacatcaagttcaatcaatattccactcgttatagaccagagcttgatcttgttctgaaacagattgatattcacatcaaaccgaaggaaaaaattggtattgttggtagaacaggtgcaggtaaatcgtcgttaacattagcgctattcagaatcattgaagctagtgcgggaaatattgttattgatgacattcccattaatgaaattgggttatatgacttaagacataaactgtccattatacctcaagattcccaagtgtttgaaggtactgttcgtgagaatatcgatccaatcaaccaatacaccgatgaggctatgtggagagcattggaactttctcatttgaaagaacatgtgttatcaatgagtaacgatgggttagactctcaattaacagaaggtggtagtaacctaagtgtgggacaaagacaattactgtgtcttgcgagagcaatgctggttccatccaaaattttggtgctagatgaagccaccgctgcagtggatgtcgaaacagatagagtcattcaagagacaattcgcacggcctttagagatagaactatattgactatcgcacacaggttgaacaccatcatggatagcgatagaatcattgtgttggataacggtaaagtggctgagtttgattccccatcccagctattaaccaataccaaatcattattctattcgttgtgcacggaagccggtttggtcaatgagaattag

SEQ ID NO: 485 - DNA, 1986 bp, Saccharomyces pastorianus
atgcgtgcacacagagttgacacatttctcataagagaaaacgtcagattagagatcattcatgaatcgaactcatattttggtggggagcatatatcaattgcctttcgcttcaaacacctaggctcacaacatgattttttcaaccttaaagaacaactctgcactcttgataaaacggttgaagagaaactacagcaacaagcgagcttgcaagaaaacgaagaaagcaatgcagagaacaaaacctggtccatgaaatcactactaggtgctttcaggaaaactagcaatacggatgatgccacggatgttcaaaacatggaaatgctcaataagaatagggttttaagagaaaaaattcagaagcaattacatttccatcaacctttgtcattaatttcaggctatgttcaaatttcaggcgtttttcaatacgattcagaagtcattacccagtcaaaatttaaacaaaatgaaataaaaatggttgggctagatattctctctggtcatggtaccaaatatgttgctgcatccgaagatggagaccgacttaaaagcagtagaaatttaacaaagtatttcaactcagatttttcgaatgtaactaatggtcttctttccccagaaataacttctacgggggcaatttccagttatagtgaaccagttttagtgaattcaaatgatactagcataagagttctaccgcttttgttgataccacaaacacttcttttttcagagatttctttagagccaggcgaagttagaactttctatttcaaatctacaaaattaccaaaggatatttgtccaagttattcctcctcaaaaatcgtgtcaataaattacacccttgaggttggtgtagacgtgctatctgacgacaacatcaaaccattttctaataaagttccgatagtaatcgcgccatatatcagtcctaatgctgagcagtacacatcacattttgataaacccccaatcatattaaaggccggtaacatcaaagagttaaagccgcgtccgtttactcgaaaagtttctacagcttctgccatatcatttggtagaagaaaatcttccatcattgttcctccattagaggataataaatccgttgaccgcatcaaaaaaagctttattgaactagtggaatcgaaccagagtgggtcaagagatatagatgaattggttgacctccaaatggaagtacagtttgggaaggatgaagattcttcagatcctgaacctaatgactcacgtttttccaatgaaatggcgatatcggcagattctagtacagcaagtaactctataaccaaaaggagaaaaagtgaatccgtgcgtaataacatctccaaccttggacaacaggcatggaatgatgtttctctcgtaaagacagataacaactctaacattttgcctcagttagtgaatttacaaaatgcgtaccaaattaacagaaataatgagtctatggcaaaagtatccttgtcagcacccttcttcaaaaccacagatgatatagatatggtcattgaattagattcaataactacacctttactaaaagtaacttcgctgactatatccttggaatcatttgaaatcgtgaatccaaaatacaagactgaaggaaaacgaatggggagtaaaccaaaggggaatgccgtctacgaaaagcattttatttgttttgatgaatgtaagtctgtatcggtaaaattacttcctccaagatcgcccacaagtcagattactgggcagttcaaaacagatgtctttcaacataaatggatgataggcctaaaatttgcaacagttgcaaagacgaataatatcactctaaatcaattttacgaagataaaaagggcgttctgtttcattcaaaagagacgttagaaggggaagaattttcttgctacgtccctgttcctatactggcttcatctgaagatttcatgggatggtaa

SEQ ID NO: 486 - DNA, 1128 bp, Saccharomyces pastorianus
atgcttaggtatcacatgcagggcttcagtggatatggtgtccaatactcacctttcttcgataacaaacttgcggttgctgctggttcaaactttggcctggtcggaaatgggaaactgtacatactagaaattaaccgtgatggtaaaattgaagaaaggaactcatttttaacacaagattgtttattcgatattgcgtggaacgaaagtcacgaaaaccaagtactggtagcacaaggagatggcacattgcgtctatttgatacatctttgaaagagtaccccattgctatatttaaagagcatgaaagggaagtgtttagttgcgattggaacttggtcaacagacaaacttttttgagcagctcgtgggatggatctataaaaatatggtcccctctaaggaatcaaagtttgatgagccttaccccacggcctttagaaattacgaaaatggtagacccattgaatgcaattttgtcaaataagaaaaattttactggcatatctaagaataagaattgtgtataccaggcacagttttcccctcatgatcaaaatttggttatatcctgttcgggaaattcatacgcaagcttattcgacatcagactaccgcctagcaaaagccagaccaactttttagtacattcagggctagaagcactgacgtgcgatttcaataaatacagaccttatgtaattgccacgggcggtgtagacaacgctgttagaatatgggatattagaatgttaaaaacaagtggatccgccaccaccagcagacctacgcatactccgtctcacaatgcagcatgcattaacgaaattcccaacgcacatgggctagcaattagaaaagttacttggtcaccccaccattccaatattttaatgtccgcttcttatgatatgacctgtcgagtatggaaagacctaagtaacaatggcataaaagaaacttacaagactaactctacagataccggaaaaggctgcctctttaatttcacgcagcattctgaatttgtttttgggattgattggagcttatggggcaagccaggatatgtagcttcaactgcgtgggatggcaatttgtttgtgtggaacggtttgggctaa

SEQ ID NO: 487 - DNA, 1806 bp, Saccharomyces pastorianus
atgaaattctctgctgttacattcgccaccaacgcgtttcttttctatagctcaatggtaagtgccgactctctagcttcctcatccctaacagctggtgataattacgttaaaatcagttttcaaaagaagtatggtgattcttttgaagacgcttccaataataaaaaaaccgaagcgcatttgatgaagagaggagacgattacgaggtggtaggattgaacaacaaggaaaacttttattcggtggacttgcatatcggtactccctcgcaaaagatcactgtacttgtggacactggttcttctgatttatgggttacaggctcgaataacccatactgttccaccgagagcggggacacatccgattattcggtggaacaaaaagatagcttagaaagtgtaattcaaagcatggttcaaagcgtggtccaaagcgtggtcacggaaattagctatgacaccaccgtacctgacacggatgctactgccactcaagacagtacatcttctgctttacagacgattgattgcaccgagtacggtacatttgatagctccaactcttctacttttcaatccaataagaccgatttttcgatcacctatggtgatttgacctttgcctctggcacgtggggccgtgatcaattgaacttgaacaatttgaacgtcactggtttatcgtttgctgtggcaaatgaaacaaattccaccgtcggtgtcttgggtattggtttaccaggattagaatcgacttattctggtgctactctcagctctgcacaagaaagctacacgtacaataacttcccaatggttttaaagaattcaggcgccattaagtcaacagcttattctttatttttgaacgaaaccaatgccaagcatggtagcattttgttcggtgctgtggatcatgggaagtattcaggcgatctatacacaattccgattatcaatacattgcaacatcaaggttacaaggatccaattcaattccaggtcactttgcaaggtatcgggctagcaaaagaagatacaaatgctgaatcaacgactttaacaactacaaaggtgccggctctactagattcgggcaccacaatctcttatatgccagttgagctcgtcgaaatgtttgctgacaaagtcggtgcttcttattcctccgaaactggttactacttgatggattgtatcaccgacactgataatgacattaacgtcgtgtttgattttggcggattctacattagtggtaatttgagtagttatcaactaagcgctgacagtagttcggatatttgcattttgggctttgctcctcagtccgattctaccgttattctcggtgacaactttttgagtcatgcttatgtagtatatgatctggataatatggaaatttccatggcccaagttgacttgagtggtagagatgagaatatcgatatcatagaagactctgttccaagtgccgtcaaagcacccagttactcaaatacctggtccatggacgaaagtatcgtttcaggtgggaatatctttacaataacatctggctcgagtatccatagctctggttcaggcacctattctacagcaagtacttccagctccaaaggtcaaaaagaccagacaagtaccacttattcaaagtctggagtcggttcggctgcctcctcaacagtggcctcgtcatccacttcaaactcttctacaaaaaaagagaactttggatacagcctaaatactcccttctttgccaagttcattacagctgttctttcttacatttga

SEQ ID NO: 488 - DNA, 1647 bp, Saccharomyces pastorianus
atgtcttctaatccagaaaatactggtaataatgctaataataatgcgaatgctagtaacactggtgtagccgcagcacctcagcagaatatgatgctgcaacagaaacagttgctggaaatgacggtgaaattcaaggcgttggtcagtgaagcaagaaatgtaggtgagactactcctaggggcaaagagttgatgtttcaagccgcaaagatcaaatccgtgtacgatgctttcaacagaagaagacagcaggcggcacaagcttacaagaatgcttctgtggggaatgcaaaccccaatgcaggtaattcggcttctatgcctactgaaaaacctccgaatttatcccagcaacagcagcaacagcaagcaaggagtaacagtaataaattcagtaatatgataaaacaggtgcttacctcagaagaaaaccaacagtatgaaaagctatggcagaatttccaggctcgtgcaacgagtatgaaggagaaagatacgtttttgaaacagaatatcgacagattagtacaagaagtaaataaacagacagatgaagcaacaaagaaacagctagaagacaagaaaaatgaacagcttaataacaggaaagtacttggaattgaatataataatttacttaagggatttcaaaatagcaaaaagacattctatgtagaatgtgcaagacataatccagccttacagaaattcttacaggaaagtactcagcaacaaagagtacaacaacagcatcttcagggtcaaaaccaagtgaagagcactgttgtccattcttctgatatgccctctgcagctacacccgacgcatcgaaaccgcagcaacagcagccgcaactacaacaacaaaagcagcagcagcaacatcaacagcagcaaccgcaacaacaaccgcaacaattgcagcagcaaccgcaacaacaacaaaatgtcattccttctgccactactcctagaccaaacgtaaaggctccacaaggcgatcaatcaaaaacgaaatcgcaagttactaacgtaaatgcaacagcgtccatgatgagtaatgtaagttcaagtaagtcagcaatattcaagcaaacagaacctgccatacctatatctgaaaacatatccaccaaggcgccagctccggtaccttatagatccaacaggcctacgataacggggggctctgctatgaatgccactgctttgaatacacctgtaacgacaaaattaccaccctatgagatggatactcagagagttatgtcaaagcggaaattgagggaactagtgaaaactgttggaattgatgaaggtgatggtgaaactgtcattgatggcgatgtagaagaattactcctggacctggcggatgattttgttacaaatgttactgcttttgcttgtagattggccaaacataggaaatcagacaatttagaagcaagagacattcaactgcatttggaaagaaactggaacatcagaatccctggctactcagcagacgaaataagaagtacgagaaaatggaatccttctcaaagctataatcaaaaattacagaacatcaattctgataaggtagcgactgcaaaaaacaataacggtagcattccaaacctcaatcccaaaaaatag

SEQ ID NO: 489 - DNA, 1356 bp, Saccharomyces pastorianus
atgctttccagagcaactcgtactgcgactgccaaatacctagtaaaatctagagtagcaagaaacgtcttggctgcaccctcagtcaaaagacatgcttctacaaccgtatttaaacaagccaacaaggtccagtccctgggttcaacatatgcctttggcgcaagatccaagttccccacaagcccattctttacatctgccagccgctttaaatccacctctattgaggtgccccccatggctgaatccttgacagagggttctttgaaggagtatacgaaaagcgttggtgatttcattaaggaagatgagttgctggccactattgagactgacaaaattgatattgaagttaactcgccagtatcgggtaccgtcactaaactgaacttcaaaccagaggacaccgttaccgttggtgaagaattggcccaggttgaagctggtgcagctccatctgaagggtccgctccaccaaaggaggaatcaaaggaaacacctgcatcatctcaggaggccactccaaaggaagctcagaagcaggagactgctccaaagaaggaagctgctccaaagaaagcggccgaaccaaaggatgctgttacttcaaaggctaacgaaactccagctgtctccagttctttcacaccattcccacgcacagaaactagagtcaaaatgaaccgtatgagattgagaattgctgaaagattaaaggaatctcagaacactgctgcttctttgaccacattcaacgaagttgacatgtcggctttaatggaaatgagaaaattatataaagacgagattattaagaagaccggtactaaattcggattcatgggtctattttctaaagcctgtactctagctgctaaggatatccctgccgttaatggtgctattgaaggtgaccaaatagtttatcgtgattacacagatatatctgttgctgtggctactccaaagggtttggttaccccagttgttcgtaatgcagaatcgttaagtgtcttggacatcgaaaacgaaattgtccgtttgagccataaagcccgtgacggtaagttgactctcgaagacatgaccggtggtactttcaccatttccaacggtggtgtttttggttccttatacggtactcctattatcaattcaccacaaactgccgttttgggtttgcacggtgtcaaggaaagacctgtcaccgtcaatggacaggttgtttcaagaccgatgatgtacttggctttgacttatgatcacagattactagatggtagagaagctgttactttcctaaagactgtcaaagagttaattgaagatccaaaaaagatgttgttatggtaa

SEQ ID NO: 490 - DNA, 996 bp, Saccharomyces pastorianus
atggtcataaatcttgccatgactaacaattactaccttaacattcgaaacgctaattcagcgtcaactactacatcctctatattctccaatttgaatgaaaactacgaatcaaaaattaaagaaattgaagattactatataaagacgctacttaatgagaataacgacaatgatgacgacggtaatgacgacggaagtaccagtgatgggcgtaatataaatgaaacggacattctgagcgaatcttctccaaggccttccccttcgttgccttctaaaccgaactgttatcattcattggcagatttcaaagatttgatcatatctgattctaagcctatagatacattgtactctgccaatctctttgcaactagtaacaatatttcattaatcaattctaccgagaaaaagcacaagaagaggttgctcgaggtagagatcaacccaacttatacaacaaatgcatcttcattacctttaaccacagaaaatttacaaaagttatcacaactgaactcaccgccaaatggattaccatatgtactcccaattcagaaaacaacaaatatagaaccctctacaacctcccccttgcaagagcctcaactagttaataaaaccttatacaagacggaactgtgcgaatcatttaccattaaaggcttttgtaagtacagtaataaatgccaatttgctcatggtttaaacgaactaaaattcaaaaaaaaatcaaacaattatagaaccaaaccttgcataaactgggcaaagttgggctactgtccgtatggtaagcgctgttgtttcaagcacggcgatgacaaagacgtacagatataccaaagtgctaccaatggctcaagtaacggtgcggaagttgatgtgccctcctctatcacaactttcatcaacaataacaacaccaccaatttgactaagcccaaaaatttacatactagcgttaaagcattgcaaaggatgacttggtag

SEQ ID NO: 491 - DNA, 819 bp, Saccharomyces pastorianus
atggattataaagaagagcagacacaggaattagaagttctagagtcaatttaccctgatgaactgaggatcacaaacgatgagtatccaaagatcaaatttgaggtagacattaagttggagctggatacgggtgaatccacctcacctttgacaaaggagcacattataactgcaaagttcaagctgccagaaaactatccagatgaaccatgcactatctcattagaagcgcaggaagtcgccctcaatgaaggccaggaagatgaagacgaagaggaggatgaaaacgaagaggaagaagaggaggacgagtatgatgacaacgggaataagatactgaagaagttccaaaacctgcccgatacggttagttttaagggatacctacccgaattaacggtaaagttggaaacacaaatcgaaacggacatgttgctgggcatgcaaatgtgttttgctcttatttcgtcgataaaggagaattgtgaacaatggtacagcgaggaattgggcaaactggaaaaacaacacgagtgggagtctcaagagcgtgaaaagaaggaacaagccaagttccacggtacgaaggtaacaagagaaacgtatttggaatggaggtccaacttccgcaaagagctgaaactggatgaaagagaccaggtaagaagaacgaaggcccaccatgggaagctgaccgggaaacaaatgtttgaacaaggtgtggtgggcacaggcgacgatttcatagaggaggatggcacgagtgtggacgatgtgtccaaggccctcgccgataccgaactagtaaatcaatga

SEQ ID NO: 492 - DNA, 1200 bp, Saccharomyces pastorianus
atggactcgttatcgaagaagattcagaatctaggcatgcacgacattagaaacgccgcaaggttcgcccaaaacgtgattgtacaatacgaaccctaccaggtagacatccgtcgtgccaccaacaccgatgcctggggccccacgccaaagcatctggccaaagtcctaagaaacaggtaccaggtaccgctatacttgatgaccgaatacaccctgaaaagactggtagaccatatcgccacgagacccaagaatctgtacgaaaaggcaagaaaggactacgtcaactacggatctgaatggagggtggtcttgaaatgtctggtagtcgtcgagttcttgttactgaacgtcgacaccggcgacgaactaaatcaaattagatcttgtttactcacccacaaacacatactgactagagaaattgcccaattcaagttgaagttctcgaacgatggtaagatggaagttcacgaaagagggattaggaaaaagggtgaattgatcttgcagtacttggaagaccctcaatttttgaaaaaggaaagagccaagaataagaagaacgccttgaagatccgacagcaaggggaatcctccatttacaacgccaaccaaatctcctcttccgccaactacgatagcgtggacgatgaagggtttgggccggacgctgatgggtccgacgatgaagtagacgccaacaacgtcactaacttcaacgttcccgtggaaacagaagcgggctcgagcactcgcaggcgttctcacatggacgaacaaagaagacaaagaagagaaattctcagagaacagatcaaaaacaaagaacagcaaaggaaaagaaaacaacagcaagataacatacctgatctgatcgacttcgatgattcgaccaccacaaacagcaatcacaacactaatgacgacgacgaagacgaagacgacgaattcggcgatttccagagcgaaacaagtcccgatacaacagcgcccagaacaaccggaggacaaatcgatgacctgctagactgggacggtccaaaatcaagcgcggatatcactgccgccacagaaacgtcactgcctattgtcgaaaatacgcaaccaaaagcccgccctcaagctacaaaggacaagaccaaaggcaacgacgccttttccgaccttttctcttactccaagtcattggtctag

SEQ ID NO: 493 - DNA, 489 bp, Saccharomyces pastorianus
atgtcccaagtttattttgatgtcgaagctgatggccaatcaattggccgtgtcgttttcaagttgtacaacgacgtagtcccaaagaccgccgagaacttcagagcgctatgtaccggtgaaaagggtttcggcttcgccggctcccccttccacagagtcattccagacttcatgctacaaggtggtgacttcaccgccggtaacggtaccggtggtaagtccatctacggtggcaagttcccagatgaaaacttcaagaagcaccacgacagaccaggtttgttgtccatggctaacgccggtccaaacaccaacggttcccaatttttcatcaccaccgttccttgcccatggttagacggcaagcacgtcgtcttcggtgaggtcgtcgacggttacgacatcgtcaagaaggtcgaatctatgggttctccttccggtgccaccaaggctagactcgtcgttgccaagtccggtgaattataa

SEQ ID NO: 494 - DNA, 1098 bp, Saccharomyces pastorianus
atggctggaaaaaaaattgctggtgtcttgggtgccacaggttctgtgggtcaacgtttcattcttttgttggctgaccatcctcatttcgaattgaaagtccttggggcctcttccagatctgccggtaagaagtacatcgatgccgtcaactggaaacagaccgacctgctaccagagtccgccaacgacatcgtcgtttccgaatgtaaatccgaattcttcaaagactgtgacatcgtcttttctgggttggacgctgactacgctggtgccatcgaaaaggaattcatggaagccggcatccccatcgtgtccaacgccaagaactacagaagagaacaagacgtgccattgatcgtccccgtcgtcaaccctgaacatttggacattgttgcccaaaaactggagactgccaaggcccaaggtaaaccaagaccaggtttcatcatctgtatctccaactgttctaccgccggcctcgtcgcccccttgaagcctttgatcgagaagttcggtcctatcgacgccttgaccaccaccactttgcaagccatctcaggtgccggtttctcccccggtgttccaggtatcgacatcttagacaatatcatcccatacatcggtggtgaagaagacaagatggaatgggaaactaagaaaattttggccccattgtccgaagacaagacccaagtcaaactattgacccctgaagaaatcaaggtctctgctcaatgtaacagagtggctgtgtctgacggtcacacagagtgtatctctttgagattcaaaaacagacctgctccatccgtcgagcaagtcaagacatgtctaagagaatacgtttgtgatgcttacaagttgggctgccattccgctccaaagcaaaccatccacgttttggaccaagccgacagaccacaaccaagattagacaggaacagagacaacggttacggtgtttccgtcggtagaatcagagaagacccattgttggacttcaagatggttgttctgtcccacaacaccatcatcggtgccgctggttccggtgtcttgattgccgaaatcttattagcaagaaacttgatctaa

SEQ ID NO: 495 - DNA, 3939 bp, Saccharomyces pastorianus
atgaataccgaattcggctcaatagtgccttccgctaattttggttttttcaatgggcctactaataaagatactacaaatgtcaatgccaatgccaatgccaatgccaatgccagcaacaacaatttctttctaaacggcaatagtaattctaatggcacggattcttcgaaaaacgccttcatgataagttccgttgcctcatggcctaaatcacaacaacagttgcaggatcacttaccttcaccatcgcatacagggaaagcacctgaccaaaaaaagaaatatatgattaatgaccaaaataccatacagcttataggtcccttgattgcttctcctgagagtgttggtttccagaaaaaaccacacaagcctagagaattgccgagattcttaatcaaccaggaacctcaattggaacagagaaaattcgtacaagattcctgggatgaggccaatcaacaaaagatgttaaccttggaagaatccatcgacgatctgaacgaactatatgaaactttaaagcaaatgagaaataaggagcgttcaataatggagcacaaaggtctcgtagacaaggctgattcagcaaaggatctttacgacgcaatcgtatttcaaggtacatgtcaggatatgtgccccatttttgaaagatcaaggagaaatgtcgaatatacagtcttttcatatgaaaaaaatggaccaaatgataaaaaggcttccaggactagagcactaaaggttttcgcaaggcctgcagctgctgctgccccccctttgccctcagacgttaggccgccacacattctagttaaaacactggactatatcgttgataacttattagcgacattaccagagagtgagggtttcttatgggacagaatgagatctataagacaagattttacataccaaaattactcaggacctgaagcagtagactgtaatgaacgcatcgtaaaaatacatcttttgattttacatgtcatggtaaaatcaaacgttgaattttcacttcaacaagaattagaacaattgcataaatctttaatcacattgtcagaaatatacgacgacgttcgttctagtggcggctcttgcccaaatgaagctgaatttagagcttatgctcttttaagtaagataagagaccctcaatatgatgaaaatattcaaagattaccaaaacatatcttccaagataaaatggttcagatggctttgtgcttcagaagaatcatttctaattctgcatatactgagcgtgggtttgttaaaactgaaaattgcctaaatctttatgcacgatttttccaattgatgcaatcacccaacttaccattgttaatgggatttttcttgcaaatgcatttaacagaaattaggttttatgccgtgagagccttatcacatactttgaacaaacgtcataaaccaattccgttggtctatctagaaaatacactgcttttcaacagtcgacaggaaacgattgaattttgtaatcactactcaattgaaatcataaacggagattctgctgacttgaagacactaacccagtattcacataaactagcagaaacccaacctttaaaaaaaacgtacttaaactgtttagagaacagattacaagaaacgagttataagagtttgatcaattgtggtaaagagaattttgattcactggctgatgtaaaattttattcaagaagtgtaaaagcgttatctactattgaaaagcctttctttcaaacagatacaaagaataactccaaccagatactcaaccaaagtagtctttttggatcgaaaaattctgctccttcaaagataagcactacccatcccacggtgacttttttcccacaacaagctaaacaatcacctcaagtatctcaatttcaattttcaaaaaataactctccgttgactcgaacagatcctgcatttcaattagagcaaaaacaacaacaaactaatggtacggcagataaaaactctcgaccagttaatcaattgttaccgagctctgaagcgcaaatttcaggacctgaaaagatatccacgaccgatattgatacagaagatgcaaagctggaacgcgagagacttagagaagaaaaaatgaagaataaagaactagaaagaatagaagcagaaaaaattcgcctaaacaaacaggaagatgcgaacaaacaaaaagttgttcagcaaattacagatgaactaataagagaagtagttaacaataatgcaactgaaattgttaaacgagagctttcagaagtttatcacaggaaaaagctcattgatacgatgtcgtatgagctttatgatgcatttattcatgaaagattatatcttatatatatggattctcgcgctgaattaaaaagaaattatgcgctaatgaaacgttactttaagaagtggaaatcatcttactctcacttaaaaaataatcgcgcaattgaagagcgaaagaaggaagaaatcgaatttgtgagccaccaattaggagtaccaagctttaaaaagcccactcgtttattgagaactccatacaagagtaatgtagattcgtcatttagattatcatcttcagataagaaaaatataaccttctcacccgtcaacgatgaattcaacaaatttgccacttttttaacgaaaacctcgaaattatgggaaccgttagatctgaagtcaatctattatgataaaatgactaagaaatttcccacaaatcttctcactcccgcaaatatttttatttacgctaaagattggtcatccctctcgaatcgttggattttgaataaatttaatttgcaaacgatgcgggattcaaaggaatttgagaataacattatttccagcaagatcagctgcattgatgataactatgaaccatctgattttagtgacttgcaattattgatcttcaatacaggtgttacaaatcctgacatattcgatttagaaatgaaactgaaggacgacggtgaggaactcatcaaactaatcactggcgtttccctaaacactaatatatgcttttgtcttctgattatttattgggaatctgcggagaatacgctatcggaaggtactattaaacagtccctaaaactaaatcggatatctaaaaactataacagtgttattgagcgtatcgacctgatgaatctcacggaggaatcccctcataaatgtctggaagagaaactatctgagatctctcagtcatatatttattacttgacggagagaggaaaatacaataaaacgcttcgtcaaaagaggtcattggccggaattcactcacgcaactcccaattacagactacaaaggatatagatgaaaagatggagacaatgctagaaaaagaaaaaaacaaatatcaacagcaaatgggcgaaaggaatacttatgcacatttagaatctcatatatctgcatcgcctagggtcaaaaaaagaaagctgccaatactcctgtcgtcgtcacactcaagtgaatttaaaacacctttggcttctagactaaatacgtctggcacctcaacgtcaccaccactaccatctcatctggcaataaaattcaggaaaaactcaaggataactagtttgcatactgtactaccagttagcacaccaagtcacagcaccaatttaccagctgcaagttcggacgctacggcaacaacagatatacagtcaactagaaattcaagaaatgctgtaggacttttaagcagtgcctttgaaggaatatcagaaagccactcaatatgtcagacaccaataaacacttcagctcctgcgtcggagggctgtgataaaaatatagatgatattcccgatagtatattagaactcaagatcttgatcgattctgtgaagaaaaaagtaagtaatgaatag

SEQ ID NO: 496 - DNA, 2556 bp, Saccharomyces pastorianus
atggcttccagcaatgaagtatatggcctatttccaaacgaaaacaacatccaagttacagactctcattcacaggggcaagatacctcttccagcattgttaagaacgataccgaccatacaacaagtatatctgatagtatagacactggaatcttaaaatgtattattgaagaacaaggatggaatgacgctgagttatatagaggtgggattcaaaaccaacgattctttttgacggatagatatactaaaaagaaacatctgactataaacgacatgattaattcagaagaggaacaaacctaccaagaacccattcaagattttgaaacttataacaaacgtgttcaaagagaatatgaactcagggaaaggatggatgaattattccgtcagactactaaaaatggtgtacatattttaaacgaagattcgctaaaccaacagtattcaccaatggggcctattaatgattgtcagccgcccgacaggtactctagaatgaaacgtatgacttcgaccttcttcaaaagaaatcttaatttcggcggagaattgaaaagaagaggtgataacgtcaacgttgtcgatcatgtcaagggcaacagttctatatcgacttccggtaccgacgtaatcgataatacaagctacagaaatattgccatcgacgaaaatgtagacatggcctataaagaacatgctattgaagaatttaatgtgcaaggtttatctggtaatgaatctactgcagaaggtgggtcattactgcacgacattgaaaaagtatttaataggtctagagcaactagaagataccacgtccaacggaaattgaaagtgcggcatatccaaatgctttctattggggcatgcttcagcgtcgggttgttcctgacatcagggaaagcattctctatcgctggaccatttggtacgttacttgggtttggacttactggtagtattattttagcaactttgctgtcatttacagaactatctacccttatccctgtatcatccggattctctggattagcttctagatttgtagaggatgcttttggttttgcattgggttggacatactggatttcctgcatgcttgcccttcccgcccaagtttcttcaagtacgttctacctcagttattataatgatgtaaacatatccaagggaacaacggcagggtttattacgctgttttcagcgttcagcattgtggtaaatttattagacgttagcatgttgggtgaaattgtttatgtcaccggtatcagcaaagtaatagttgcgattttaatggttttcacaatggtgatactaaatgctgggcatggaaacgacgttaatgaaagagttggctttaggtattgggatagttccaaatctataaaaaacatgacttacggattatatcgtcctacctttgatttggcagatgctggagaaggaagcataaaaggcattcctgggcccaaggggcggtttttagctacagcttcggtaatgttgatttcgacatttgcatttagcggtgttgaaatgacgtttttggccagtggagaagcaataaacccaagaaaaacaatcccttctgctatgaagagaacgttttccattgtattgatatcttacatgtttttgattttttcagtcggtataaatatatacagcggagacccaagattactgtcatattttcctggtgtttccgaaaagaggtatgaagcaattgttaaaggtatagggatggactggcgacttaggaccaattgtcacggtggtgtggattatagacaaatttcagttggaacaggttactctagtccctgggtggttgcactgcagaatttcggattgtgtacgttcgcatccgctttcaacgcaatattaattgtttttaccgccactgcgggtataccgtcgttatttagttcttcacgaacattatacgccatgtccgtgcaacgaaaggcaccatccgtttttgaaatttgcgataagagaggtgtaccatatgtatctgtgatattctcttccttatcttcggtcattgcctatattgcagtcgatcaaaccgtcattgaaaattttgatgtcttggccaatgtttctagcgccagtacatctattatatggatgggattaaatctttcgtttttacgattctattacgctctaaaacagagaaaggacatcatatcaagaaatgattcatcgtacccgtataaatctccgctccaaccctatttagcgatttatggtctaattggctgttcattattcgttattttcatgggatatcctaatttcatacaccgtttttggagcaccaaagcctttttttcagcatatggaggactgatgtttttctgtgtcagttacataacatataaaatatttggaacctcaaagatccaaaggctagatcaattggatatggatagcgggaggagagaaatggacagaacggtctggaccgaacacagtcaatatttaggaacgtatcgggagagaatgaagaaactgctaacatggctggtctag

SEQ ID NO: 497 - DNA, 1164 bp, Saccharomyces pastorianus
atgagtgaactagaagctaccatcaagcaagccaaagaagctctggctgaaaataatgccaaaaaagcactaaaaatattgaaaccgttcaaaagttcactaaagaaagaaaatgcaaacaatgtgatactaaacgaagtatttgcggaagcgtatttggataatggccaagtggaaaaagcctatcccattttagcacgtgcttgcgaattagattcagaagggcaagttggtgggccaaacaagtttttcaccatgggtcaaatcataggtggacaagatggtgtttcaataataactcgtggaatagtgagtattttcagtattgctggcgacaaattaacaaatgatcaagttgaaaaaattgttggtgggctactttctatgattgagatatggatgactgatttgtgtatggaacaaaatgcagaagaacagtgtgaggagttaatacagagagctatggaactcacagatggaaaatcccctgaaacgtggtccactttgggttcaattagaatctctcaacagaaatttggtgaagcgtatgaagcattctcgcaggcttggaagttctttgacctaagaaaacaagaaattggtgatggtataaatgaaaacaatagcgtagcccagactattggcttgcagtcagagtttatagatcttttacaacctttcttatctttggccaagatgtgcctcgaagtgggcgcatatgaggtcgccttaaaggttattacggcagtaagagatattgacgaagataacatagaaggatattacctggaggggtttacttattatttgatgagtaaattggaaatcttcaagctaaaaaaccctgaagtaaatctcaatccagaaaatatatacgagttcaaccaggttattcaagaagttccattagacttatccaacgaattgattactcaatttgtctatgattctcgtttagcattgagttttgcattacaaatgggcattaatgctgatagcaaggatgaagttgtacaagaattattgggtggtgcaaacgcgttgcttcaagagatcggaggacctgtggattcaaaagaattgtcacgagttaagaagggagaaacaatcaatgagaacgaggattttcaagagttggatttagtggaggatttttctgactag

SEQ ID NO: 498 - DNA, 729 bp, Saccharomyces pastorianus
atggaaaatatagaaacaactgcacatgaagacactaatatcatcaagactggtctaagaaaacaaatgggccttctcaatgaaacaatatcaaaaaatgagagcgattcagcagtggtacaaaaagaagataatgattcgatggaagatactggggccgctacgataggttatatatcaattaaagactatgcatacgaggattcaaatccgctccattatggttattttgatggagacaatgaagaagatgaaatggcttctgattcttcagatatggatgacggatataacaaaaggcaaagtatagcgctacccgacgactacatagttaaccagcgtgcggttgccctctacgatttcgaacctgagaatgataatgaactaaaattgacggaaggtgatctggtattcatcagctataagcatgggcaaggttggctagtagcagaaaatgagtcaagatcaaagacgggactggtaccggaggagttcgttacctatatacagccggaagatggagaggaagaaaaagaggacactgctcgacctttctatctaacgcatttgattacacaaagtgtaaatcctggaaacaacaataatgacattgacgacgacgatgatgacgacgaggatgacgatgatgatgatgatgaatgggaagatattgatgatgttgccgaggttgaaacagatataaaaacaaaactaaaaatatcggattga

SEQ ID NO: 499 - DNA, 519 bp, Saccharomyces pastorianus
atgacgacatcacacagaccacagttagaggcaagaagtggtgcaaaagctgccgcatatactccaacaagcattgaacacgcaagattactaccaggacacacgaaattgaagtataggaagttcaagcaagatataaagtgtaaagaaagttgttcacaaggcgaaggaagtagcgatggcagtgtagacgagaggcaaattaacgaagacgaacaagacgatgtggaggatgagaatcttgaagagagtgaggatgaccaggaagatttgctgaaggaattagcgaagatccaagaggctaagttggacaagaaaatacggcttcagcaaaaggagaaaatagaagaacagccgtccaaacgatcttggaggcaaagcacggcgtttggacgtcataaaatcacaaaaataacaaacagtaatgacgatggtgcaaaaaatccactatctggatacgttaatgatatgacaaaatctaaatatcatcaggaatttcttcacaaaaatattaaataa

SEQ ID NO: 500 - DNA, 2175 bp, Saccharomyces pastorianus
atgtcggatttgattgaattacagaggagctacctattaggggttttaaaccagatcgaaacaaagaacaacttaaagtttcttatcatcgataaaacagtggagacaatactaagttacctgttcctcacacctcgagaattgctaaacaatgttacttctgtagatctgatcgattcacctactaggaagggtcaatcttccattgacgctatctacatattggagcccaccaagttcaacatcaattgtatcgacgctgactatatggtgagaccccccaaatacagaaggtgccatattaggttcttaccggggctaacgaatcccatatttcagttcttccaatcaaaacgttacattggccaaaaccttgactcattcaagcccattgaattggggtttttcgttaaagaagctcaattgttccagactttacaaatggaaaattcgttgcaggtttttttcaataagaactgccaaggtctaattcctactaatgtgaggaagattgtgggctctttggtgagcttatgtgtcattactggagaatatccgattgttagatattccgaaccaaatcttttagatgaagaagatgctcgtgactcaaatcccgtggcaggctcaaattctttgaccaggtccattgcaaatgcctttcaaatagcaatagatacctacgctcgtaataaccccgaatttcctcctcaaaatactgagaggccacgttcaattttgatgataactgatagaacattggatccctttgcccctatattacatgattttagttatcaggcaatgtcttacgacttggtctcaaacgtggatacacaaaaggatacataccactattttgcagagaatgaagccggtgaacaagaggaaaagactgcgaaattagtagatctatctgatcctgactgggttgatttaaaacatcagcacatcatggatgcgaatgagtacattcaaggtagaatcaaggaactaatcgccaaaaatccgctgttggttgatagatcaaacgttaaaaatactaccgatttattaagtgtggtggcacacttaaaagatttcgacgaggaaagaagaagactgattttacataaaactttaattgatgaatgtttaaaagaaaatgcggagagaaaactggctgatacgtccactattgaacagagcctttccggattcgggttggattttaacggtgaaaagacaagacatatcattgacgacctcttaccttctttaatgatgaaggagccaaaaacactagataagctacgttatataattgcgtatgctcttttcagaggtggcattattgagttggattttatcaaactattaaattttatcgggattaatcatgaacatgaaaatttccagcagtatctgacaatattcagaaactacagtttgattgattttaaattgattaaagataagccaaaggacaaaccgttccaaaaagaatggttccatgatacgttagtaaatgatccaaatatattccacacttcaagatttgttccagctgtaggaaacatcttgtccaaggtcgtcgcgaatccgttattattgagtgagcaatatttcccctatttaaaggataaaccgattgagctcttgaatgaagaagaatttcaggcaggcttagttaatacttctgccaattcctcctcgtcattaaggaatccacgccataaagcagcttggaccacgaaaaactcgagcttaaaaaaaagcataccaagacaaaggtttttttattacgttattggtggtatatcactttctgaagtaaaagcagcatacggtcaatcaaacttgaaaaatagagatatattcattggtagtgacgagattttaactccaatgaagttcttagatgaagtgaaacatttacaaaatccaagagaattcttcaagtttaaagaagatcaacagcagcaaacgaaccctccggatttccttttgaaagaaatgaaaccagtggcacaacccgtctcccatattcatttgagaagccagaatgatggacccaaaccaggcagttctagtccagctgtagcaggctctccaaaccaagagttgcctgaaaaggaaaagaagcgcagtaaattctcgagattcctgaaaagaaaatcccatcacgataaatga

SEQ ID NO: 501 - DNA, 1338 bp, Saccharomyces pastorianus
atgactgtgattcaccctttgcaaaacacactcacgtctcgtgatggctctctggttttcgccattgtcaaaaattctattctaagttttaagtatcagtcatcaaatcaatgggaacttattggccaatggtctgacgatttcaataaagcccaagaaataaagaagagcgtcactaaagaacagcaaagacaaatcagcgaaaatggtatcaagaacaaaaaattaaaaagcaataaaggcgactcaattatcaagacagaggctaaaattccatcaccaggtattggtgcccctccaatatattcatatatcagaaacctacaactaactccagacgaatcaaagctaatcgcgtgtgctgattctgacaaatcagttttgattttcaatgttgataaagcttctaagacaaacgttttgaaactgtctaaaagattttcctttcccaagagacccaatgctatttcgatagctgaagatgcagccacagtcatcgtggctgataaatttggtgatgtgtactctattgacatgaactctagcccagaagagaaattcactcaagaacctatcctgggccatgtgtctatgctgactgatgtgtgcatggttaaggactctgacgatcatcaatttataatcacaagtgatagagatgaacatatcagaatttcgtactatccgcaatgttatgtcgtagataaatggctgttcggccataagcatttcgtttcttccatatgctgtgacaaagaatatctgttgctgagcgctggcggtgataatgaaatatttgcttgggattggaaaactggtgaaaatttgtccacttttgattacagcgacttgattaagccttatttaaatgaccaacatttggcaccatcgagattccaaaatgaggaaaacaatatcattgagtttgccgttagtaaaatcgcaaaagtaaacaacctaccgtttgttgcgtttttcgtcgaagctacaaaatgtatcataattttggaaatatctggaaaggaaaaaggcaaactgtcactaaagcaaatcatagatttgccatataatgtcatttcattgtccgcacaaaatgacgaattccaaattactttagataatcaaaagtcgcctcaagttcaaagcagtttcgccaaattcattcagtatagtaccaatgatgataaatttgtcatcaatgatgaaaaatcgaatctattcgataaggttattactaaatctttgcaagaagattctaacttgaatgctgaagaagacgatatttatccattgtacaatatcgcttcgttgagaaaacacggggaacattattcataa

SEQ ID NO: 502 - DNA, 624 bp, Saccharomyces pastorianus
atggattttgaggaagaatacgatgccgaatttgacgacaatcaagaggggccattagagacgccttttccagccgcaagcaccgctgacaatgagaaagagcataacgccggtgaagatacatcttcacaaaagaataagaagcagaaaagagaaacagtcgtggatgatgggagtgaaaacccatttggtattcccgaatttacaaggaaggataagaccttggaagagattctagagatgatggacgatacgcctcccatcatcccagatgcagtggtggattactatctaacgaaaaatgggtttgatgtggcagacgtacgagtgaaaagacttttagcattggctacccagaagtttgttagtgacatagccaaggacgcgtacgaatactcgaggatcaggtcctcggttgccgtatccaatgcaaacaatggtcaggcaagagctagacaattactgcaagggcaacagcagccgggagtacaacagatttcacaacaacagcaccaacagaatgagaagactacagccagcaaagttgttctgacggtgaatgatctaagtagcgctgttgcagagtacggactcaatatcggtcgtcctgacttctaccgctag

SEQ ID NO: 503 - DNA, 1521 bp, Saccharomyces pastorianus
atggccattgactactctaaatgggacaagattgagctatcagacgattctgatgtcgaagtgcatcctaatgtggacaagaaatcgttcatcaaatggaaacagcagagtattcatgaacaacgttttaaaagaaaccaggatattaaaaacttggagactcaagtagacatgtattctcatttgaacaagagggtggataaaattttgagcacgctaccagagaaagatttggttgacttgtcagctgttaccaaattcttaaatgcaaattttgataagtcagagaagaataaaggtgaaaatgtggaccctgagattgcaacgtataatgagatggtagaagacctttttgaacaactgtccaaagatttggccaaagagggtaaagactctagggacgcttctcttttaaaaaattctattttaaaacatagagctaaaattgattcagttactattgatgccaagaagaaattagatgaactatacaaggagagaaacgcccacatttcatctgatgatttccacactggatttgatagtagtttcatgaacaagaaaaaggaagaggctgagaaattagaggcagcagcttctagcgctcccaaaagtacatctgactcctctattcttaacaaattagtcaaatcatcgactccacaagcctttatcaaattcgaagatgatccaatgaaattagctgaagaaactgaagagtttggtaagatccatgttaatgaatattctaaatctcagaaatttttgttagaacatttacccatcatctcagaacagcaaaaggatgccttgatgatgaaagcgtttgagtatcagttgcatggtgatgatatgatgaccttacaagtcattcatcaatccgagttaatggcttacattaaagagatctacgacttgaagaaaattccattcttaaatccaatagaactatcaaatgttatcaatatgtttttcgaaaaggtcatatttaataaagataaaccaataggcaaagaatcttttctaaaatcggttcaagaaaaatttctgcacgttcagaaacgttcaaaaatcctacaacaagaggagatggatgaatcaaatgctgaaggagtagagacaattcaactaaaatcattggatgactctactgagttagaagtgaacttgccagatttcaattccaaggatgcacaagaaatggaaaaggttaaagttttcaaaaccttattaccggaggaaatgcagcaagccataatgaccaaaaacttggagaatattaataaggtgttcgaagatataccaatcgaggaggctgagaaaattttggaggtgtttaacgatattgaccttattggaattaaagcgattttagagaatgaaaaggatttccaaaacctgaaagatcaatacgaacagggacacgaagatgccactgtagagaagctgaccataaatgatagtgacaaccggggagaagtacatgaagaagtaaacaatactgctgatacagttgattag

SEQ ID NO: 504 - DNA, 1551 bp, Saccharomyces pastorianus
atgtcagaaaaccaagaggacgtatcgcctcctcaaaatatatcggtcaaatcagagctaaactctaatattttcaacacaaaacctatttctacatcgtcacctgcagggttggcagcggctcaaagggtgactcctgggaaattatccactctattactagaaaagggaccattggccattaggcacatcacgcaaactttatgtctggacattccctgcttcaaagatttatcgtcttcaaagcaaagacgactcataatgagtgcaatggaaagtggcgataaagaacgatcggtggtatttgaaaaaattggttggggccagtggtctgctaaaaaggtagacccagctaattttgataaggagctggaagcgaccaattttgctaattccaaggtgaaagacttaatttctcaagagagtcaaagaagaaaaagtaacaactcaaactcgaattcgggcggccacgttgaaatgccagttagaatcgaacataacaatgctggcattgaccatatcactactcctgctactgccatcggtaatcctgctgctgccattcctgttaatatcaaacgcagtaaatcgccactttcagcagctaacgtggtctatatagatgaaaacgcgcttgcttcggaagatgaggatgaagattttgatgaagatgatcatcatttgcactatcagaataaatcaaggaacagcagtaataattctggaaaggttcctaacaacgatccttatagtttcggtaggaggaggtcgcaagtcgtgtttgctgattccacccctgaaaacattgaacatgaaataatagcacaaaagatcagaccacttctaaggaatagacgccgttccagtataaagccacatacttcgttcatctcgaagttaaacgcgcaccaggactcatcccatctctccgccagttcaacttcaactactataccatcaaacaacagtagtagcactaatcaagggaaagtagatttagagaaaataactgcgactagtgaaccaacttcgagaagagcttcccgtttgtctgtctcgaaagagtcaagcattagatcaactcttttccccaataaaaattatttgatcgtcacgacaaaccctacctcaaaagttacatcagcttctacttctcccaaactagaagatcagataaatttgggttcaagcaatttattgttatcggacaaagaaaagcataaaatgacattgccacacctgaacggcgattcatccccgcaacttcgttcccgttcccatcatcaacctcactctgatacagatgaagaagattgggaatcgattggcgctgcctctttaaggaataacagtttggtacccaatatagatagtgtagcaagttctaccaatggcgtggttagtccaaaacctacaaatccaaattttatcaactctcagaatagagaaaccggatcgcccttacaacacggccagcaaaaacacggccagcagccaaaaaacggtgaagacaacagcgctgcctttttattgatgagtttaaaatcctag

SEQ ID NO: 505 - DNA, 5988 bp, Saccharomyces pastorianus
atgtctgagcagaatccagaactgagttctgaaacaagtactgccggagcacctccaaatgtagagaccacttcttcaaccgatcacactgtagaaccacaccatggcgaaaaggaagggcaagaagaaaaagaggttaaaccggtaaatcatgaagagcagaaacacaaggacgctaaaaacgcatccgagggaaacggggtaaatagtcgtgaagctagcggctcccgagtgtcggacgaagatcctggagatactaatgatgacgatgaagatgaagatgatgacgatgacgaggacgatgacgatgacgaggacgatgacgacgatacagatgacgacaacagtacctcgggttccggctctgaaggaggggaaggctccgaatcaatctcgacagaaagcgctggtgaagacgagggactagaggaaactgatggaaatacatcaaatgactcttcaggtgacgaaagtgcatcagaagaggaagaaggtgacgaacctgttgtctctgaacaagaccgtgctcctatcaacaatactgctgccccatcggcctctcataccagaaatatttcactttcctcaaatggttcacacacaagctcgactataatcttagtgaaaacaactttggaaacaatcttaaatgataaggacatgaaaaaacattcgaatgctcaaaaggctatcgaaaggacactacaaaaatttaaagaattcgatccacaatccacaagtaactcacattacgtcgattcaatactggtttttgaagcattgagagcgagttgccgtaccaaatcttccaggatccaaaacttggccttagattgtctgtcgaaactattttccttcagatctttggacgaaaagctgctagtcaacccccctgattctttagcttccaacgaccaacagcaagatgtagccgatggcataacaccacctccaaagcaaaaaatcatagacgctgccattgacactatttctgattgtttccaaggtgaagggactgatgaacgagtggagttacaaattgtaagagcgctttccagttgcattttagaggaggattcaaattccctatgccatggcgcttccctgttaaaggccatcaggacaatttacaatgtctttgttttctcattgaacccttcaaaccaaggcattgcccaggctaccttaacacaaatcattggttcagtatatgacaaggtcgatctcaaacagactgcctcttcaacattgtctttatcggcaaagaaccaccagcaaccatctaccactgaactttccgaactttccgacaatgtagaaacgccggtgcctttaactttggaaaatatggataaactgaatgacgacgaagaaagactcatggattctcaacaacctgactttaacgccatcactaatcaagacctagcggtcaaagatgcgttcttagtttttagagttatggcgaaaatatgtgctaaaccgctagaaacagaactcgatatgagatcacatgccgttagatcaaaacttctgtcgcttcacattatttactctatcatcaaagatcacatcgacgttttcctttctcataacatcttcctaccaggaaaagaacgtatttgttttatcgattcaattagacaatacttgcgccttgttttatcaagaaatgctgcatctcctctagctcctgttttcgaagtgactttagaaattatgtggttattaattgctaacttaagagcagatttcgttaaggagatcccagtctttttgacagagatttattttcctatttcagaattaactacatccacctcccaacagaagaggtattttttgagtgttattcaacgaatttgcaacgacccaagaaccttggttgaattttacttaaattatgattgtaatcctggaatgccaaatgttgtggagataactgttgattatttaacaagattggctttaacaagagtggaaattactcaaactcaaagatcatattatgacgaacaaatctcaaaatccttatcaacttatgatttttcccagttgcccctcttaacttcctctaacttgtcttctagtcctgatgttggccaaatcaacttactcttccctctagattttgctctcaaaatggtgtcgctgaattgtattgtgtcggttttacgttctttaagctcatgggctcacaaagctctaaatccaaaccaaagtgcttctaaaacagcactgaactcaactccatgtggtcctcaggaatctagatcatctttgaatgatgacgtaaggtcctctgctgtagtaattaatgatgactttagacctacatatgaagatgaagaaagcaagtcactaagcagtcaaaatgttgatacagatgatcccacccaatttgaaaatttgaaattaaggaagacagctttatcagaatgtatcgctattttcaataacaaacccaaaaaagccattccagtgctcattcaaaagggatttatggaggatgactccgcaacctctattgctaagtggttactagaaacggaaggattagacatggctgccattggtgattatttaggtgaaggtgacgacaagaatattgcgataatgcatgcatttgtagatgaatttgacttcactggtatgtctattgtggatgcattgagatcatttttacagaaattcaggctgcctggtgaaggccaaaaaatcgatagattcatgctaaaatttgcggaaagatttgttgatcaaaacccaggaatcttttcaaaggcagatactgcatacgtgctttcgtactctctaataatgcttaacactgatttacattcatcacgaatcaaaaataagatgtctttacaagagttcttggaaaataacgaaggaattgataatggaagagatttacctaaagagttcctggaaggcttatttaatgaaatcgctaaaaatgaaatcaaattgctttctgaacagcatcaagcaatgctttcaggcgacaccaatgttgttcaacaacaacaacaatctgctttcagttttttcaattctcgtgacttaacaagagaagcgtacaatcaagtctcaaaggaaatatcatctaagactgaactggtctttaagaatctgaacaggtcgaaaaacaaaagaagcccagatatttattatgctgcctctcacgtcgagcatgttaaatcgattttcgaaacactttggatgtcctttttagcggctttatccccaccatttaaggaatatgacgacactgatactacgaataagtgcttggagggtttgaagatatcgataaaaattgcttctactttcagaattaacgatgctagaacttcttttgtaggtgctttagtccaattctgtaacctccaaaacctcgaagaaatcaaagtgaagaatgttaatgcaatggtaattcttcttgaagttgcattatccgaaggaaattacttggagggatcatggaaggatattttactagtagtgtctcagatggaaagactacaactgatatctaagggtatcgatagagatactgtcccagatgtcgcgcaagctcgttttgcaaacccaagagtttcttatgaatcatcaagatctaataacacatcgctttttgatgtttggggcaagaaggcaactccaaccgagctagctcaagaaaaacaccataatcaaaccttatcgcctgaaatttcgaagtttatctcatctagtgaattagttgttttgatggacaatatatttactaagagttcagagttatcaggcaatgctatcgttgagtttatcaaagctttgactgctgtatctcaagaggagattgaatcatctgaaaacgcttctactccaaggatgttttctttgcaaaaaatggtcgatgtttgttactacaatatggatcgtattaaattagaatggactccactatgggctgttatgggaaaagcattcaataagattgctacaaactctaacttagctgttgtattttttgctatcgattctctacgtcaattgtcaatgagattcttggatattgaagaactgtcaggctttgaatttcagcacgactttttaaaaccatttgaatacacagtccaaaacagcggtaatactgaagttcaagaaatgattatcgagtgttttagaaatttcatcttaacaaaatcggaaagaatcaagtctggttggaaaccaattctcgaatctttacaatatactgctcgctcaagcactgaatccattgttttaaagacacaactgttagttagcaacgatatcgtgaccaatcacttcgaagatgtattctcccaagaagatgccttttctgaattggtcggtgtctttagagaaatcaccaaaaataagagatttcaaaaattatctttacatgctttagaatcactaagaaagatgacacagaatgttgcggaaatctgcttctacaacgaaaataaggcagaggaagaaagaaaacataacattgctttgctgcgtgggaaagacatattccaggatgtatggttccctatgttattctgcttcaacgacacaatcatgacagctgaagatctagaagtcagatcacgtgcgctaaactacatgttcgatgctttagtagcatacggtagtaaattcaatgatgagttttgggaaaagatttgcaagaaactacttttccctattttcggtgtattatcaaaacattgggaagtcaatcaatttaatagccacgatgacttaagcgtttggctatcaaccacattgattcaagctttgagaaatttgattgcccttttcacacattacttcgaatcattaaataagatgcttgatggatttttgggtcttttagtttcttgtatttgtcaggaaaatgatactatcgctagaattggtagatcttgcttacaacaattaatattacaaaacgtaaccaaattgaatgagtaccactggaaccagataggcgacgtgtttgataaattgttcgatttaactactgccaatgaactgttcgattatgacccattgcagcaaggaagaaaaccctccgtctctcatcatcaaaccacaaatgatatcagccaacaatcagataatgataataacgatggaagtgaaaacgaatccaatatcagtgagactgttgagagagcgcaccaagaagaatctagtgaagatgtaggcggcgacatggtcggaacgctaaatggacaaaacgggggaactaagttgaacaatgacaattctgaactggttgttaaagaagagtcaaacttaaaggccgctactttgaatgtccccaaaagaaccaagaatatgaaacgtaatgagagtaatgaagatatacgtcggagaataaacgtcaaaaactccattgtcgtcaaatgcgttctgcaattgttaatgatagaattactgaatgaattatttgaaaatgaagattttgcgcattgcataccttataaggagtccatcagaattaccagattactagaaaaatcttatgaattttctcgtgattttaatgaggattacgggttgaggacaagattagtagaagctcgcgtggttgataagatccctaacctattgaaacaagagacaagtgccgccgctgttctccttgacatcatgttccagttatatttgaacgatgatgagaagaaggctgatctaatagtccgtttaattggtatttgcattcaagttgttgagggttacgtttccttagatgatagaaccatggaacgtagtatcaacgcttggcgttcagtgattgttgaaatcttgcaaggttactatgaatttgacgatgaagactttaaattgtattgtccagctatgtacgccttggtgattcagatattagacaagagtgtcccaacggaattgagacaagccgtcaagcagttcctaagtagagttggtgaattatatctttctaccgattga

SEQ ID NO: 506 - DNA, 1155 bp, Saccharomyces pastorianus
atgagcttttaccaaccatcattatccctttacgacattttgaatgcattgtccaaccaaggtggcctgagagagcagcaggaacctccccgtcaaacgcaaaggccacagagacactatccgcatcacggtcagtcacatgctggcggacaccacccccatcaccaccacccactgtacaacaggtataacggccctcccagtagctattactaccagttcccgggacaagcccattactacagcccagaatacggctgcgatgacgaaagcggctacgaggaagaccaagacgaagatatggtcgataacgggagaaactacggtgaagagcaacaagaaagtggccgctccaggcagtatccatcctactaccacagcaacgctgcgaggaactacagtaacgaccaacaggcgaacagtttgaacgacttgttgactgctttaattggcgttccaccttatgaagaagttgaaccagaggtagaagcaaaggctgtagagaaggaaaatgaaaacgggaacgggaatgagaatgagaagccacaaacatgggcaccaggtgaaaaatccgaggaaccaaaggtggaaacgtcaggaaacaataacaatcctcctctagagaaaccggaagcgtcctcaaaaccaccgctaaataagaaacgctcatctttcgctcacttacaagctccatctccagttcctgaccctttacaagtttccaaaccggaagggagaatggacttgccattttcacccgaggtgaacatctacgataccaaggacacttacgtggttgttcttgcgctaccaggcgccaactctaaagcgttccacatagattaccatccctcctctcatgaactacttatcaaaggtaaaatcgaggacagaatcgggattgacgaaaaattcctgaaaatcacagaactgaaatatggtgccttcgaaagaaccgtcaagttccctgtcttgcctcgtatcaaagacgaggaaatcaaagcgacctacaacaatggtctactacagatcaaggtccccaaaatcgtcaacgatactgaaaaaccaaaacctaaaaagagaattgccatcgaagaaatacctgacgaagaattagaatttgaagaaaaccccaaccctgctgaaccaaattga

SEQ ID NO: 507 - DNA, 2025 bp, Saccharomyces pastorianus
atgtctgatccaaaccaaggtaacaatcagcaaaactatcaacagtacggtcaaaacttcaaccaacagcaaggtaacaacaaatttcaaggttaccaagcttacaatgctcaagcccaacaacctgcaggtggctattaccaaaacccccaaggttacgctggctaccaacagggcggttatgaccaacaatttaacccggaagtaggttaccaacaacaatacaacgcccaaggtggttaccaacaacagttcaatccacaaggtggccgtggcaattacaagaacttcaactacaacaacagccaacagggattccaagctggctttcaaccacaatctcaaggaatgtctttgaacgacttccaaaagcaacaaaaacaaactgctcctaagccaaagaagactttaaaacttgtttcaagttccggtatcaagttggctaatgcgaccaagaaggtcgacacaaagcctgtcgaaactgagaagaaagaagaagaaaagcctaccgaaacgaaagaaccagccaaggtcgaagaatcaatcaaagatgtggaaactccagccagcgctgaagaaaagaaggaggtgaattctgaattaccaaaggtcgaagatttgaaaatatctgaatcgaacgataacagcaagcctgctaaccctatcaacgccgatgccttgatcaaagaacaagaagatgaagtagacgatgaagttgttaatgatatgttcggaggtaaagatcacgtttctttaattttcatgggtcacgtcgatgctggtaagtctactatgggtggtaatctactatatttgactggctctgtggacaagagaaccattgaaaaatatgaaagagaagctaaagatgctggtagacaaggttggtatttgtcttgggtcatggacaccaataaagaagaaagaaacgacggtaagaccattgaggtcggtaaggcttatttcgaaaccgaaaaaagacgttacaccattctggatgcaccaggtcataaaatgtacgtttccgaaatgattggtggggcctctcaagccgatgttggtgttctagtcatttctgccagaaagggtgaatacgaaaccggtttcgaaagaggtggtcaaacacgtgaacacgccttattggccaagacccaaggtgttaataagatgatcgttgtcgtaaataagatggatgatcctactgtcaaatggtccaaagaacgttacgaccaatgtgtaggtaacgtcagcaatttcttaaaggccatcggttacaatataaagactgatgttatattcatgccagtatcaggttacagtggtgctaacttgaaagaacatgtagatccaaaggaatgttcatggtacaccggcccaactttactggaatacttggacaaaatgaaccacgttgaccgtcgtatcaacgctccattcatgttacccattgctgctaaaatgaaggatttaggtacaatcgtagaaggtaagattgaatctggtcacatcaagaagggccaatccactttattgatgcctaataagaccactgtggaaatccaaaacatctataacgaaactgaaaccgaagtcgatatggccatgtgtggtgaacaagtcaaactaagaattaaaggtgtcgaagaagacgacatttcaccagggtttgtgttgacatccccaaagaacccaattaagaatgttaccaagtttgtggcgcaaattgccattgtcgaattaaagtccattatagccgccggattttcatgtgttatgcatgttcacacagccattgaagaggttcatattgttaaactactgcataagttagaaaagggtacaaatcgtaaatcgaagaagccacctgcttttgctaagaagggtatgaaggtcattgctgttttagagactgaagctccagtttgcgtcgagacttatcaagattatccacaattgggtagatttacacttagagaccaaggtaccacaattgccattggtaagattgtcaagattgctgaatga

SEQ ID NO: 508 - DNA, 1041 bp, Saccharomyces pastorianus
atggatacgggtcataacttcaaagtcttagagcataaagctgctggtcacgacggcactctaactgatggtgatgggttgctaatcttcaaaccggccttgccacaggaactggaattctataaagttgtacaggcgagagacatgagtcgggatgagccactggccagccaggatgctcctttacactcttggatgcccacgtatcttggagtcttggacgaaggggctaaagttggcagcggtggcaatgccgggcttttagaggtagatcagcggttgagtgattctacagatgacctcgacttgacatcctcgcaggccaatggagacaaggaatacctcgttttagaaaatctgctatacgggttcagtaaacctaacgtacttgatataaaattaggtaaaatattgtatgattcgaaggcaccattggagaaaagggaaagattgaaaaaagtcagtgaagaaacgacttcaggctctttgtgttttaggatatgtggcatgaaaatacagaagaacccttcggtactggcccagttatcgcctgaacactacgaagaaggagcagaaactgattacgtctttataaataagctatatggacgctcgaggactgaccacaacgtggcagatgccattgccctgtatttcgacaatcctcacctgtcggataccaggaaacaccaattgaagaaaatgtttctgaaaagactacagttattctacaatactatattggaggaagaggttaggatgatttcaagtagtcttctgtttatttatgaaggggacccaaagcgatgggatttgttgcatgataccgatcagctaatgcgggatgatttcatagacagtgacgaagacgacgatgaggaggtaggggaagacagaaaacaaaaggataaaaaatccacttgtctgagttcgatgtcattaatagactttgcacatgcagaagtaaccccgggaaagggctatgacgaaaatgtcattgaaggagtcgaaaacttgctgggtatcttcatgaagttttga

SEQ ID NO: 509 - DNA, 741 bp, Saccharomyces pastorianus
atgaccacagacccttctgttaagttgaagtccgccaaggactccctcgtctcctcgttattcgaactatccaaagctgccaatcaaactgcctcttccattgttgacttctacaatgccatcggtggcgatgaagaagagaagatagatgccttcaccactttgactgagtcgttacaaacgttaacttctggtgtgaaccatttgcatggtatcagttctgaactggtcaaccctgcggatgacgataaggacaccgtgatagcacctccagtcaaggctgtgaggagaaagattgaacgtgatccaaacgctccaaagaagccattgaccgttttcttcgcttattctgcctacgtgcgtcaagaacttcgtgaagacagacaaaaggctggtttaccacctttatcctccactgaaatcacacaagagatttccaaaaaatggaaagagttgagtgatcacgaaaaggaaaagtggaagcaagcttataacgttgagttggaaaactaccaaagagagaagtccaaatatctagaggcaaagaaaaacggcactcttccaccagcttctctcgaaaacggtcccactcatgcgcccgttccaattcctttcagtttacagcatgccgctgaacctcctgtggaaaagagacctcatgatgacgatggatcttctgaaaagaaaaagaagaagaagaagaaggacaagaagaaggacaaatctaactcttctatttga

SEQ ID NO: 510 - DNA, 648 bp, Saccharomyces pastorianus
atgtccagggctaagaggattatgaaagagatacaagctgtcaaggatgaccccgcagcccacatcacgcttgaattcgtgagtgagtctgatatccaccatctaaaaggcacatttttgggtccacccggaacgccttatgagggtggaaagttcgttgtggacattgaggtccctatggagtatccgttcaaaccacccaagatgcagttcgacacaaaagtatatcatccgaacatatcatcggtgacaggtgccatttgcttggatattttgaagaatgcatggtcgccagtgataactttgaagtctgcgttaatttcgcttcaggcgctattgcaatctccagaacctaatgatcctcaagatgcagaggtagcacagcattatctacgggatagagagtcctttaacaagactgctgcattatggacgagattatacgccagcgaaggcgccaatgggcaaaagggcaacatagaggagtctgatttatatgggatcgatcacgatcttattgaggagttcgaatctcaaggtttcgaaaaggacaagattgtcgaagtcctgagaaggttaggtgtcaagtctttggaccccaatgacaacaatacagctaatcgtatcatcgaggaattgttaaagtga

SEQ ID NO: 511 - DNA, 4473 bp, Saccharomyces pastorianus
atgtcgtatccaggagaagacactaacattcccagaaggatggtagaagctctagaggaccatccattgagttatctggttcccaaggacgggttggcggcgttggtaaacgctccgatgcaaacttctttgccctttgacaaatctgtctttaccaacgccgatgatagcagagaaattgatgtaagccatcttattgctgcgaacaatacaaccttttctatacaaaatgacttagaacaaaacaagcttgttttcaagagacctgaaaactttatattatcgaccaagcaagattatgctccatcaaacttgttggagggactatcgccgttagcacagactgtcctatcagaccatcaagatctagttgtttctaatgaaatagtgaaaaagagcgagatagtaaacaaactgcaaccaaaacataagctagaggatttgaccccaaattccagtaacttaagttttaacgaggactctccaaacaagaaaacgaaagtttcgacaggtgtaacaatgacccaggccaatttagcagaacaatatttgaaagatctagaaaaccttttatatattgtgggatttgatcacagctctgccgaaacgggaaacatcgagtactggctcaagttaccagatgaaaaattcattctaaccaccaattgtttagtcaaactacagatgacagttaagaatattgccgctaatccgcagctatggagctcgattaaggtggcatggctattgagactgctagatgtaatggtctccaacataaagtctagtaaaaaatttttgaaggcaggttttgatgattctatgttgcgatatattgccctactatccatagtcatcctattcaatattttcctcctaggtaaaaacgacaacaacttacatcgtgaatcatacattatggagccgctaaactttctaagtgatttagtcgaatctttgagagtgttaccaaaggattatgattctttgaaaatagaactgaatacgtttcaggaagctttgggtttgctaccaaaatatatatgcaagggcccatttttagatgataacgtaaccacgaagcttgtgtacatattcagtgacttattaatgattagtgacattgaagtaactgctaacattcagtttctaaacttctgggatagtgtaaaaaaagccagttctgatattctagtctcgttgttcagtaaactagatcaacagagggaatttatcatcgaagagttaatttctcatgttgaaaagctccccacaaagagaatacagaaaaaactaagaaaagttagttgtgaaaatatctatatcaccgattttacctttactttgatgtcaatgttggaaaatatcaattgctatacattttgtagcaacatgaaagaacttacgtcagaaaacattgagctcttaaaggaaaactacaaaatacaagaacagttcctttttaacactatagagcacataaatgacacaatactagaactatttttcaagaatccatcctcttcacgatatgtgatagataattttgttcaagatctattattgctaatcccttcccctcaatggccaataacagagaaaatattgagctcattgttaaagaagcttttaaaagtatttggcccatctattcagctttctgcaaacatcgaaacaatatgtctacaacacattggaagtattggttctaaaatttttgatattaaatgttcaacaagagagcacgaagataataatttaatcaaaataataaactacccagaataccttccgacctttttgaagttcttcagcgcatgcatattacacaatgaaacaatcaaatctcgtgattctgccacaagatttctttggaatttgagattaggtgcaatattcagactggaagaatatacaaaagatgccaaggaccaaaattcaactattactcaccaactaaagaacatattggaacaagtgcatgacaatagtcttgaaactcccttagaaaccacagaaatggtcgctggcacgattcgattagattatttttccattttgcatgcttttgaacttttgaacctgtatgatccatacttgaagttaatattatcactgttagccaaggataaaatcaaactgaggtccacggctataaagtgtctgtcgatgttggcgtccaaggataaagttatattgtcaaactcgatggtcaaagcaactatccagcaacgtttaaacgactcatctgcatctgtcaaggatgccattctagatttagtcagtatcaactcttcatatttcgagttttatcaacaaattaacaacaattatgacgacgacagcataatggtgagaaaacatgtactgaagataaatgaaaaaatatatgacgagacaaatgatgttgttacaaaggtatatgtggtggcaagaattcttgtgaaaattgaggatgaagaagataatataattgacatggccaggttaatcttgttgcatagatgggttctaatggtagatgggtcaatggaccagtctgaaaaactgaaagaaatttcttcatcggttctattagtaatgtctcgtgtggccacaatgaatgagaaatgctcgcaacttttcgactggtttcttaacttttatctgttaaatagagaagcacattcgaaggacatgtatgacaaaatagctcgcgtcttaaggactctcacagatttcctggttcaaaatattgtcgaattaaactcaaaagaatcaaaagaaaaagactcaattattaataagcagaatctcttaaatttgttagccaagtttactgactgtaccgtgtcatttataacaaaagatcatatcaccgccctatacccgtatatggtatcagatgaaaaatcgaatttccactatcatatccttcaagtgtttagaaacacatttgaaaaattgtcaaacttcaaacctaaatttttatatgacttagagacgaccttactgagcaggctcccaaaaatgaatgtacgggaaatagacgaagccatgcctctcatttggtctgtcgctactcatcgtaatgataccgctagagtagctaaagcgtgctcctcctgtctttcccatttacacccttacataaacaaagcaaacaaagaagaggaagccattgctgttgatgggaaattgcaaaggttaatatacttagccaccggatttgctagattttgcttccctaaaatttcaagtgaaaagattgcatttttacaagaagatgaaacattatatgaacatgttaccaaatgcttgcttgtactttcgaaagacaaaatcacccacgtaataagaagagtcgctttaaagaacttgacgaaattatgcggaaatcatcccaagttgtttaattcaagacacgttttgcatttgctagatcaagagtttcaaggaaaccaattggacatcaaactggtgatattggaaagtttatacgatctttttttgctggaagagcgtaaatctgtgagaagtattggtgttagtagcacattatcttcgaacactctattaaaaaaaaaaatactgaaaaccaaaaaggcggatttcgtcaacgatggtgtatgttcagcactagctactcgatttttgaacagcattctccagctctgtcttctatgcgatctaaaaagttctcttgtggcaattcggctattgaagttgattttaaaatttggctacaccaatccctctcattcgattccaactgtagttgctctagttgcctctgatacccagtatattcgtcatgtcgcctcggaaattttagaaggcctttttgggaaatacgaaacactagtgtttagtggtttatcaagaggtattacgaaggcaatacattactctattgatacgggtggtaaatattattacaaacgcgatttttttttggtttcacttgagagaatatgtggagtggggaagaaaaatgctccaaagtttttcaaaattgtaaagagaactatacagtcttacctcgatgatatcactagtttaaaattatctgtttccattcaaaagtctattttcgtgctttgtaccaatatttcgaatatcacatacagtacccaattcgatttggtatccttactcaaaaccatagatctgacaacagacagattgaaagaaatcattatggatgaaatggatgatgctccatcttccagcaaatcggaagaaacattccgtgaaataattttaatacagttatgtttgcaagacttaggtactcatttgttacacttgtacggattaaggaatgacgttcttctactagatattgtagaagaatcggaattgaaaaataagcagcttccatccaagaagcaggaaactggtgacttttctgcacagttggaaagtatcgaacagcactcgtcaaacggtaaacttattgcatactttaaaaagcacataaaagatacgtaa

SEQ ID NO: 512 - DNA, 1482 bp, Saccharomyces pastorianus
atggcataccgtaacagatcgaaaagtgttttatccaaacaaagcaagaagagcgatgataaagcacactataaatcacattcaaagaagaaatcaaagagcaagagcaagagcaaaaagaagttgagaatctattggagatacatatctatcatatgggttctatggttgggattggtatattactatgaatcaatggttgtcaagagagcaatgaaaaagtgccaatggtctagttgggaaaactggcctgagggcgccgaaagccataaggtgggtttatttgccgatccacaaatcatggatgactattcatatccgggaaggccaaaaatagtgaactacttcacaagggtgctccttgaccactaccataagagaaattggaagtacgttcagtattacttggaccctgatagcaatttcttccttggtgatctatttgatggtggtagagagtgggatgatgagtactggattaaagagtatacgaggttcaacaaaatcttccctaaaaagccattgagaagaacaattatgtcgttaccgggcaaccatgatattggttttggagacacagtcgttgagtcgagcttacaaaggttttctagttacttcggagaaacttcaacttccatggaagttggtaatcatacgttcgtgcttttagatacaatttcactttcagataagaaaaatccaagcgtttcaaaagtcccaatggaatttttagataatttctcgatgggctcacatccacaacccaaaattcttctgactcatgttcccttatacaggaatgcacaactacaatcttgtggggaattgcgtgaatctaaaaaacttttccctattgaaagtggtaagcagtaccaaacagtcatagatagtgagatatcgcagcaaattttaacacaagttcaaccagaactcttattttccggagatgatcatgactattgccacatatcgcattcatatccgtttcatggagaaaccaagattgctgaagaaatcactgtaaaatcatgtgcaatgaatatggggatcaataggccagctatccaactactttccttatataatccttcagatctgaaaacggtaaatgccggtgaagaatatgagtcaaaaacttatcaaacagaattatgttatatgccagatccgtacaaatccatcagaatgtacttatttgggttattatggtcctttttttttgtcctttacatgcatttcctcccaaaatcatttaacggtcatgtagcaaccagaatggatagatcacttacgcgttctcacagtggtaattccgctttgccattacctgcaagtgtttccaaatctaaatccaaaaaatcctcggcacattcaaaatactctgttaatgaaacgcgttctaccaaacagttcttagtcaatgtaggtatactatttgcatctgtgatgccaatttttatctatttttatagtatagtataa

SEQ ID NO: 513 - DNA, 540 bp, Saccharomyces pastorianus
atgaaatcatttcagaaatcctatgaattcgattacccatgggaaaaagtgaccacggcaaactggatgaaatatccaaacaagatctccacccacgtcatcgcagttgacgtgcttcgcagagaacttcaagaacagggcaatgtactcctaacggaacgacttataaccatcagtcaaaacgccccccgctggatgtccattctggtggggaacaccaacctagcatacgtaagagaagtgtccaccattgaccgacgaaacaggtcaatgactatgagaagttgcaatatgacgtttccgcatatattgaagtgttacgaaacagtaacttatgcgccacatccaaaaaatccatcaaacatgactatcttcaaacaggatgcaaaattcatatccggcatcccgacccagatttttagcaggaaggtggaaaattggggggtcaaaagattcagtgataatgcaatgaagggtaaggtcgggttcgatagcattttggaaatgtttaatgatatctggagcaacggtaacgaatag

SEQ ID NO: 514 - DNA, 2541 bp, Saccharomyces pastorianus
atggatacggtcggaactgacgcagccgcatctcctagggtgagtgtcaagtctcaggactcactgttcctcatcacgtactccaatatccagcagccgttggtgcaaacgtcgcttgctgcgcgatatccattgctggctaagctgaacgtgctgctttatatagatattcccaccatcgattactacaacgatgaaatgacgcataacaagctctcccggctgaacaagcggttcaagttgcaccgcctgaagggctctatctcgcagagcttctccaacacggccacggcagaggagaacgacaggttctgggacgagttgaaggatctggtcgccactcggcactcggccgagaacaagttcgacctcaacgtgcagatctcgtcatcggggtcgctgcgatacgtggagacgatccggttcctaatcgagaaggtgtacaactccttcaagagcctgtacgcgcagcagaagttgaaccttacgtttcagatcaacgtgtcccctacctcttccaagtggttctccacctttttgaacgcggaactgctgaggctgaatattatccattggcagaacatcgggtctttcaccaagaccatccagaattctaagtcgctgccgttcaaagagtactacactaagttgaacgagaaattcaccaactccagccaccatgccgtgagcatgcaggaccagaccgttttggactccatcgtcatcgtgacaaacagcaccggtgtgaaagccctgctgacactgctctcggaccacccgttgaccagtcttatctcccaggagtcgataaaggccctgcacgaatactcggactctctcaacgacgacaagaacgacttggccggcacaagcctaaaaagaaactcctcgtctcttctgagcttccagaactctgtcctgacttccaataaagacaagtctgttagggtcaggtccctgtccatcaaccggaaatccaatagagcgcacatgttcaagacgaatgagtccatcaccaccatcccgacaacaaccatcaacaatctcatcagcaacgggtccaacctgcgtaagcaatgttctactaccgcgttgcagctccaaacacatttacatccgcattctcgttcgcagtcgtattcgagctcgaacacgtctagatctccatctcccttcccctacggcaaaaccccctcaaacgacaatctagtatatgacgaacttaataaccaaatcaacgaagtacaagaccgtgccaagaatcaagaaatttctcagtacaacgataacaattacgacgatttcgcggaagaagaagaagaagaagaagaagagcaaacatacgcagatgattatgacgacgacggcgatgatgatgatgatgataacgacgacgacgacgatgatgatgaaggcctaagcttttatgctccaagcattctctcacgctccggttccagcacagatatgttgtccgcaggggcagatcccatggcgaacagttcaaaggaaattaagggcaggttcagatccttaagtttaatggacccggccctgaaaaaaccattcaaccagaagcacacacacaaccaacagctcgaccccaccagagcagacctccctaagagatcctgttcctcgagccatttcaccaacgtccacgtgcacgacggtgactttgatggtgccgatactattagcaataaaaagaatttgtcatccgcaacgctcatcaaaagaaaatctctcatgaatagaaacctgactccttccatcagcaacgggctgataccaccggagttcatttccaggatatctacaccttcttctagcgcaagcagctcgaactcgtctttgaacgacatgtccaccatgtcgaacgctttttccaagctattgaacgacacaaccaagaagcagaacttcttgaattcaccagtcccacaacacacgtcacaggcatccccgctgttactcagaagcgattcaaacagcaacttgctattcgaaaaaaacctgatcaacaaatcgtttgaagaactgagaagacaaccgtcaatcaatcttttcagtaccctgatgaatggtaaaatggaaaaaaatggcttagcgctaaacttcaaatctagaacgcccaccgacgctttgatgggcggcaaaaacaccagccatggactattgaatctggaagaagaagaccaaatcatgtctgggtgcgcgaatataaaggaacgcgaagacgacgatgattcgacaagcagcacaatcataccgagccatacagatactgatagctacaacaataatgataacgacaatgatacaggtataaatttcaagaatttaaatctgaatctttatgatgatgatgaaaataatgacgacgtaggctataatgtagatcctcaaaagataaagcactcaaattcaaacactacagtcaccaaacccgtttataaaaaggccattacattggacttatacggtgaagacgatatggataacatgggaggatgggtattaggtggtaatgctcgataa

SEQ ID NO: 515 - DNA, 1998 bp, Saccharomyces pastorianus
atggccgtggaagaaatatcctccgggaaggatgtcagtctaagagacatgcagatctcagccattctgaaaatgctctttctaaacaaggactcgaacaacaacgacaacatcaccaccatcacagacgacattttcaaccagcaggagatcatctggaaggtgctggtccttgatgtcaagagcaccgccacaatctcctccgttctcagagtcaacgatctattgaaagctggtatcaccgttcattccttaattaaacaagacagatcgcccttgcccgacgtgcctgccatttattttgtttctcccacaaaggagaacatcgacgttatcgtcaacgacttgaaaaatgacaagtactccgaattctatatcaatttcacttcatctttgcccagaaaccttttggaagacttggctcaacaagtgtcaaccacggggaaatcagaaaaaattaaacaggtctacgaccaatacttggacttcattgtcactgaaccagaactgttttctctagaggtcccaaacgcatatttgactttaaacgacccaagaaccacagaagaggaaatcactggtttgtgtgctaacatcgctgacggcctcttcaacaccgtaatcaccactaattccatccccattataagagctcctaagggcggaccagccgagattattgcggaaaagttaggtaccaagctacgtgactacgtcatcaatactaatgcctcatccacttcaactttgcacgggaacgattctttggaaaggggggtcctgatcatattagatagaagtattgattttgcctctatgttctcgcattcgtggatttatcaatgtatggtcttcgatattttcaagctatcaagaaacaccatcaccattcccttagaaagtaaaccagatggagacgacactacgacttcgaatccaatagcctccaagaaatacgatatagagccaaatgatttcttttggatggagaactctcacttgccattcccagaagctgccgaaaatgttgaaacagcattgaatagatacaaagaagaagcggcagaaattaccaggaaaaccggtgtcacgaatataacagacttagatccaaactcaaatagtgatactgttcaaatccaagaggtcgtgaagaaacttccagaattgacagctaagaagaacaccattgatactcatatgaacgtatttgctgcactgttgtcacaattggaaagtaaaagcctcgatacattttttgaagtagaacaagatcctggcagcaccaaaacaagatcaagatttttggacattttaaaggacggtaaaacaaataatttggaagacaaattaagatcgttcattgttctctatctaacatcatctaccggactaccaaaggatttcgtccaaaatgtggaaaactatttcaacgaaaataattatgacatcaatgccttaaaatatgtttataaactaagggaattcatgcaattatcaaacatgtctttgcaaaataaatctctagaagatgggtccgattctaattttaaaccaagcaatttaacattatccggtatatacggattgaccgaaggtaagttacaaggtggtgtgggaagtttgatctcgggtatcaggaaattgctacctgaaaaaaaaactataccaataacaaatgttgttgatgcgataatggaccctttgaatagttctcaaaagaacttggagaccaccgatagttatctttacattgacccaaaaattaccaggggttcacatactaggaaaccaaaaagacaatcttataataaatcattggtttttgtagttggtggtggtaactatttagaatatcaaaaccttcaagaatgggctcactctcaattgcataatccaaaaaaagtgatgtacggtagcacagccattactacaccagccgaatttttgaatgaaattgctcagcttggtgcaagtaataacaatactgatgcataa

SEQ ID NO: 516 - DNA, 1392 bp, Saccharomyces pastorianus
atggttgctattagtgaagtaaaagaaaatcctggtgtgaatggcaccaattccagtgtcgttactagaactgcagctcacacacacatcaaaggtttaggtctagatgagagtggtgtggccaagagagtcgaaggtgggtttgttggacagattgaggcccgtgaagcttgcggtgttattgtggatttgatcaaggccaaaaagatgtccggtagggctatcctattagctggtggtccatctacgggtaagactgccctagctcttgccatttctcaagagttgggtccaaaagtccccttctgtcctctcgtaggtagtgaattgtactctgtagaggttaaaaaaacagaaactctaatggaaaacttcagaagggccatcggtttaagaattaaggaaactaaggaggtttacgaaggtgaagtgacagaattgacacctgaagatgctgaaaacccattaggcggatacgggaagacaatctcccatgtcattgtcgggctcaaatctgccaaaggtactaagacgttaagattagatccaacgatatatgaaagtattcaaagagaaaaagtcaatattggcgatgttatttatattgaagctaacaccggtgccgtcaaaagagttggtagatctgacgcatacgctactgaatttgatttggaaaccgaggaatacgttccactgccaaagggtgaagtgcataagaaaaaggaaattgtacaggatgttacattacatgatctggatattgctaacgcaagaccacaaggtgggcaagacgttatatcgatgatgggccaattactcaagcctaagaagaccgaaattaccgaaaaattaagacaagaagttaacaaagtggtcgctaaatacatcgatcaaggggttgctgaactaattccaggtgtcctattcatcgatgaggttaatatgctagacattgaaatcttcacatacttaaacaaagcgctcgaatccaatatcgccccagtcgttgtattggcttctaatagaggtatgaccacagtccgtggtactgaagacgtgatatcaccacacggtgttccacctgatttgattgacaggttattgattgttcgcactttaccttacgacaaagatgaaattcgtacgatcatagagagaagagccgctgtggaaagtttgcaaatagaaaatggcgctttggaccttctagctacaatgggctcagaaacttccttacgttacgctttacaattattggcaccatgtggtatcttggcacaaacaagcaaccgtaaagaaattggtattaatgatgtcgatgaggctaaattgttgtttttagatgccaagaggtcgactaagattttagagacatcagcaaactatttgtaa

SEQ ID NO: 517 - DNA, 1296 bp, Saccharomyces pastorianus
atgtcaagtttcggtaatccgttcacgtcgggcgtcaagcccaatctctccaatacgaacggtatgaatccgttcactgccaacgtcaccaataacaacgccataggaaccagtgcattcggccaacctagttttggcgctacgaatgcaactgcaggtggtgccactacctctgcgtttggtgcgcctcagtttggtgcaaataccagtaataccagtaatacaacaatgagtgcttttggaagtaccgctggcgcagcgaagccttcggcatttggggctcctgcgtttggttctaccgcgcccaccaatgttaatgcgccctccactacatctgcatttggtgctccctcttttggatcatccggctttggctctgcagctgcaactggtaacccttttagcaaagctcccagctcaatggggtccgcatttggacaagcaggatttgggctgaatggtaccgctactataagccctaatgttactaataacaacaccggctctgcatttggtgctttgcaaaataaaacggtaacatctggttctccatttggttcattgcaacaaaatgcattgccaaattcgtcttccgcatcatcagcatttgggaaacctgcgttcggagctgccagtaatgctcagtcagcatttggtgccaatcaaaatacaactaccagtgcaggaacaggagcagctccatttggctcatttggtattaataacaataacaaatcaccttttggaaatctacagaacgcgctaccagtttcgtcaccatttggggtcgctaactccaaagccaacagcatcggcaatagcagtccattcgcagcaacgaataaccaagtatcaaccaataagtcaccttttggtatggctgctagcggtacctttggctcagtatctaactctaatgtgacgaatacaaatgcgaatacaagcgctcaatctcccttcggtaataaagggttttcatttggtattgcatcacaaacagatgctaattcggcgtctcaaaccaattctccatttggtcaaacagcctcagatcccaacacaaattttcaaaataatagtacaacttcgtttggacagcaaccagccagcacagcagccaacaatatgaacacagcggctggaaacactagatttgttcaaggtttaccctctgaaaaggacattattatagagttaagcgaccttgccgaggaaacaataaaaattttcagagcaaataagtttgaactaggtcttgttcctgatatacccccaccgcctgcattagtcgcgtag

SEQ ID NO: 518 - DNA, 1992 bp, Saccharomyces pastorianus
atgttgacttctgtactgataaaaggtcgttcaccccttctcgtgggaagaagcttctcggtactgctcaagaactgtagccgagtcaatggtggaatttctaaaagattgtatcacgatggcgacagggaccaaaagaattttggtaggtaccagaaaaacgacggtaatagaaggcccaggaatcctcgtttcaattctcgtccaagaacaacatctagagatgatggtgacgaagtgcatttcgataaagcaaccttttctaagctaattcacgtacccaaagaagaaaactccaaagaagtaacgcttgattctttattggaggaaggcgttcttgataaagaactacacaaggctattgccaggatggagtttcctggtctaactcctgtccagcaaaagactataaagcccattttatccagtgaagatcacgatgttatcgcaagagccaagactggtacaggtaagacttttgcgtttttgattcccattttccagcatttgataaacacgaaactggattctcaatacatggttaaggctgtcattgttgcaccaacaagagatttagctttacaaatcgaagcggaggtgaaaaaaattcatgatatgaactatggcttaaagaaatacggttgcgtctctctagttggtggtactgatttcaggggagccatggataaaatgaataagctaagaccaaacattataattgccactccaggtagattgattgatgtcttagaaagatactcaaacaagtttttcagattcgtcgattacaaggtgcttgatgaagctgatagattattagagattgggttcagagatgacttagaaactatttctggtatgctgaacgaaaaaaattcgaaatcccccgataatatcaaaacactactattctcagctactcttgatgacaaagtacaaaaactagcaaacaatatcatgaataagaaggaatgccttttcttggataccgtcgacaaaaatgagccagaagctcatgaaaggattgaccaatccgttgtgatttctaaaaaatttgcggacaacatatttgctgccgtggaacatattaaaaagcaaattacagaaagagattctaattacaaagccattatcttcgctccaaccgttaaatttacatcctttttatgtgatattctacaaaatgaattcaaaaagaagctacctattctagaatttcatggtaagatcacacagaataaaagaacaagtatagtaaaaagatttaagaaagatgaatctggtattttggtctgtacggacgtgggtgctcgtggtatggatttcccaaatgttcatgaagttttgcaaattggtgtaccatctgaattagccaattacattcatagaattggtagaactgccagaagtggaaaagaaggttcttccgtcttattcatttgcaaggatgaattaccatttgttaaagaattggaacatgttaaaaatataaccattgctaaacaagaaacttatgaaccaactgaagagataaaaactgaagtgttggaagccatgagccaagaaacggaagagctgtccgatgtcatagtaagtttgatctcatcctacagatcttgcatcaaggaatacagattttctgaaagacacatattgcctgaaattgcatctacctatggtatactttcaaacgatcctgaattaaagatccctgtatccagaagatttttagaaaagttagggttgagccgtagtccaattggtagagcaatgtttgaaataagagactataatagtaacagagacagaagtgaaaactcatacgatgatgaagattcagacacttccttcagaagcaacaacaattatagtagaaacagaaatagagatcacgaagatggacaattcggacgcgacaacaacaatagacgttcattctcccgcaacaatgataaaaacagttatccaaaaagaaataataacagatattag

SEQ ID NO: 519 - DNA, 1167 bp, Saccharomyces pastorianus
atgtcaagtccaatacctagggtctactccctagggaattctcccatgtcatatttactagcattaagaattgcacaactcccgagtcaacctaaagttcccttagttgtccttctcttgaacgatcagaagaaattgaataggtttcttgacaatgactccaaaattattgtcaaatcgaataataataataaagaaattcatcacagacagtttatggcatcatgtgttccgcctattctaaacaatggtgaaattgccccgattgaaaatctaataatttctgataaatcttcaaagttcataaccgcccaactttcgaaatatagtaaatctttgacacctgagaccaacattttacttttgaatccaagtttaaatttactagaatatatgcatagataccggtggcggtctgcgcaaacgagaccaaacttgttcatggggtttacatcaccagttgaggttggtactatccatcaagaatttcagttatcaattgacacaaaaaaaagaatacagtttcatttggctaagattgatgattttccttcattgggcggcgctggtcgcaatacagatcttcctctgatcggcgacagacctacaaatgaaaaggaaaccccgtttaataagctgtttaaagaaatggccaaactgcggcccaggattggttcgagattgatcaattttgatttgcatgttcatagttttcacgatttgttcttcgtcgcattagaaaacttgatgttggaaagttccattgagccactactagcagtgtatgattgtacatacaaaaaggagctgctaaaaatagccggggcacaagatacaattcacaagttaataaatgaacaattatttgtcattgatcaatcctacccatcattaaagaattatccaaactactctattattttcgaaaaagaaagaatattcaacttaatcatgagagacttgaaagtgaacggaaacaagcgcgccaaattggcccgatctttggatcaattgaatcatacaaatattgacgaacttaacggatattttgttgcacttgccaagtacaaaaaatgtgattgcaggtggaacgaaatgattttgactttagtcaaagggaagcagtcaattaccaagcaaaaagcattagattatcattatttgtaa

SEQ ID NO: 520 - DNA, 510 bp, Saccharomyces pastorianus
atggcagatgcactggaacagagtgtgcttgctttggagagtacactttcggtgttgaaagattctgtcgaatctctgaagcacgcaaatgaacctagcacgaaccttgcatcaacgatgctacaaactaagagggttttccgtttagtgcccgagtatgacgtggagaggtctaaattggatttaattgaagaagtagagccgcttgttaggacgttgggcgataaattacgcaagtctatggggagaatgcaaagagaactggatacattgcagcagacttatgaattgaatgatttacgattaaagaagaatatcaatatggaagaagataacgatggtctcgataattcggacatgggtcgcgatgatggaggtggagatgctgatgttagtaccgatgtggttatgatggcatcttctactaatgaggaattagaagaattgaagagattaaaggagaagaaaaagcaattgcaagaagatttgcaaacacttaagcagaaatag

SEQ ID NO: 521 - DNA, 2658 bp, Saccharomyces pastorianus
atggaactatcggatacccaaacagaagatattcctgccgcttttgatggtataaaaagtcagttgaacagcatattagaatcgaatcaattatttcaagattatgcactactgaatgggttcttggcatttgtccattcgaagttaaatggcattgtcgtctcatccattgagtccgaacatgcttttcatttatccaaaaattcaagagtagttgatcctgtttcccttgaaaacggaaaggttctttcgattatagatttttcctgggaaaatgtgcattatccaatatttaaatggtttcagatgtggagaaactatattcttttcaagaaagagaaccaaaagcaacaagccagatttattgaatttagaaagatgaattccaagatgttgaagtttttcaaaacggtccagaacttttatttcaacattataaacacaatctataaaagatatgatatatctgtacttttgccgaataaaattgttcaagacctaaagttagctgatatcaagagagatatcaatgttgagttgaatacgtttgataatgggtgtccattcgcccggctcattcaggttattttccatcgttgcgtgttatttttaggaacagcgtatcgctacaagagtctcattgaagaactctcaaacaaatatcccacatctacttttaaaaaatctctgagttactttcacttagcttcattgatattaccaggcgccggtgaaacatattcacaagcaggaatggtatttctgcaaacagggaacttggggcctgcaatgtacgagtttgttaaaggcatgatgacaaagatgccgagtcctgtgtccatcaaaaatttccattcaataatggtagataataaaagctccctgaaccgcaatttgcatgctaccattatgaacacttatttacaggaatctaaaggatggaaatcacctaataaagagatattggaattttattatctgggccttcttggatcagtttggtcgcctaatagttggagagacgatacgaagtctaaccaactaaataatggtattaaattaaaacatttggaagcagtgctttatgagaccatgtcaacaagatatttgaaaaatgtgcaaaccatttttaagaatttgattattacgattggtggattccacttattactgaaaaggcgttccgacgcagacataaatggtttacaagatttacgtaccaatgagttggattatctaaaattcgttttcagattcattggtcacattttaaacgatattgtcaaggagtcatggagtgaaaatgtcgaggttcccgaaatattaggtatggtaagagttatcaattgctggataaaatcaaacccaatagtattacaatattgtgaaactgatatagagtttgttaattccttggcatacttggttaacgatatcatgaaaaacaagccaagcctttctttcaacataacgggtcgccaccccaaaagaacatactggtttgaagaagatttgatggtgaagggtctatcatttatgaattttcaactatccgactttgaagattatgaggagataattcacatggacagtaagtttgatagattaattggtgatcctccattgtgtgataaagaacctgcatcttccgaaatgctattaagattgcaagctatcgtgaattcgagttataagctcctggcagaaaataaatgcggggtgaaatggtcagatgacaaatcgcgctatatctttaacaataaaatcggattcagagagaatgttaaatccaacacaaggtcaccaaaggagctaatcgaaaggactaagtcgcgaacaaagaccaaaacttctgttacgaatgggtcgatctccatggctgatttggaaaggcaaatgaggaacagcagcttaaatccttctaccccgattatgggttacagtggctcatctgtacctatggcaccggatacgtttgacgtcagacccagtgggataataacaggaaataagatgatctcaaatatgctggagattgaagtaagcgatcaaagacccgatgaaaccgttgcgaatttatctgctgattacaacagcgcagccacttcttcatctatttcaacccccgcaagtggatcatcctttaatttgaatagtatcatatcctctgtgcaaacggaacatttggaaaaatcatttgttgaatccatgcaaggactaaacgaacaaacaccaattaatgatatttatcatcaacagcaggttcaaagttcgacgcagagacatgtgtatcaacaacctccagcaatgtcctcgataaactcctcctatccaagtcccatgatgccttcatcggcatcagtatcatatccttacaattttttgaaccaacaaagccaaggggtagcgctgccatttaatgcacatgattcacaatggcaaaatgaaatatgcgcattgaattcaaggaactttttgaatccaacttggatgggcagccaaaaccagagtgccgcctcaccagtgtatacacaaccgcaacagcaactgtttcagcagcccatgcagcaagaaccggggaagtatgtgcaatttccgtatggcccacaagatactacaggcactatgaagggaagtggtcataacgatgtgttttaa

SEQ ID NO: 522 - DNA, 2511 bp, Saccharomyces pastorianus
atgctagacaaggcgccccctcaaagcaagcgcatagacgaatccaacgcggcggcctctttgctctcgatggaaacaaccgccaacaaccaccactacgagcccccccgcccactgatggcaaacagcagccaggacgcaagagtgcgcacagaggacgacggcggcgatgagacgaattcgcgccatcctaccatctccagcgccagcatcgagtctgtcaagactacatacgatgaaaaccctctgctgtccatcatgaagtcgacgtgtgcgcccaacaacactcccgtgcacactccgtctggctcgccgagtctgcaagtccagggcggaaacgatgctaaagacggcgacaactccaatggaaaggacgttgccgcggccgctgctagcttccaagtccgtcgtaacagcgacaacgctccccacactgccgccagcccgcatgcgccctccaatactccctctggagtcagctctttgtgcaatagtcggcccgtgcagcccaacgtattacaggtctctaacgctgtccagccgcggcgtcacgctaataacgacgttgtctttccttattcctcctctgcctccaatagcaacaagcctgcctctactactgttgtcggcggcgccaaagaaaaaataaatttgccgccaccaccagccatttcttcccccgttaccaccgctgttggctcgggctcgggctcgggcatgcgttcccgcacaggatcacagaatttgccgcccatcaatagcgcccacaaggacgacggcaagaacaccaactcgccactgtcgatccttggcaggaagaacagcagcaatagtaacaacgacggcaaatcatttcacggctcggagtcgagaggctcctccagcaataacgagaacggcggctttttgcgcggcgaaactaagcgcggcggtaattctccaaatgactctaaagctcagcatagtgatgcggatgatcagtatgccatgggcgtggctcctcgaaacttctatttcaacaaggatagggaaatcaccgatccgaatgtaaaactcgacgagaatgactctaaagtcaacatttcgttctggctgaactcaaaatatagggacgaagcttactctttgaacgaatcgacctccaacaacatcagttcgagcgcagatacgcccgctaattctcgtcacactaacaatagctcttctgtgcccagcagaaataattttcaacatttcagattcaaccaaattccctcccaacccccgacatctgcatcctcatttacaagcaataacaacaacaacaacaacaataaccaacggaataccattaatcgtggggaagacccgtttgccacttcatcaagaccatccaccgggttcttctacggtgatttaccaaaccgtaataacaagaacagccccttccatccaaatgagccttacgtcccgccacctccacccaaatacatcaattccaagctagacgggttgagatcaagattgctacttggcccaaattctgcatcttcttctactaaactggacgatgacttgggtactgccgcagctgtgctttcgaacatgagatcatctccgtatagaagtcacgataaacccatttcgaacgccaataataacaataaaaacacaaatacactcactgtgccaactagtaggcctcattcatcatctttcccatccaagggggttctaagaccaatactattacgtattcataactccgaacaacagccaatcttcgagagcaataattcaacagccgtgtctgatgaagaccaggatttgtcacattattatcttcacccctctcaaaattcaaattctaaaaaagtcctagacccaacttttgagtcaagagccagacaagttacttggaacaaaaatggtaagcgaatagatagacgactatcagcaccagaacagcaacaacaactggaagaacctgatttgaaaagatcaagaagatcagttggcaatggaagatccacgagccaaaataatagtgattataactcgcttggcgaatccccaacttcctctgctccttcttctccttctctgaaagcgtcgtcttcaaacttggcatatggcccagaatattctaatgccgattcaccagatacgagtaaatctaaagggaagacgaccaaggcaaaatccaaatcaaaacaatcctcaaaaaaaagatcaaacaataacagttccaaatcaaaggcaaacgactcgcaagaaatgaacaacaccgcttcctctgcagccgctcaaggtacaagatctcgtactggttgctggatttgtaggttaagaaaaaaaaaatgtaccgaagaaagacccaactgtttcaattgtgagagattgaaactggactgccattatgatgcgttcaagccggatttcgtatccgatccaaagaagaaacaaatgaaattagaggagattaagaagaaaacaaaggaagctaaaagaagagcaatgaaaaaaaagtga

SEQ ID NO: 523 - DNA, 2304 bp, Saccharomyces pastorianus
atgtcagtcttgcgatcacagcctacttctgtcgtaccgctacacctcataactcctgccagtcgcaacacagaattagagtcatcgctgtcgcactctgcagtaattgagcggcacaataacctctcggctccgaattcaaattcgaactcgaaccctgattcgaatcatcgaataaaaaaagatagcaacaaccacactagctaccactcttcctcgaattcagaatctaacatggagagccctcgtttgtctgatggcgaatcctctactccaacctctattgaagagttaaatccgacgataaataatacgaggctggtaaaaagaaattactcgatatcgatcgaccctttacataataacaacatcgacgacgatcatcctaatacgataacttcaccacagccaaacggtagtaataacaaggaattccagaagtacacttttcctgaagaaaacgactccaaaaaggtaacggctccctcgttaaattcaaacaactatttagataattccagtcttgttcacactgattcgtacattcaagacttaaatgatgaccatattttactgaataagcgtgtttctagaagatcttccaaaatatctacagtaacagcgacgtccacaacaataaaacaaagaagaaatactcaagattcgaacctacccaacattcctttccacgcttccaaacattctcaaatattacctatggacgattccaatttaataaaactggccaacacagataccaatgcgaagcctaatactgcccctagagttaaccattcaatgacttcgctgcccattcacccgctaccacaaccttcccaaaaatcaaagcaatatccaacgatatctaaatctaccacctctttacctccagcaaatgatcattactaccaacacaatcataacaataatcagaatcaacccgtcactactgctaccaatacggctttgaaaagatcagagtctgctaccgcagaaattaaaaaaatgagacagtctttgttgcataaaagagaaatgaagaggaaaaggaagactttcctggttgatgatgaccgtgttttgatcggcaacaaagttagcgagggtcacgtcaactttatcatagcttataatatgttaactggtatccgtgttgcggtgtcacgttgttcaggtataatgaagcccttaacccctggggatttcagattcaccaagaaattggctttcgattaccatggcaatgaattgactccctcttctcaatacgccttcaagtttaaggactattgcccggaagtgttcagagaattacgtgcattgtttggtctggaccccgcagactatttggtgtccttgacttccaaatatattctgagtgaattaaactcaccgggaaaaagtggttcttttttctactattctagagactacaaatacattatcaagacgattcatcattccgaacacatccatttgaggaagcatattcaagaatactacaatcatgtaaaggataatccaaacactttaatttgtcaattttatgggctgcatagagtgaaaatgcccatatcatttcaaaacaaaatcaaacatcggaaaatctacttcttagttatgaataacttattcccaccacatttggatattcatactactttcgatttgaagggctccacgtggggtcgctcaactagcatagataaggaaagattggcaaaagatagagcttatagacctgtaatgaaagatttaaattggcttgaagaaggccaaaaaattaaattcggtccattgaagaagaaagctttcttaattcaactgaaaaaagacgtagaactattagctaagttgaatacgatggattattccttgttaatcggaatacatgacatcagtaaagccaaagaagacgatttacagtttcccgacactgcatccattgaggagcaggcgcaaacacaagggcccatgagatctggtactggaacagtggtacggcattttttcagagaatttgaaggtgggattcgtgcatctgatcaatttaacaatgacctagacttgatatattacgtgggcataatcgatttcttgacaaattattcggtgatgaagaaattagaaaccttttggagaagtttgcgccatgacactaaactggttagtgctattccaccaagagactacgctaatagattttatgagttcatagaagattctgtggatcctctacctcaaaagagaaatcaatcatctgcgtataaagacaatcctaatcaaaaaaattataaagattga

SEQ ID NO: 524 - DNA, 219 bp, Saccharomyces pastorianus
atgagccagcaacaaggttactatcaacaaggccctcctcaacaacaaggctattaccaacaaggcccaccacaacagggctactaccaacaaggcccaccacagcaacaaccagtctacgttcagcaaggaccagcaaaggaggaaggaagctgcatggatagttgcttaaaatgtctgtgctgctgcttcttactcgagttgctctgcgataactga

SEQ ID NO: 525 - DNA, 2139 bp, Saccharomyces pastorianus
atggcaccaaagaaggggcaaaagaagaacgggcaaaacaaccatgcaagaaattctgacatggacgttgaagaccgtttgcaagctgttgtcttgacggattcttacgaaactagattcatgccgctaacagctgtcaggccaagatgtctgttgccgttggctaatgtaccgctcattgaatatactttggaatttctagccaaagccggtgtacacgaagtttttttgatttgctcttctcatgctaaccaaattaatgattacatcgaaaactccaaatggaatttgccttggtctccattcaaaatcacgaccataatgtcccctgaagctaggtgcacaggtgatgtcatgagggatttggataacagaggtatcattactggtgatttcattttagtaagtggtgatgtggtgaccaacatcgacttcagtaaaatgctggaatttcataaaaaaatgcattcccaagacaaagatcatatctccaccatgtgtttgagcaaagctaccagttaccctaaaacaagaaccattgaacctgccgcattcgtcttggataaatccactaatagatgtatttactaccaagatctaccattgccaagctctagagaaaagacttccattcaaatcgatcctgaattattggacaatgttgatgaatttgtgataagaaacgatttgatcgattgtaggatcgatatttgcacttcccacgttcccttaattttccaagagaatttcgactaccagtcactgagaacagatttcgttaaaggtgttatctctagtgatatcttggggaaacatatttacgcctacgtaacgggtgaatacgccgtaagagttgagagttggcaaacctacgatacaatctctcaagatttcttaggaagatggtgttatcctttagtcttggattctaatatacaggatgaccagacatattcatatgaatcaagacatatatacaaagaaaaagatgttgttttggctcaatcttgtaaaattggtaaatgtactgctatcggctcaggcaccaaaatcggagagggtactaaaattgaaaactctgttattggaaggaactgccaaattggtgaaaacattagaattaagaatagctttatttgggataactgtgtcatcgaaaacaatagcattatcgaccattcattactcgcttccaacgccatgttgggaaccaatgtacacgtaaatgacggttgtatcatcggctataatgtcaaaattgatgctaacatggatttagatggaaatactaaaatatccgcaaacccattgaagagcgctttctctgggatgtatggcaacgatgatgacgaagaacttagtgaagacaatgatggccaagtattagctgtctctatagttggagaaaagggtgttggctacatctatgaaagtgaattttctgatgacgaagacagttctacagaagcctataaagaagtgaacactttgagtaaccaattagaagagttatacctaagtgatgactccatttcctctaccaccaaaaagaccaagaaaaagagaacgatgtctgtcaatagtgtatacactgatagagaagaatttgattcagaatttgaggaagaagatttcgaaaaagagggtattgctactgtagagcgtgctatggaaaataaccatgatcttgacaccgccctactagaattaaatactttgagaatgagtatgaacgtcacgtaccatgaagtgagaatagcaaccattactgcattattgaaaagagtttaccatttcatcgcaactcaaacattaggtcccaaggatgctgtggccaaagttttcaatcaatgggggctactatttaagagacaagtctttgatgaagaagaatacgttgatctaatgaacatcctaatggagaaaattgtagaacaaaattttgataaaccggatttgatcctatttagtgcattggtttctctatatgataatgacatcattgaagaagattccatttatagatggtgggacagtgtttctgttgatccttgttatgatgaagttaagaaattgacggtgaaatgggtcgaatggttacaaaatgctgatgaagaatcttcctcaggagaggaataa

SEQ ID NO: 526 - DNA, 1680 bp, Saccharomyces pastorianus
atgtcccaattatttaataattcccgctcagacactctgtttcttggaggtgaaaaaataagtggtgatgatattcgtaatcaaaatgttttagccactatggctgtagcaaacgttgttaagtcatcgttaggccctgttggattggacaaaatgctcgttgatgatattggtgatttcaccgttaccaatgatggtgccactattttatctttgttagatgttcaacatccagcgggaaaaattttggtggaattagcccaacaacaagatagagaaattggtgacggtactacgagtgttgtaattattgcttctgaactgttgaaaagagctaacgaattagtcaagaataagattcatccaaccaccattataaccggcttcagagttgcactaagagaagctatccgttttattgatgaagttctttccacaagtgttgattctcttggcaaggagacactaatcaatattgctaagactagtatgtcttccaagattattggtgctgattctgaatttttcagtaacatggttgtggatgccctattagctgtcaagacacaaaattctaaaggtgaaattaagtaccctgttaaggctgtcaatgttttaaaggcacatggtaagtccgctaccgagtctgtgttggttccaggttacgccttaaattgtacaattgcctctcaagctatgcctaagcgtattgacggtggtaatgttaaaatcgcatgtttggatttgaacttgcagaaagctcgtatggcaatgggtgttcaaattaacattgacgatccagaacaattagagcaaatccgtaaacgtgaagctggtattgttttggaaagagtaaaaaagatcattgatgctggtgctcaagtcgtgttgactactaagggtattgacgatttatgtttgaaggaatttgttgaagctaagatcatgggtgtaagacgttgtaagaaagaagatttaagaagaattgctcgtgctacaggcgccacattagtgggttctatgtctaacttagaaggtgacgaaacatttgaaagcagttatctaggtctttgtgatgaagtcgttcaggctaaattttccgatgatgaatgtatcttaattaagggtacttccaagcattcttcttcttcaattattttaagaggggcaaatgactattccttagatgagatggaacgttctctacatgactcactctctgttgttaagagaactttggaaagtgggaacgtcgtaccaggtggtggctgtgttgaagccgctttgaacatttatcttgacaattttgccactacggttggttctcgtgaacaattagctattgctgaatttgctgctgcattattgatcatcccaaaaaccttagcagtaaatgccgctaaggattccagtgagttgattgctaagttaagatcttatcatgctgccagccaaatggctaaaccagaagacaccaagaggagaagttacagaaattacggtttggatttgattagaggtaaaattgtagatgaaattcatgccggtgttcttgagccaactgtaagtaaagttaaatctttgaaatcagcgttggaagcctgcatagcagttttgagaatcgatacaatgattacagtagacccagagccaccaaaagaagacccacacgctcattga

SEQ ID NO: 527 - DNA, 2787 bp, Saccharomyces pastorianus
atgagtgaagtcggtatacataatcacagaaaatcagtgacaaaacctaggagaagagagaaggttatcgaattaattgaagtagatggcaagaaggtaagtacaacatcaacgggtaaacgcaaatttcacaacaagtcgaaaaatggctgtgacaattgtaaaagaagaagagtgaaatgtgatgaaggaaagccagcctgcaaaaagtgtacaaatatgaagttagagtgtctatatactccaatccacttacgcaaagggagaggcgcaacggtggtaaaatacgtcacccgaaaggctgatggtagcgttgagcccgagtcctcggtagatttgccaactatggtcaagaaggagcagacgccctttgatgatgtttcctcagcaataaaagcttcgggatcatcaaacgattcgtacccatctagcacttccacaacgaaaagcgaaagtgaagaaaaatcatcagtacctatagaggataaaaatactatgacccctctaagtatgggtctgcagaatacaataaataaaaaagatatgatgaacagtttcttctctcagaacggcactattgcatttggctccccagaaaggctaaactcgggaattgatggcttgttgctaccacctttgccctctgcaaatatgggccctttccaactgcaacaacaaactcagtcgcagcagactcagtcgcagcaaactcaaccccagactcaatcacagcggacccaaacgcagcaacaaccacaacctcaaccgcagccagcaagtgggactccaagcgatagatatggctcgtttgatctcgctggtagtcctgccttgcaatcgacgggtatgagtttatcgaatagtttaagtggaatattactttgcaataggatcccatcgggacaaaattacactcaacaacagctgcaatatcaattacatcaacagttgcaactgcaacagcatcaacaagttcaattacagcaatatcaacaattacgtcaggaacaacaccaacaagttcagcaacagcaacaggagcaactccagcaataccaacaacaatttttacagcagcaacagcaaatactacttcagcaagagcagcaacccaacgaagaggaatctgctattcgggaggaaactagcaaaaagataaagggacagcctttgcaaccgcacacaggcgaacctactttgaataatgatgccgccacactacaagcagacgcactatctcaattaagcaaaatgggattgagtttgaagtccctaagtacttttccaacagccggtattggtggcgtttcttatgatttccaagaattgttgggcataaagttgccaatgaataatggtaactcaagagccgcaaaagttagcaacgcagaggaagctctggccaatatgcaagaacatcatgagcgcgctgcagcttctgtgaagggaaacgatggtcaattatccgatacaaaaagcccaacaccatcgaacgtacaaggaagaagtaccagtatattgggatcgcaaggatctaccgcggtttcaacgatggcccctatatcaatgatcggacgacatatgaacggtgacgatgccctttctccttcgacgcctgctgcggtgctggacggcagacaaggaatacaagacactttgagttctctaggaaatttgacaaaagtagccttagaaaatgacggcacaacaatgggtgtacaaacgttacaaacaaggaatgacgatcaaggctcacaacaagacatgtcttcaaaattaaacaacgaagacggagattctatttctgtcggtacaagtggtatttccaaacttttggatctttccaccaagggcaatctgaatctgatagacatgaaattattctatcattattgtacaacggtctggcctacaattactgcggcaaaagtttctggacctgaaatatggagggattatataccagaactggcttttgactatccattcttaatgcatgccttattggcattcagtgccacacacctttcgagaactgaaacagaattagaacagtacgtttcatctcaccgcctagacgctctaagattattaagagaggccgttttggaaatttcagaggataacactgatgcattggttgccagtgctttgatattaatcatggactcactggcaaacgctagcggaaatggtacagtaggcaaccaaagtttaaatagtatgtcgccaagtgcttggatattccatgttaaaggtgcagcaacgattttaaccgctgtatggccattaagtgaaagatctaaattccacaacattatatcggttgatctcagcgatttaggcgatgtcatcaatcccgatgtgggtacaataaccgatttggtatgttttgacgaaagcattactgatttatatccggtcggcttagattcgccatacttgataaccttagcttacttagacaagttgcaccgtgaaaaaaaccaaggtaatttcatacttcgagtttttacatttccagcattattggacaaaacattcctcgcgttattgatgacaggtgacttaggcgcgatgagaattatgaggtcatattataaactactgagaggatttgctacagaggtcaaggataaagtctggtttctcgagggtgttacgcaagtgttgcctcaagacgttgacgaatacagcggaggtggtggtatgcatatgatgctggatttcctcggcggtgggctaccatcaatgacaacaacgaatttttcagacttcgcgctgtga

SEQ ID NO: 528 - DNA, 1056 bp, Saccharomyces pastorianus
atggtcgttaataatccaaataactggcactgggtggacaagaactgttttggatgggccaaagagtatttccaagagaaactggttggagtggagaccggctcagcaaaggacaacaagtatgccaaaatcaaatctgtttcatccattgaaggtgattgcgaagtcaaccagcgtaaggggaaagtcatatcgttatttgacctgaaacttactctgttaatcgagggccacgttaactctaaggacggctcgccattgccatttgaaggtagcatcaacgttccggaagtcgccttcgacagtgaagagtcaagctatcaatttgaaatatcgattttcaaggagactagtgaactgaacgaagtcaagccggttatcaggtccgagttgttgcccaaactaagacagattttcctacaatttggcagagacttactggccactaatgctaatgacatccaagtaccggaatctcaagtgaaatccaactacacaagaagcaaccagcaaagtagccgcggtgaggccaagggaccagcttcgaagccaggaaagagcgcgtctccatctgcagcagcagcagcagcagcagcaggctccgatgccaacaaacccattcaaaaggggagcgggaacagcacctccatctatctagaacccactttcaacgtgccatccagcgagctatacgaaacattcctcgacaaacagcgtatactggcatggagcagatccgcacagtttttcaacagcacgcccaaactagaggccaacgagaaattcgaactattcggtggcaacgtcatcagcgagctggtgtcgtgcgaaaaggacaagaagttagtgttccgctggaaactcaaggactggtcagccagcttcaactccaccatcgaaatgaccttccacgaatctcaggagttccacgaaaccaaacttcaagtcaagtggacgggtattcccgtcggcgaggaagaccgcgtgcgcggcaacttcgaagattactacgtgcgctccatcaaactgacctttggcttcggtgccgtgttatga

SEQ ID NO: 529 - DNA, 2139 bp, Saccharomyces pastorianus
atggtgagtgcacctctgttatttctgctgctaatcgagcaagcgccactcgtcttttcatcacagcaggtccaaggtaacaagcccgcgcacgttataggtgtttcgaaagagaagcagtacttgtatgcatcaaacgaaccggattcgaccaagtggcactgtttaaaccgtgcggatattgtgctgaacttaagccagattaatgatggggtttgtgactgtcctgatggttctgacgagcccggcacctctgcttgcgatgaagatatatttcaaatggtagcggagcaaagtaatgaggtgaataagtacttttactgtgataataagggcttcattccaagacatatacgaagatcagttgttgcagacggcgtttgcgattgttgtgattgttcggatgaactactgtctgaatataaaccttttgatgtaggatccgattgtcctaaactaaaaaatgaatttgatgctatggcttctactgaactacttggctatgaaaagggtaggaaagcattgttagcattggaaaacaaatacggcgtaaagccagaggtagatgatacggttagtagtgacagcttagagaaaactaaacaacggcttgttgacgacataacattactctccaataaacacgcaaaagacaaggttaaattagatcaagcaaaaagaaactatgtcgatcaattgcaaattgaggatccagttttgtatcaatttgaacgaatgagtatgactgctttaacttcagatgtgtattcttcatttaaggtagtttcgactgtgagcaaaagtcatgaagatatcctgaaaatcttagttgaactatctgattcttatacgcgttctttaaatgatgaagttgttaataacggtatcaagaaattcaaaaaactgaaaaggcaggccgaaaaggccaaacttactgcggacagtgtaattgatgacgaccaacgagataatctcatctcatacttcacagaggaattacctcaaatgtttttggaaagagagtcagaatactcgttaagatatgttataggcaagtctaactttgtcaaagcattgattgagggtaaaattaactataccaacgatatactacaatatgtcaaagaatatagctcaattatgaacgatatttcccaaaactataatgtcaacttccaagatgcaggagtcaaaaacgctgttgattcatataaggattatttgagtaaatataatacattgattggacacggccaaatatctccatcagaaactctatcaaaattactgaatgaagtgacatcattcgttaatgagaatgcaccaaagatattgtcgcctgatgccaatgaagaagaacacgctacgaatagtaatagcggtggtgctttggaagacttacgtaataagatttgggatgttatacccaatctagatcaattttcctctaggggaaagctaattacattgaagaagcagctcgacgtttatgaaaaagattttgctcagctagattcaaaattacaactgacgaaagctaaactaactgcaatagatttaacggatggagaacaagatgaagataataacgctattgtgggagaactgactaagctattagaaggtatgggatcccagtcgtattgtattgaagacgtattagacaactattcatacacaatatgttttcaggaaccaatgaatcaaggcacaatataccagattgaaagtaagtctagcggtaaaaaggtcttgattggtcgtttcaagacattgggtattgacgcagacttgaacatgaacaagtacgtagagcatttgaagagggcacacagtgacgatagcgatttgacttcacatttagcaagtatgcaagagggtgatgagaaaacgcaaaattacatattcggcaacttgaacgaattggacaatgggtttgtattgcaatacgaaaacggagaccagtgctggaacggtccacatagatcagccacggtattcgtccgttgcagtgacactttccaaattcggagcgtacacgaagtaactaagtgtaactacatatttgacgtcagcgggccgctgggctgcgacaaagcctttgaatacaagcctccgaagttcaacttggccaaataa

SEQ ID NO: 530 - DNA, 1263 bp, Saccharomyces pastorianus
atgcttcaatcgggaaatgaaaaaataaagttcgcttccatccaagaggtggactataaaagtccggtgggcaagagtaagaaatatactcttattaacgctatccaaccattagagtggtattgtaacaatgatagtgagacaggttaccaacaaactatcaacaacaacaagagtgatggtattgtcagcagtggtataggtttattcaaagcagtgaaaaaatccatggagacaagagtcgagactcaaacattgtattttactgacttacaatctgggttatgcggatttgtacaattactctactccacagtaatgggtggtatctataagggctttcagctaaatttcaagatttttagtttagaaaataacaataacgattatgatgtttgggaaagttttaagttgaatgacatatctgaattcaaaccattgaagtttgtttctagaaatgtcattttcgaatttttggacaacaaggatgaaaacttgggatcaattggccaattatctgtcaaatgtgatttgcccacttgtaataatacgattcaaaacttgaagattgacttgttgatagatttgtttcaaggtttcaaaatgaatcctaacggctgtaattactactttgacaaagagatctctgccactggtgaactcctttcctcagacaaaatgattagacacgtcttcgtccccaaaggtagttgtaatggccagatttcttatgacaaaaaattaaataacggaagcttccaaagtaaagtgatcgaattaaccgatgtccctgtggcttatctagacgccgttcaaggtcttttaccaaataaagcagctagtaaatggaacttcttatgtttccacagtgaaaactactccattttggctatagaattcactactcctcaagaacatgataatgtcacagtaacagtatggtccatatctgagaagaacaaactgaccgctattggttcttccgtccaaagtccaaaacgtcacgtgcggtttcgggctactagtacagataaagaaaatggctggatatatccaacttccatcaaatttcccggtagattttcagagcataatttgaggttggttaatagatacgatgttcttggtgaactgccaagcatggttagatcgctagctcagaaaatcgtcagcattaatcctttcatttaccaatattgccaaccttctaaattcaaacatgaaaagggtatttcaatcattgagagtacctttatcagttga

SEQ ID NO: 531 - DNA, 396 bp, Saccharomyces pastorianus
atgtctgctaaagccgaaaagaaacctgcctccaaagccccagctgaaaagaagccagctgccaagaagacctctacttccactgatggtaagaagagaactaaggctagaaaggaaacttactcctcttatatttacaaagttttgaagcaaactcacccagacactggtatttctcaaaagtccatgtctattttgaactcctttgtaaacgatatctttgaaagaattgccaccgaagcttctaaattggctgcttacaacaagaagtctactatctctgctagagaaattcaaaccgctgttagattgatcttaccaggtgaattggctaaacatgctgtttctgaaggtactagagctgttaccaagtactcttcctctactcaagcataa

SEQ ID NO: 532 - DNA, 399 bp, Saccharomyces pastorianus
atgtccggtggtaaaggtggtaaagctggttcagctgctaaggcttctcaatctagatctgctaaggctggtttaacattcccagtcggtagagtgcatagattactaagaagaggtaactacgctcaaagaattggttccggtgctccagtctacttgactgccgtcctagaatatttggccgctgaaatcttagaattggctggtaatgctgctagagataacaaaaagaccagaatcatcccaagacatttgcaattggccatcagaaatgacgacgaattgaacaaattgttgggtaacgttactattgctcaaggtggtgtcttgccaaacattcaccaaaacttgttgccaaagaagtctgccaaggctaccaaggcttctcaagaattataa

SEQ ID NO: 533 - DNA, 669 bp, Saccharomyces pastorianus
atgtctagctcagaatccattagaatggtcttgatcggcccaccaggtgccggtaaaggtactcaagctccaaacctgcaagaacgtttccacgccgcccatttggctaccggtgacatgttgagatcccagatcgcaaagggtactcaattaggtttggaagcaaagaagatcatggaccaaggtgctttggtctccgacgacatcatggtcaacatgatcaaggatgaattaaccaacaatccagcttgtaaaaacggtttcattttggacggtttcccaagaaccattcctcaagccgaaaagttggaccaaatgttgaaagagcaaggtactcctttggaaaaagccgtcgaattaaaagtcgatgatgaattattggttgctagaatcaccggtagattggtccatccaggttccggtagatcttaccacaaactcttcaacccaccaaaggaagacatgaaggacgatatcactggtgaagctctagtccaaagatccgatgacaatgctgacgctttgaaaaagagattggatgcttaccacgctcaaaccgaaccaattgtcggtttctacaagaagtctggtatctgggctggtgttgacgcctctcaacctcctgccaccgtttggaccgaaatcttgaagagcctgggtaagaactaa

SEQ ID NO: 534 - DNA, 1854 bp, Saccharomyces pastorianus
atggatcacgacactgaagtcataatcaaggatttcaatagtattcttgaagagctaactttcaattcgagaccgatcattaccactcttacgaagttagcggaagaaaatatatcatgtgcccaatattttgttgattgtatagagaataggatcgaaaaatgtatgcctaaacagaaactatacgccttttacgccttagattccatttgtaaaaacgttggtagtccatacacaatctacttcagtagaaatttgtttaatctatacagaaaaacatatctcttggtggataacactacaagaacgaagctcatcaacatgttcaagctttggctaaacccaaacgacaccggcatgcccctgtttgagggctctgctctagagaagattgaacaatttctaataaaggccagcgctttgcaccaaaaaaatttacaagcaatgttaccaacccccactgttcctcttctactaagagatatcgacaagttaacatctttgaccagcgacagattaaagaaccagccaaacgatgaaaaactgaaaatgaaacttttggtcttatctcaattgaagcaagaactgaaaagagagaagctaactctcaatgcgttaaagcaggttcaaatgcaactgagacaggttttttcgcaagaccaacaagtattacaagaaagaatgaggtatcacgaatttcagcagcaacagcaacagcaacagcaacaatatcacgaaactaaggaaacccaaggaacctctcctcaaaatttcaatgcggctatcccactatttggtaacaaccctgatataatgaaccatcagggcactttatcttcatctctctttggaaacatttccggtgttgaatcttttcaagacatcgagaaaaaaaaaaacctaagtaaaatcaaaaacctttatgaatctttgcaatctgaggggttaatatatactccaccaaaggaatccattgtaacgctttatacaaagctaaatggccattcaagctattctttggactccagggaaaaacaattaatgaaaaacctaccaaagataccgctactaaatgacattctctctgactgtaaagcctatttcgccacagtcaacgttgatatcttgaataacccaaccttacaactatctgaacaaaccttacttcaagaaaacccaatcgttcaaaatagtctcattcatttattgtacagatcgaaaccaaataaatgtagtgtgtgtggtaagagattcggtaattcagaaactgaaaaacaactacaaaacgagcatttggactggcatttcagaataaatacaagaattaaaggttctcaaaatacagcaaacacaggtataagcaactcaaactcaaataccactactacaaggaaaaatatacaatcaagaaactggtatttgagcgattctcaatgggtagctttcaaagatgaagaaatcacctctacacagcataaagttgactacactgatcccaatattatggaaaacagtaataacatcgataattcaaatagctacgctaatgacattaatgaaaagtctgcaaaggacactttaggaaatcgtaaagataatgaagtaaaaataaaggaaaaatatgttgtcgtaccagaaacttcacaggatatggttttcaagtgtccgatttgtaaagaaactgtcaccggtgtttatgatgaggaatcgggtgaatggatctggaaaaatacgattgaggttgatgataaatattttcattctacttgctatcatgaaacctccgaaagtttaaataaatttgatgaaggctcagttgatttagacgatctaaaaaaattaatcactaaataa

SEQ ID NO: 535 - DNA, 1407 bp, Saccharomyces pastorianus
atgcctagtgataataatgaacaagtacacggatctccttcgagtgagcacaggctgagagtcgagcgggatgacggtaaccattacgacgtgtctcctgacaggtatgctcctcacttgtcggagttttattcgatcgtaaacagcaaaaagcccgtggcgagtagtgctggctccgacgataatgatcatctggacgacatgcaccatttgcgtacatccaaagtatattccaaggcccgccgggcatccagtataacttccggtacaagtacgatcaacgacctgcaaactctaattacaaaaagagatgtcaaggatactcaagaagcgctgtcgactttgtttaggaattcgaatgcttattcggactcgttgttgaaaacatctcacaatggggcggagattgccctttctttggaaaacatcgccaaattgaaaggctgcaacgacgaaacagcagagaagctgctaagtgccagcgggttgttctaccttttgtccaatcatcagctcataatgtcaaagtatttcaatgaattactgggagacaacttaattgacgacatcgatgaatttaagttacagacaaagataatggagaataaattcaaggtccaaagtaaagaacaaagcttgaagttgaaattgcaagaaagacacaatttcgatatttcgaaaaggaaaataaggaacttgatatcgtaccgagaaagcctctccagtttacaagcacgattagaccaactagagacgctaaaacatgatttttacatggactcatacgagctcgtggaaaatacctgcaataaagtactaaacaaagtcgccacagtgtccagggcgcaagtggagatttctgagaatattgctaggaagggctggtctggcggtggactggatgacttattatatgatgcggacgaccctttcagcaagaagaccaagggaccctacgggaccgcggacggagatgaagagacgggagacggggaagagtgtatggacgacaatgaggatacaagcgggggcgatgtggtgctcaatgaactactagaaggaactagtcgaccttccacgtcaaaaacattttcaccaaagtccaagagctcctcgacagcatctacgccgcaccattcctactccaatacaaatgtggaggaggtacgaagcagcaacaacgaaggccgcgaaaatggcgacgaagacgatgatgaggatgtggacaatctgatgggggcggagaactcgttttcgttgccgcctacaagaaactcaaacgaggaaacagcggaaacggcggaaacggcggatacgttgagacagttgtctattgaaagggacaatgacggcaacggcagcgatagcaatagcgacgcgatggaagaccagtcaagtaatatataa

SEQ ID NO: 536 - DNA, 621 bp, Saccharomyces pastorianus
atgcgttggtggccatggtcaaatcagacacagcatgagcagcagcagcagcagcagcagcaagacagaccggaaggagaacccgtactgacgaactactcgcggggccagaagattctactggaggatactccgcccaagttcaccaatgacctatccaactcccagttggccaagaaacaagaacgggccacgttaaaggaggcctgggactcagtcaggtggggcgacttctctctagagaggctgacgtcgatcccgtgcttcagagatgcgggcatgctcgggttttccagtatgtttttgatggggtctgtcatattcatatatcataaaagccccacaaaagccacgaactgggccatgagctctctgatactgggatcaattgtcgggtgggagcagtgtaggttgaagagacaaaaaagcttccagattgcccagttggcaaaggaaaccgtggcgaaaaaggaaagaccaatgatgcataacgtggtgcatgacccagctttgccagaacaatgggaggttgccaagaatgaaaagcaggcccagttccagcaaagcaaccagcgcctatcgcagggctcttctgataagaaatggtataaattctggtga

SEQ ID NO: 537 - DNA, 882 bp, Saccharomyces pastorianus
atgtctgctcccgttcaacatactcccgttcaacaacaacaacaaagctgtaattgcgatttgctattatggaggaaccctattcaaaccggtaaatactttggtgggtccttattagccttgttaattttgaaaaaagttaacttgatcactttctttttgaagattgcttacaccgtactattcacaacaggttccattgaattcgtatccaaactctttttgggccaaggtctgatcactaagtatggtcctaaggaatgtccaaacgtcgctggcttcatcaagcctcgcatcgatgaagccttgaagcaattgccagttttccaagcccacataagaaaaaccgtgttcgctcaggttcctaagcacactttcaaatccgctgttgccctatttctcctacacaagttcttctcatggttttccatctggaccattatgttcgtcggcgacatcttcgttttcaccttgccagttatctaccactcttataaacatgaaatcgacgccaccgtcgctcaaggtgtagagatctccaagcaaaagacccaggaattctcccaattggcctgtgaaaaatcaaagccatatttggacaaggtcgaatctaaattgggccctatctccaagttggtcaaaaacaagactgctactgtttcctcaactactggtcctgaaaccgccaccactgtcaacttggccgctgaagttccattagaacctgagtctaaagcctatacatcttccgctcaagtcatgccagaagtcccagaacacgagccttctactaccagagaattcaacgtcgatgaattgtctaatgaattgaagaaaagtacaaagaacttgcaagatgaattggaaaaaaacaacgcttaa

SEQ ID NO: 538 - DNA, 2082 bp, Saccharomyces pastorianus
atgttacgatcaaccgctgctactcgctcattccatagctccagagcctggttgaagggccaaaacttgactgagaagatcgtccagacctacgcagtggacctgcccaagggcaaagttgtctattccggcgactacgtctccatcaagccggctcactgtatgtcccacgataattcttggcctgtggctttgaagttcatgggacttggtgccaccaagatcaagaacccctcacagatcgtgaacaccctcgaccacgatatccagaataagtctgaaaaaaacctgaccaaatacaagaacatcgagaactttgccaaaaagcacaatgtcgactactaccctgcaggtagaggtatcggccatcaaatcatgatcgaggagggctacgcattccccttgaacatgacggtcgcatccgactcgcactcaaacacctacggtggccttggttcgctggggacccccatagtgagaacagacgctgcggccatatgggccacgggccagacctggtggcagatcccaccggtggcccaagtggagttgaagggcaaactaccacaaggagtctccggtaaagatatcatcgtcgcattatgtgggctcttcaacaacgaccaggtcctaaaccacgcgattgaattcacaggcgactctttgaacgtgctacccattgaccatagactgactatagccaacatgaccactgagtggggggctctttctggcctgttccccgtagacgaaactttgatcaactggtataagaaccgtttacaaaaattgggcacaaatgaccatccaagaatcaacccaacaaccatccgtgaactggaggaaagggcgcagattgttagaccagacaacgatgccagctatgccaaaaaactggtcatcgatctatccacgcttacccactacgtttcaggccccaacagtgtcaaggtctcgaataccgtgcaggacctatctaaacaagacatcaagataaataaggcgtatttggtgtcgtgtaccaattcacgtttatctgatttacaatctgccgctcaagtggtttgccccactggggacttaaacaaggtcaacaaagtcgctccaggcgtgcaattttatattgctgctgcctcatcagaaattgaaaaagatgcccgtcaaacaggtgcctgggaaaaattgttaaaggctggttgcatcccattaccttccggttgtggtccatgtattggcctaggtgcgggcctattggaaccaggtgaagttggtataagtgctaccaacagaaacttcaagggtagaatgggttcaaaggatgcattggcttatttggcttctcccgcagtggtcgctgcttccgctgtgttgggtaaaatcggttcacctgctgaagttctatccataagtgagatcccatttgatggtgtcaagacccagataaccgaaaacactgtctctgaagaaaagggcgaaacagaagctccggttccaaagcaatccgttgaaattttggaaggtttcccacgagagatctcgggcgagttggtcttttgcgacgctgacaacatcaatactgatggtatttatccaggcaagtacacttaccaagatgacgttcctaaagagacgatggccaaagtctgtatggaaaattatgacgctgatttccaaacgagggcccatcctggcgatatcgtcatcagcgggttcaacttcggtaccggatcctccagagaacaagcggccactgcattattggctaaaggtatcaacttggtcgtgtccggctccttcggtaacattttctctaggaactccattaacaatgctctgttgactttggaaattccaactctagtcaagaaactacgtgagaaatatcaagacgctccaaaggaactcacaagaagaactggttggtttttgaaatgggatgtagctagtgccaaagtagtcgtcaccgagggctctttggatggtcccgtcatcatggaacaaaaagtaggtgagttaggtaagaacctgcaagaaatcatcgtgaaaggtggcctagaaggttgggtcaaatcccaactataa

SEQ ID NO: 539 - DNA, 657 bp, Saccharomyces pastorianus
atgtttagctggactttttatgtttcaatattgattgtgttagcaggtaccttcttgatacatcgaaatacgaatactgatatggtcgatagtttcaaacgagaagtagacttgcccatacctgtacaaccacgtccaccattcccgcttgttacagattattgtgacattgttagcgggtttggacgtggatctgctgaattaggcatcccaacagccaacgtgcccatagagcagttacccaaaggtataaacgatctggatttgggtgtttattttggatttgctcacatcaaggctattgaccatggagaacccttggtcgaaacaaggcaggatggtagaactgtggtttataattacggtcaatacttaagtgaagcaaatggtgatttaaacgtgctccccatggtactttcagtaggaaaaaatccgttctacgggaatgatttcaaaaccatggaattgcatgttcttcacgatttcaagaacgatttttatggggccaaggtcaaatttaatattctgggccacatcaggcccgaattgaattatactactaaagaagccttaattaatgatatcaatatcgatataaagattgcacaaaaattcctatccacctcgccgtatcaatcatttaaacgtcaactatag

SEQ ID NO: 540 - DNA, 879 bp, Saccharomyces pastorianus
atgcaaaagtttacatcagttactcatagatcattttcccattcatgtattaatgctaaagctgcatgctcgttaatcaaacccgttcatcacttagtaaagattgacaaatcaaagttatcccctaggtttccagaactgaaatacgataaaagtgatattaggtcacctggattcaaaccaaaagacactcacgcagacaggctcaatgatcattatctaaacactctacaatccgaccttctgttgatcaattattcgcacgatgcggccgtagaaaaaggccttaaacaaagagcatggagtggggattcgccatatcacttgaacagaccacctaagaatcctcagggttctaaagtccaactacctgatatccatcccatcaaatggggcaatatccctggattagaaaatgttgtgataaattgttttgttagagaggcaagagaaaaccagttgtttgctatcactgcagctcttcaattacaacaaataaccggatgcaaacccaaaccaattttttctaaaaacgatgttcctacctggaaactaagaaagggccatcagatgggggccaaagttgaattgaaaggtaaggaaatgtcacagtttttaacgacattgacggaaatcgttttaccaagaataagagaatacaaaggtattagcaaccaatccgggaatagatttggtggaataagttttggtttgaccgctgaagatatcaagtttttccctgaaattgatgcgaaccaagactcatggccaaaaacttttggtatgcatataaacataaacacttctgctcaattagactaccaggcaagaactttgttaagtggattccagttcccattcttcggagatgaaaaataa

SEQ ID NO: 541 - DNA, 1650 bp, Saccharomyces pastorianus
atgacagttcaatcggcatggacagaaaaagttgaattaaaacgagagcagttaaaagacaaaatagctgatgaatggaaattagacaatgaaaccataaggaggctgaaggatgacaaaaaaaatctcatcaaaaacatcgatgatttgtgttcttctatagagaatcaaatcactcattccacaattattaaattaagggagaaactgaacgcaaaacaattaacctgttataaaataacctctgctttttgtcatagagcggctctaattcatcaagttgtgaattgtttatcggaaattatgttcttagaggcactgaaactggctgattactatgataaacatagaccagccacattaccgcctctgtacggtataccaatttctctcaaggaccaatgtaatgtagagggagtagacacctcactaggttatttatctcgaacttttaaaccgaagaccaaggatgaggagtcattgattgttagttatttaagagacttaggagcaataatatttgtgaaaactacggtaccttcatcgatgatggctacggatacagaatctaatacgtttggatatacgtataatagtataaatttgaatttctctagcggcggttcatcgggtggagaagggtcgttgatcggcgctcatggttctcttttgggcttaggtactgatataggtggaagcattagaattcccagtagttatcaaggattgtttggcctaaaacctacttttggacgggttccttacttaaaggtggataattcattcgaaggaagagaaacaattccaagtgttattggaccattagcaaaagatctttctgatttgaggtacttcatgagttgtatcataaatgtctgcaaaccatggatgcgagatgtaaaatgtcttccatactattttgactccactgcaaatgaattacatagtgattatgttgttgggatatggtacagtgatgatgttattggtcttccacccagcgacatcagggctttaaaactgtgtgaagatctaattaacaaaaccgaaggtatgaaagcagtcaaatgggaaccgcccagtaaactaagtatagagttatttgacatcgcaaatgaagcagatgttgcggactcaggtaacgaaataagagacgaatttgaactttctggggaaccgctgttggatattttaaaaccaatggttttagatgatggaagacctccatacacagtcaatcaatggtgggatttgaccaaaagagtttacaatgcgcaacaatctatgagagaatactatctctctcttccagaattagaaagacctgacgttgttatatgccccacaacattaatgcctttcaggcctggtgacatgttaaagaccactttaaggcacattttactgttcaacgtcttaaattttccatctttgtccgtacctgtaggtactgtcgattgccagatggatggactaatggatgtttcatcagctcttaatgcagaagataaaatgatcaggacatattggaatgatttgatagagtctggagatatagaggggtttcccgtaggtctacaaatagtcagccctatttttgatgacagcgagatttgtaaattcgcatcttggctttttaccaaaatataa

SEQ ID NO: 542 - DNA, 1770 bp, Saccharomyces pastorianus
atggcaagaccggttgatgtaagccagctaattgttggcctaaacaagaaaaacgggccaaataaggatatttcaggcaaagttaagaagcccaagtttttgagcaaacaagaaagacttaaacaaatagaatttaacggcagtacagagagtttgaaatctgtaaaggataataccgctgaactctttattaaacagcaagataatgataacaatgatccactcgaagaaggtggcaatgaaaaaaatagtttgcccaagcaaaatggctccaaatttcagttttcatgggacgaaagcgaagatactttggcaggctataatcctattgtttcaacgaacgttaatgctttgttgcaaaagagggaaaccccatctaagacggctttagagtcctcgtatatggggaagcattggaccgagaagtctttgagtgagatgaatggaagagattggagaatattaagagaagatttcgctattgttacaaaaggtggggcagtggagaacccgatgaggaactgggaagaactggatgtcataccgaaagatctattacgcatcgttactcatgacctgcattttttgtcaccaacgcctattcaaaggattactatccccaacgtctgtaggaaaaatcaatatagggatttccttggtgtcgcgtctacaggttctggtaagacattggcgtttatagtaccgattttgatcaggatgagtagatcttcttcaaggccaccgtctttgaagattatggacgggcctaaagcgttgattcttgcaccaacgagagaattggtacaacaaatacaagcagaagcagaaagggttacaaaaatatggtctatagagaataattatgactgtaaagtagtttccattgttggtggacattcattggaagaaatctcatattctctgtcagaaggttgtgatatcctagtggctacgccagggcgtttgattgattctttagataatcatctgctagtaatgaaacaagtagagacattggtcttagatgaagctgataaaatggttgatttaggatttgaagaccaagttacaaacattttaacaaaagttgatgtaggtgccgatccctcaataaacaggcagacaatgatgtttacagctactatgacttccgtgatagaaaaaatcgctgctgggtatatgaagaagcccgtctacgcgactattggggtagatacagggtctgaacctctgattcaacagattgtagaatactcagacaatgacgaacaaaaattcaaaaaactgagatctgttgtaactaaatatgagccacccataataatttttataaattacaaacagactgccgactggttggctgaaaagtttcaaaacgaaactaatatgaaagtaacaattttacatggttccaagtcgcaagatcaaagagagcattcgttgaaattattccgcagcggcaaagttcaaattatggttgcaacgaacgttgctgcaagaggtttggacattcctaatgtttcattggtggtcaatttccagattcctaaaaaaatagatgattacattcatagaattggtaggactggtcgtgccgccaaagaaggtaccgccatctcttacgttggtggtactgaagatgaaacattaataggcgagcttcacaagtacgtaaaaaagcatgacccattgaataacaacaggttttccgatgctgtgaagaataaatacaactttggtatcgaaaaaaggaatgaagttatatattaa

SEQ ID NO: 543 - DNA, 1833 bp, Saccharomyces pastorianus
atggacgtaggaagctgctctgtggggaacaacccacttgctcaactgcacaaacacacacaacaaaacagatctcttcagtttggccagagtaatgggcctcgtaatgagtcgcccctacagaataacatcaagccaaatggtacccaggctttcaagtccaataaaaataccatttcccaagaaagtatggcacatatgcataggttcatgaacggagaacccctagcggatgataagagaagaatggaaataggacaatcttcagccatgcctctatctctttcaagtatgcgttccttacaaattgaatcaagcccaaaccaaactagtggagcgattaacacatcgcactggtcgcaggaatttcaaaatggtggtaatattcagaataagatcacaaatgcaggcagttcagaaaaagtatggcaacacccgccacaagccacttcgaggcaatttcattatcccaataacatgatgaataactacccttactcttcaatgaatagtttcagcggatcaaggctccagtcacctgggttcatgaaccagcagcacacagaacgttctaaggaagacatcaaacagcaaggagaacaaccttggatggatcagtttgaaaagttagaaaaagaggtttcggaaaacctgaacatccatgatgggatagaagaagaagagaatataactgaagtggaacaaaataagccagaaatcgtggaaaaggacgaagtagtatttggagatcaatatcaatccgatttccaagaggtatgggacagtatccacaaagatgccgaagatgtcttgccatctgatttggtcaacgacgaccttgatttaggggaagactatctgaaatacctaggtggtagggtaaatggaaacatcgagtatacttttcaatcaaataatgtgtattcgaagaaccctaatgcttataagattggttgtctattgatggaaaatggagccaagttgagcgaagcagccctagcgtttgaggctgctgttaatgaaagacccgaccatgtggatgcatggttgagattgggcctggtacaaacccaaaatgaaaaagagctgaacggtataagtgctttagaagagtgtttgaaactagatccaaacaatttagaggcaatgaagactttagcgatcagttacataaatgaagggtacgatatgagcgcctttacaatgctagatagatgggcagaaaccaaataccctgaaatttggtcaaatatcaagcaacaagatgaaaggattcaaaaagaaaggggatccacacacattgacatgaacgcgcgtgtaacaaaacagtatctgcaattagccaacagtttaagctcggcagaccctgaagtacagttgtgcttgggtcttctattctacactaaggacgactttgacaagacgatagactgctttgaaagcgcgttgaaggtcaatcctaatgacgaattgatgtggaacagattaggagcttcactggccaactccaacagatcagaagaggcgatccaagcatatcatagagcattgcaactgaaaccatcttttgttagagctcgttacaatctggcagtgtcttcaatgaatattggatgttataaagaggctgcaggctacttattgactgtcttaagcatgcatgaagtagacaccaagaaaaaaggagatctagggtctctcttgaacacatataatgatagcgtcattgatactttgaagagagtttttatagcgatgaaccgagatgaccttttacaagaggtgaaaccaggtatggatctgaaaagctttagaggtgaattctcattttga

SEQ ID NO: 544 - DNA, 663 bp, Saccharomyces pastorianus
atggccatagaaacaatactggtcataaacaaatcgggcgggttaatctaccagcggaatttcaccgacgacgaacaaaaattgaacagcaatgagtatttgattctcgctagcacactgcacggtgtatttgccattgcgagccagctgaccccgaaggcattgcagcttactcaacaaacaaacacggaaaacatgatcccgtacgtaccatacgtgggcgtcgccggcaacaagaacgataacaggaacgccagtggcaatagcagtaaaccgcacggcactagtaggaaactgggcagtttcaagggagacgattttttcaaagagccgttcacaaactggaacaagggtgggttgaggcagctgtgcacggaccagttcacgatgttcatctaccaaacgctcacggggctgaagttcgttgccataagctccagcgtgatgccacagagacaacccaacatagccggcaccgagaagaccgaccgactcaagagctcatcgaacctggccatccagatagcagacaactttctccggaaggtatactgcctgtacagcgactacgtcatgaaagacccatcctactcaatggaaatgcccatcaaatccaacctctttgacgagaaggtcaaagatatggtagacaacctccagtag

SEQ ID NO: 545 - DNA, 1122 bp, Saccharomyces pastorianus
atgggctacattgtcacggggtatccaagtcggcatgacaagagaaagaaacatatacttcccttgcaccagtttgcagcgtctccgttgaacttacaacgatatttgcatctatttcaggctccagtattctccaagagatcaaggtcagatgaaagcaatcataccaaagctcaagtgaagaaacttcgacatcatcggaagcttaccttgcaagacatgccggtagagatcatccaacacatttttgtttttacaaaaggtgagcccgcaatgatcgccttgaacaagtttttttatgagtgtttgagaccttcattttcattgttgtctaaaatcatgtgggagaaatatctttttaatccacttgagtttggtgtagagaacatcaaaactgattcaggttgtgttgtaattcccactttatttgaacatgaaacatttttcagattactgctagatcatcaccatattctcttgcaaaatatttcccactttctcccaaagaaacacttccgggatatgcagaatggtgattttgatacttcaatagaactagatttatgttcgatgactaccgaagatgccgataaagaggatttcccgcgaaatttttacaacactatgcaaatttacctaactcacagagaatgcatacgatctatgggtaattattttattttaagaaatccatacgatgttatatcaccatttatagaatgggttttccaagctatcgaaatggaaggagaagaaataacctccgaatttactgtgaataacatgtttgaatcaatagatttgattctgtacgtttctggatctgcggggcaaaaattcacttccactgaacctcttttgactgtagtgtttttgttgtatttcactcacgtaaatttcctgcatacttcgaattttcatattttcttccaggatagatcaagactacaattcatggaagaattcatcttgaagtattattacgaaccatcattagtagagcacgaacttttatccgatgccaccgtttgggacctgctaagaagggtatctgatttaaagcttatcgatttagtggttcaatgtggcgggagacctcaatatggcgcgatgttttcatag

SEQ ID NO: 546 - DNA, 2571 bp, Saccharomyces pastorianus
  modified_base (1631)..(1696): a, c, g, t, unknown, or other
atgacatctgctttgagagttctggtatgcggagatcatccgaacctcatcctatacacctccagatttcaacacgccaagaacatagagttttaccttgtagacaactcagtgaatgcttcctacgaaattaattccctattttatgggacagaacggtttcagattcagaaccatttccaatccctttcggatttgatagacctaaaccgaaacggtggcttggtattcgatttggtcataatgagtgcgtcttcgttacaagaaattccgcaaacgttaagaaacttaaaaccaatgataaataacaccacaaagatattgtttgaaagcagtgggtttgtatatttggagccatttatcaaagcgtcagttgatctgccgctatcaaacatctttagcattttcactgattatgacgtcaggcgcttggataagaattcgtacaaacagtttgcgacttcaaattccaaatcattttctatttctattggccaaacaactgccatacaggaaagtagttattcaaaagatattattccaatcttaaatacgtttcaaaaattgtttcaaaaattgtttccaaaggacattgttaccctttatgattgttctcctttaaccttcctgaccaagcaatgggaactagccatacctcaaatatgtttcgacccattattgatcatattggaggagaaatcgccatcgaatttagataataatgtattggccaaacctctaatctctggcttattagacgaaacattatcgcttatccggaaaatgggtataaccttcaccaatccacactttcaaagcgagcagaccatactaaagtattggaaggaaaagtacgagggagtatctgacattcctacgtttttgtactatttcatccataaatcctcatctttgaatattgacctgctattactgcaaccgatattattggccgatgattttggtattaagactccatacttggaatgtttgtttacaatgatgtcccaataccaattgttgaacggaggtgattctgattggtttatcagaaaagatggtgacacaacacttacccatacaaatgattttcaaaacgacattgcattaaaggatggaaaaatcatgcagctacaaaatctagaaataaccctaagaagccaagttaagcaattgcaaaatcaagtggtgagcctaaaacaggaaatttctttaggcaaatcgagccacgaacaagaactggatattctgcaaaagagaatgcaatcaaaaacaaatgaattgcctgacggaaatctatcatgtgccaataccaacggtattaccagccctgaaaacatgaccaacagtgatgtgagctacgaaaagagcgaccatggtaacggtagtatcaatgatagcagaagacagtcttttttcaactcgacatctgacacaacattgtctagggatgaaacttcattgaaagaacgtgaattggaagtgcgaaagaaggaattagaacttcaagaacgcgagttagaattacaaaaaagagttcttcaacaacagcagcaatatcaacaaaggccacccaaacaggcttacaacggccctcctggaacaccaacagccaataacaacaataatannnnnnnnnnnnnnnnnnnnnnnnnnnnnnnnnnnnnnnnnnnnnnnnnnnnnnnnnnnnnnnnnngcaagggttataatccaagtagaaaatcgtcctacagtcaacctcaacacatggctatgatgagcggcagaagtttgcatggtccaaacgtctcaagccctagtcccgcgttttctgccaataattttgttgatccaatatttcctgggacatcatatgctggcaataatagcaggttcagccaacaagcgccatcacagcaatatatgcaccctgttaaacctacaagtaggaagaatagaaatagcgttatgccaaatataggatatgttccagggatagccaacaatgaatatggtaggaagtttaatgggaacgccaatgccgttaatggtactcaaagtcgcttaaattccctttctaaccaaagcacatttagatcacaacaagggcttcctacaccacagcaaaaacctttttcgaacaatggcagcaataatataagggcgaatcgagtatcatccgcgaactacaataatttgaatcaaaaaccagggtttgttaattctgtttcaagtccaaatctaaacaactttgagaacaacaacaatcaacaaaactttagaagtgtagattctgctccatgtgttaaccaactaaacaatggttctcaacaccaattacaaccacagcctcagttgagctctacaaatatacctcaaatcaatgtaacccaaccatcaccaatattgaataactttaccacaaataatgaccctgccccagtagcgaaattcgggatcccttctgaagctacggttacaagtacagctacaagcactaatataagtgcaatgacagacgaaaacagcaaagaggaagtcaaggaaaagaaaaagaagaaattcagcttcttcgggaagaagaaaaagtga

SEQ ID NO: 547 - DNA, 570 bp, Saccharomyces pastorianus
atggaggaccaagattcagcatttattaaacaagcgactaaagcaatcgtggatatatcgctagatataaataatatagatcctataataaaagaattactgcaaagggtaaagaatacacaaaacacatcacagcatagaaagaggccactcgcgtcaacagaaaatggtattggtactcataatgggatcgcgaaagtcaaaaaggaagatatagggcagggtttaactaaacccaacgaaagtaaagctcaagatcgtcgaaatagtaatggcgaaaaacaattcaaatgtgcaaaatgctccttagagttttcaaggtcatctgacttaaggaggcacgaaaagacacattttgccatattgcctaacatatgcccccagtgtggcaaaggtttcgcgagaaaggatgcattaaagagacattatgatacgttgacatgcagaagaaacagaagtaaactactaagtgcaggtggtgaaggtattaatgaattattgaaaaaggtcaagcagtctaatattgctagtcgtgaggaaaacaacaaaaataatggttggaaagggtaa

SEQ ID NO: 548 - DNA, 1266 bp, Saccharomyces pastorianus
atgtcagaattattggatagttttgaaaccgaattttccaaattctacactgacagcagcctagaggagacgaatcttcacaaatgtattgagcatactcatgaattcaagaaccaactaaagaagctgaaagcgcacttaaataagcatatacaagaatcagagccagagacttacaataatttggatgataaggaaaagcaaaagtttaggaggaaaagggaactaatcatcgaaaaactgaataaatcacaaagacagtgggatcactcagtaaaaaagcaaataaagcatgtttcccagcaatcaaaccgttttaacaaaaccactttgaacaaactgaaagaatttgatatagacagtgtatatatcaacaaattgcccaaaggaacaatgaataatgttgacgaggctatcggttaccatgtattaagatatagcatagataacatgccgctagaaaacaaggatgatgcattcaagtacttgaaagatgtatatggaattactaataaagaatccaccgagttcattgatatgggccagatcgtacatgatttgaaaaagggtgatacagaaagttgtttaaagtggtgttcccaggaaatggacagtttgtcatccaatcatgccgctttgtcatcattgaagtttgagctgtatactttgtcagcaatgcaatcagtgatgcgtgggaatcctgtggaagtttatcatcaaatgacgcagcaagctcctttggattgcttcaaacacagagagaaagaattgataaggaatgttgtgccattgctaactaaatcgctcataggacaacccgttgaaggaatcgattctaaggtagacgaagagttaaaaaaatgtgtgtccttattcattaaagaatattgctccgcaaagcacattttcttcaactctcctttatttttgatcgtcctaagcgggctgatttctttccaatttttcatcaagtataagactatcagagagctagcgcatgtggattggactactaaagatgagttaccgtttgatgttaaattgccagattttttaactcatttccatccgatttttatttgtccagtactaaaagaggaaacgactacagaaaaccccccttactcattggcatgtcaccacgtcatttctaaaaaggcattagacagattgtcaaagaacggaaccatcactttcaagtgcccatactgtccagtgaacacctcaatgagtagtacccagaaagtccgctttgtcatgctctaa

SEQ ID NO: 549 - DNA, 2436 bp, Saccharomyces pastorianus
atgttaaggcacataagacaagtacccatacaacaacacttacaaaaaacacaactattgagacagaattttccacggatctatgttcctctacagctacaaaggactatatgtagtttgaatgcaaggactcaaatagctaataaatcttctctagaattaagaacaaatccattgaacggagctgctatttcggcatttccgttagggcacctccaaagtgtgccagttttcagaagaacatacgtccaaatgagaatggatccaaaccagcagccagagaaaccagctttagaacaatatggtacgaatttaacgaagttggcacgagatggtaaactagatccagttattgggagagatgaggaaattgcaagagctattcaaattttatcgagaaggacgaaaaataatccatgcttgatcggtagagctggtgtaggtaaaactgccttgattgacgggttagctcaaagaattgtagcaggggaggttcccgattcattgaaggataaggatctggtgactttggatttggggtctttgattgctggtgctaagtatagaggtgagtttgaagagcgtttaaagaaggttttggaggaaatcgacaaagctaatggcaaagttattgtttttatcgatgaagtccatatgttactaggcttaggtaagactgatggtagtatggatgcttccaatattctaaaaccgaaattagctcgtgggctacgttgtatttcggcaacaactttggatgaatacaaaattatcgaaaaagatcccgctctatcaagaagatttcagcctattttactaaatgaaccaagtgtctcagatacaatttctattttgagagggttgaaagagagatatgaagtccatcatggtgtcaggatcactgatactgcattggtttccgctgctgttctttcaaatcgttacataacagataggtttctacctgataaagccatcgaccttgtcgatgaagcctgcgctgttctacgtctacagcatgaatccaaaccggatgaaatacagaagctggatcgtgctataatgaaaattcaaatagagttagaatcattaaagaaagagactgatcccctttctgtagaaagaagagaagcactggaaaaggatttagacctgaaaaacgaggaactaagcagattaactaaaatctgggatgccgaaagagcggaaattgaatctatcaaaaacgccaaggcaaatttggaacaggcaagaattgaactggaaaaatgccaaagagaaggtgactataccaaagcatctgagttgcgttattcgaggatccctgatctagaaaggaaagtggccttgagcaaagaaagtaaagacggagataaagtaaatctgttgcatgattcagttacttctgacgatatttcgaaggttgttgctaaaatgaccggtattcccacagagactgtgatgaaaggtgacaaggaccgcttattatacatggaaaactctttgaaagggagggtggttggtcaagatgaggccatagctgctatctcggatgctgtccgtctacaaagggctggattgactagtgaaaagagaccaattgctagtttcatgtttttaggccccactggtacaggtaaaacagaattgacgaaagctttagcagaatttttgtttgacgatgaatcgaatgtgattcgttttgatatgtcagaattccaagaaaagcataccgtctctcgtttaatcggtgctcccccaggttatgttttgagtgaatctggtggtcaattaactgaagctgtcagaaggaagccttattcagttgttttattcgacgagtttgaaaaagcgcaccctgatgtctccaaattgttgttgcaagtattagatgaaggtaaattgactgattctttagggcatcatgttgatttccgtaatacaatcattgtaatgacttcgaatatcggacaagacattttactaaatgacaaacatttaggcgatgatggtaagattgataccccaactaaggagaaagtgattgaagcgatgaaaagatcttatccaccagaatttatcaatcgtattgacgaaattctagttttcaacaggttatccaagaaggtgttaaggtctattgtagatattagaattgaagaaattcaggaccggttggctgaaaagagaatgaagattgatttaaccaatgaagcaaaggactggctaactgacaaaggatatgatccgatctatggtgcaagaccactgaatagattgattcatagacagattttgaattcaatggcaaccttcttattaaagggccaaatcagaaatggtgagaccgtaaaagttgcagtagaaaagggtaaacttgtggtgaagccaaaccatgaagaaggtgaagcgattgaagaggaagccgaaaaataa

SEQ ID NO: 550 - DNA, 513 bp, Saccharomyces pastorianus
atgagttcaagttcatacagagattcatttttccaataccggcatttatcagcaccacaccacatcttatatgcagaatggaaccaggatatactagcacttccagacgaaatcggaaatgttgctatggccatggaggataacgctcgcaatgatgtgggggaaggaagggctactcaaggtggggaaagaaactctaacgtacacgaagggagtcaaaataaaacattgatgacaaacgagcaaaacagtaaccgttattggaactcatttcatgacgaagacgattggaatctctttaacggtatggagctcgaaagcaatggggttgtaacgtttgccgggcgcgcgtttgatcattctgtaaacggaggagtcaattctgggaacgacagtggcaaggagccaagaaaagaaacgataacgggttctattttcgatgggcgcgttacacagttggcatatgcgagaaataacggttggcaagagctagcgctgccacaatcacgatga

SEQ ID NO: 551 - DNA, 1692 bp, Saccharomyces pastorianus
atgcttctggctttgtattctctattggcatttctagttgcatccctgggcaaagtcgcccgagggattgatatctcaggcagcggagaatccttatcttccttggaactaaatgttcttcaaaacaaattcgcatcctactacacaaacaatagtattagtgtaaaaggtatcacaatcggtggctggttggttacagagccttacatcacgccatcgttgtaccgtaatgcaaccctactggcaaaacaacaaaactcctcccgaaatatctccataatcgatgaatttactctttgtaagaccttaggttataatacttctacaaccttgttagacggtcattttaaaacatggataacagaggatgatttcaaacaaattcaagccaacggttttaatttagttagaatccctattggatattgggcatggaaacaaaacgctgccgaaaacctttacgttgataacataacctacaaggatccgtatataagtgatggattacagctcaaatatttaaatcaagctctagagtgggcacaaaagtacgagctaaacgtttggatagatttacatggtgttcccggatcacaaaatgggttcgacaactcagggcagagaatactttatggtgatttgggctggttaagatcaaacgatactcgaaaactaactctagcagtttggaagaaaatgtttgaaactttcttaaatggtggtgacaaaagccccgtggtgggtcttgaaatcgtcaatgagccgctcggtggtaagattgatatgtcaaatataacacagatgtactatgaagcatttgacttattcaaggaaaaccaagattcgggtgacaacacaacttttgttatccatgatgcttttcaaggcatcggcaattggaatttagaactgaatccgaattaccgcaatgtttcagaccactatttcaatttgactaaagcgaattatagctctcaagatattctagtcgaccatcatcattacgaggtctttacagattaccagctggccgaaactcaattttcacgtatcgaaaacattataaattatgggaattccatacacaaagagcttccttaccatcctgcagtagtcggggaatggtcgggtgccattaccgattgcgccacctggttgaatggtgtgggcgtgggtgcacgatatgatggctcctattataatacgacactgttcaccaccgacagtaaaccagctggtacgtgtgcctcacaaaaacccttaagcgattggacagaagattaccgtaatcgtgtcaggcaattcatcgaagcacaattggccacctattcaacaaagacgactggatggatattttggaattggaaaacagaagatgctgtggaatgggattatttgaagttaaaagacgcagaactgttcccttcgccctttgataattatacatactttaaaacagatggttccatgaaggaaggtttttcatcctctttatctacacaagcattcccaataagtacaacttccatcccattctctactacaaccacctccaggaaaagtaaaaatttcgcaagttctactaagctgaaagcgagaacgtcactatcaattgatagtatgagttctatatggaaagaatgtatatgcatatccatcgtcgcaattattaccttctgtgctattttgtga

SEQ ID NO: 552 - DNA, 2289 bp, Saccharomyces pastorianus
atgacaaacgagtcattgactacgcctctggcctctactttggtggataaagggcaggctaccgatcccaatgaagactcgcaagaggatattagcctgggcggttctaatggcgctgcctcgttgtcttctttaaaggctataagatccgaaaatgaagatgcaaacgaaaatggacaaacagatcataatgatattgaagaggatccgttattaactcggtaccatactgcctgccaaaagggcgacctagccacggtgaaggaaatgatacacggcaagttactagaggttaacaaggatggagattctgttgaacacattactggtctacattgggcaagtatcaataacagactttccgtggttgattttctcgtttcgcaaggcgctgatgtcaattcaaaggctggtgccctacacgccacaccattacactgggctgccagatatggttatgtttacattgtggattttctgctcaagcacggagcagatcctaccatgacagatgaccagggtttcaatcttttacacttgtccgtcaacagctccaacataatgctagttctttatgtcctgttcaatgttgttagcaagggccttttggatgtagactgccaagatccaaagggtaggacgtcattattatgggctgcttaccagggtgattccttgactgtagcaatgctgttaaaattcggtgccaatataaagatcgcggacacggaagggtttaccccgttacactggggtacagtaaagggtcagccacatgtactcaagtacctgattcaggatggtgcagatttctttcaaaaaacagacgctggaaaagattgcttcgccattgcgcaagaaatgaacactgtatactcgctgagagaggcattaatccactctggatttaacaacgacggttatcccatcaagaaatggttcaagaaaagccaacacgccaagctagttacattcttgactccatttatatttctggggcttgcatttgctcttttttcacacgttaacccattgtttgctattattgtactttttttgttgacccttgcaaccaacaaatgtctgaacaaatttgttctgccgtcttatggaagaatgggcatttacaatgctactttactaaggtcacctttgttctcaggagtgttttttggcagtttactttgggtaaccattgtttggatttgcaaagtcatgccctggacatttgccgatgaaacgtatactaacatactattgctgatagtacttttgcttgtattttatctttttggccagcttgttacctcggatccgggctgtgttccagaagaaactgaccatgaaaacgttcggcaaacaatttccgatttgcttgaaatcggtaaatttgatacgaagaatttctgcattgaaacctgggcaagaaagccgctacggagtagattttcgtccctaaataatgctgtggtggcaagatttgatcattattgcccttggatcttcaatgacgtcgggcttaagaatcacaaaggatttatattttttattacgttaatggaatgtggcattttaactttttttgtgctttgcttggaatactttgatgagcttgaagattcctatgaggatagagcccaggaacagggcaaatgttttattttaggccactccgacctctgctcaggactaaggtatgatagatttgtctttttagtactcttgtgggccttgttgcaatctgtttgggttgcgagcttgatatttgtccaaacctttcaaatatgtaaaggaatgacaaactcggaatttaacgttctaatgaaagaaaataaagctaatggtgctgacggtatatcttttaatgagaacttcaatactacaccagaaggatttgctccttcaattgagttggatgaagataataatgatgcaatactggctcccgttccaggttcgacattgaggaagccacgaacttgttttggtgtttgtttcacagtaactggtatggaccaatggttcgcagttataaaggagactattggtatcaaagataatagcgggcataacatatattccattacatcgaaaattccaacaaactatggttggaggaaaaacgtcaaggatttctggcttacaagcgatgtaaacgcgcctttatggagaagaattctgtattctcccacaagttctaaagccttactcaacgggacagaagtcgactacttcaagctttacaagttgccagtaaaggaatcagagcaaggaagtgatatggtatga

SEQ ID NO: 553 - DNA, 1014 bp, Saccharomyces pastorianus
atggacaacgacactaaggtagaaaatgaagcacctgtgccactatcacagctgaaatttccgtttgccgatgctccaagtatagtacaagcgcaccaaaaggatgatcagattcaaaccctgttggtcctaaagattactgaattatgcaaactgataaaaaaccaattgtttgccaattcatatcctagagaactttccatttttgccaagctaatatatttactttttactacgggaaggcgtggtagaacattgggcgaggaatatgttgacttgatatataccaataagcgtggtaccaaactagcgggccgatttagaatgctggcatttgttttctcctattctttatgtccatatttgatttccaaattatacaagaaaattgcgaacagtaaaagggaaaatgaaaccacaggtgatgataatgtcaccgggttctgcgagagccttttggatttcgtgttagacttgcatatgaccctattttatttcaagggaactttttataacgtttttaaaaggatgtttggcatgagatatgccttcaagcatatcatgtcgaagaacgaagccaaatttagaaaagaagggtctaggacatacaaggtgctgggttatattttattgactcaaaatattttgaagtggtatccagttctaagctctaccttagggtcgtggatttctgaaaagaaaggtgccccaggttcgaatgtaaggacatctcttgatttacagggaacccttaaaggtggttctatagaaggaataccgaaagaatttcagttggctcacatacgtttgtcagacaaagatcaactgccctatatcgcagaagcttcgagaaaatgcattctttgtctcatggacatgactgatcctagctgcacaccctgtgggcatctgttctgctgggactgtctgatgagttggtgtaaagagaggcccgaatgtcctttatgtagacagcaatgtcaaacgcaagaaattttggtcttacgacaatag

SEQ ID NO: 554 - DNA, 1932 bp, Saccharomyces pastorianus
atgagtgaacccactaaggagaatgttgcttcaaaacgtaactttcgccgtactcaagggccccaaaacaataccaagcctagtaacgataagaagaacccaagaagaaagcaaaagagaaataacgtacctggtgcacccagtctcgacacctccaatactgaggacgattctgatgaagagaatgagttatgtgtaatttgtgcgcgtaagttattatatgtttctttgacaccttgtcatcataaaacatgtcatatctgtgctttcagacaacgagctttgtatgaaaagaggagttgtttaatttgtagaacagagaatgaagaagtgacgttcactgaccaaatagatgaagaaatctcagatatacaaaatttttacgaaaagaatgaaaaatatggaataaagttcgctagtgaagaggtcgccacggcaacaatgaatcttctaaagtttttttgtccgttgtcaaaggacgaagaagctgtagattttggtagtttcaagaaatacaatgaacatttgaaatctgaacacagtagaatgatttgtttgatatgtgcgacccacaagcacgccttccctgcagagctcgaaatctttgctcaaaaccaattacgtaaccatcagtctaaaggtaattcagaagggttcaaaggacatcctatgtgtgccttctgttctggtaaaagattttactcagatgatgaattatacgtccatatgagaaatcaacatgaaaagtgccatatatgtgatagaatcaaccccacttccccccaatacttcaaagattatgaccagttattcgaccatttcagacattcgcattacgtctgtaccgttcaatcctgcctagataacaaatttgttgtcttcaaggacgagttggaattacaagcgcatattttgcaagagcacggtaatatcttaaagggtaaaccaaagtttttccagtcagagctttccacttttatttcagcaccatccagggtagttagagaaagagatgcttacgaccttccatctatgtcttcgctgccgggttctgcgtccagttcaagaaccaatgtgagagctgcaagctctcctgaagaaagtagattaagattggccgagagggccaagtactatttagaaaactccaaagaagattttgacaagtttacttcatataatgagaattatgctaaaggttacttaagtgcggaaaaattgttggaatcgtataagctgttgttcacgaaaccaaatgcagatgtttatttgttggcgcataacctggctgagacatttcctagaaattccgccaaatacaacaatttgaatgctatatatgaacaacgagagcaagctcttgagcgacagacctccttgccatccttatcgagtgacccctcactttcaatgtcaatggccaggggtcattggggtgggactaatgatggtggtagcggaggggcaccatcaggtgttagaaatatcaaaaatctaccaactttgaaaagccctgcagcatcgtatgatccatttgcaacgactataaaaaagcaggcttcaaaaggcgtgaaaagctccaaaagaagtacttctcaaccaattagttatcgggctacttccaataacgcagttgctttttctccaacgtatttggagagcaaaaaaaactcgtcatctgctgcttcgttaaataatagcaaggacaagttgaagactttaaacttgcctcaattacctccaccaaagccaaaagtacaaattcctggtttgaatagacctcaggctgcagatccaaaacagtggggtaaaaagtcgagcatagagaatgccaatgtccacgatgatttgaaagaactgaatataagcagtaacggaggaaataagaagaaaagcaagcaaaaacaactattattccacattggtatataa

SEQ ID NO: 555 - DNA, 1140 bp, Saccharomyces pastorianus
atgctgaataggcaggcgattctgaggttagcaagcaagaggtggacaagcacagtgcaacgtgcagattataaattgaattctgaagcacttcctaaaaatgcaacagtatttagtatgattcagccaacaggttgttttcaccttggtaattatctaggggctactcgtgcctggacagatctgtgtgaactgaagaaatctggccaagaactgatatttggtgttgcagatttacatgcgattactgttccaaagccggatgccaaaatgtttcgaaaatttcgtcacgaggcagttgcaagcatattggctgttggtgtggatcctgagaaggcatcgattatttaccaatctgctatccctcaacacagtgagttgcactggttgctgtctactcttgcatcgatgggattccttaaccgcatgacacaatggaaatcgaaatcaaacatcaaacaatcagaaaataaagagtaccagattgatgataccgaagtggggaaagttaaactgggcctattttcgtaccctgtcttacaggccgcagatattcttctttataaatctacgcatgttccggttggcgatgatcaatctcaacacttggaactaacaaggcaccttgctgacaaattcaattcgacatataagactgatttctttcccaagcctatcacgatgctggcgcaaaccaaaaaagttttgagcttaagctctccggaaaagaaaatgtccaagagtgatccaaaccacgattcagtgatctttttaaatgacgagcccaagactattcagaaaaagattagaagagccttaacagattccatttcggacaggttttattatgaccccgtagaacggccaggtgtatccaatctaatcaatatcgtcagtggcattcaaagaaggtcgatcggtgacgtcgtggaagatgtgtcccggttcaacaactacaaggactttaaagactttgtatctgaagttgtaattgaagaattaagagagccaagaactgaatttgaaaaatacggcaacgagccagattatttacacagtgtcgttgaatctggcatgcgcaaagctcaggaaaaggcggcaaagaatctaagtaacattcatagaataatggggttctag

SEQ ID NO: 556 - DNA, 717 bp, Saccharomyces pastorianus
atgattttttttctcagaaggctcataggatcatctgtaatcgatcaagaatccaagagaacatcggggaaggaggaagttatgtctaacagtcgattagcgcttgttattatcaaccatgcctttgataaggtcgtctcactgacgtgccattgcgggattttatcagaaataagatcgggactgatgtttctgttcagcatctttcagttgctttgctccttgggtgtgatcatattactattgcccattatcatagtggacgccattgatctgtttctttatatatgccggttaatcgattacggctgtaaactggtccattataagagatcatccctagtgtcgtcgccatcgccgccgcaaacagagggtactgctttagacgcggacacaagcactaaagaggagataatcatcgatgaggaaataataaacatgctgaacgaatcctccgaatcattgattaatcatatgacaactggtttgaagtatgagagtcacacggggaacgccaccaaaaatgactgtctcgattcttcgagttcaatgacctatgtagatcgaaacagggattttgacgaagaaaagcggagttactattacgaggaagaagacgatgattttctatctaacacgaattttgataagatatcattaatcgaaaggtcgttcacgagtcgtttcgaagtggcttgtgagcagaaggctgcttga

SEQ ID NO: 557 - DNA, 168 bp, Saccharomyces pastorianus
atggattcctccaagatcatcaacattatattatctcttttcttacctccagtcgctgtttttctagcccgtggatggggtactgactgtatagtggacattattttgaccattttggcgtggttcccaggtatgctatatgccttgtacattgtcctacaagattaa

SEQ ID NO: 558 - DNA, 1302 bp, Saccharomyces pastorianus
atgtttgtctctccaccaccagcaacttcaaaaaaccaagttttacagcggctctcacacgactccgctaatcacagccgcgggtttgcaaatccgttgcaaagcattccagaaaacactgcaaataatagcgacaacgcatcatttcaaagcttaccacaatcagtgagtagtgtacaatccacaccctcaccaagaagagaaaatttcgtgaacgcccctctcgaatatactgatagagccagagatgaaatcaagaaaagattattagcttcctcgcccaacagaaagtcacaccattcaagcgggatgcattcggcaagtagaagatccagcacagctgatagtagaagtttactttcagatactgcctcatcttatcagtcaagtatattttcaacgccttcgacagtgcacacgcaactgactaatgaaagcgcattttctgacttttcaaatcacaaactaataacaaggatcagtttagatgacgccttaccaaagacattctacgacatgtattcacctgaaattttactagcagatccatctaacgttctttgcaacggacgtcccaagtttaccaaaagagaattattggattgggacttaaacgatataaggtcattattaatagtcgagagactaagacctgaatggggtaaccaattaccggaggtaataacgatgggtaataatatgccccagttcagattaaaattattgccattgtattctagcgatgaaactataattgccacattggtcaattcggatctatacatggaagccaatctggactatgaattcaaattgactagtgccaaatatacagtagctaccgctaggaaaaggcatgaacaaataaccggcagaaatgaaaccataatgaatctgtccaagccagaatggagaaacattattgaaaactatcttttgaacatagcagtggaggcacaatgtaggtttgatttcaagcaaagatgctcagaatataagaaatggaagttacaacagtccaacttgaagagacctgacatgccacctccaagtctaataccgcgtaggaacagctcagaaacaaaatcgctgttaaagaaggcactattaaagaacattcaattgaaaaatcccaataataacctcgatgaattgatgatgagggcgggcaccccttcaaaccaacaggggaaaaacaaagtaagcttgaccaaagaggaaaaggctacaatatggtcgcagtgccaggcgcaagtttaccaaagattaggattagattggcaaccggattcagtatcctaa

SEQ ID NO: 559 - DNA, 1053 bp, Saccharomyces pastorianus
atgacaatctccaaaactggaggtgaggaacgactaataattctgccggatgaatgcgatgcttcggaaatcataaacacatttacgctgccgccttgttctaacattgcatcgaagccactgattgaactatttgagaatactgatggtagactctaccaggtaaaatatttccagtttggtaaaggaccatcttattcacacgaggaagacttggcaaatgacaagtatcattatacaaaggaagatcacccgattaaatcaacctttatcatgaataattccaatcctgccgatggtcgcattttgaattcaagcaaactttacttttgtacgttacacgatgttgctttcagtcttattggatttcattatagagccagtgttgcggaggatgaacaagactacatcaagcccagcgacactggagagagccagactgctaacaggaggaaagaccatgagaggtttcttacaattcgcgactatcatgacttgctaacagatagtcattgcaaaaactggagccatatttctctacgctgtcttgaaagtgggcttacaaagatatccgaaaccatcgaagaagctggtgaaatatattacaagattacgcctgcactaataacgagatatttggtaggtaaagtattgaaaatcacaaagaattttcctccaagctttcccatacttagacatgcaccagtagatatagtacagtgctacaaggtagttatggctactaatcttttggtttctttgatcccgaaggcggcttaccgtaatttaatcgaattttcaccaagttcgacggatgataacctcaatttggaaataaaatctagcttcacaaacctcgaaaactatcaaaccaccgacgagttgaaaaacgctgaaaaagaattactaatgaaaaacgctatgaatgttggcataggttcaaatggcggttctgtgtctgtaaagaaagttgtgaaaaaagccgttgtcagcaaaaaaccaagagtcgctataggaaaaggcgctatcgatgggttctttaaacgtaagtag

SEQ ID NO: 560 - DNA, 2631 bp, Saccharomyces pastorianus
atgtcaaacttctttcgggacagttcaatgggatttaagcctcgaccaaacatatttgctaaactgagagtcagggattcagaaccggaaggtcctctaaacaacgacatcgacacttccgtcgattgtctcgaggctggttcttccattgaaggagatgatgcgttcaaaaaacccaataaaacttctaatgggagagaagtaactacgagtgcagagcatgttcaaagaaaccctagttattctagcgacgtggtcgatgcaagctctccgaagcgtcaaatggctatagatcgacacaataaatttttaaacaacagtggcggtacaaatgaaaatgataccgatgaagattttgaaattacagaagtaagggatgtgagtgaaggtgtggcaatggaaaccaaagaagatcatggtgatgtcaatgattccgagacaaccctaaaagataacaaagttcacgaatatgccataacaaatggcaagcccattctgcacacaccaattgatgcttccaatacatcttcgaatgatgttctcttagaagcatttacaaacactcaaagaatatgttctaatttgaagcaggaattacaaaatcagcaacaggataacgttaagttaaaaactcgattacaatcgtatgtttctgactcaggtaaaatcaacgacaaagtaggcaagtataaaaactggttagaaacccttcaggaaaacattacaaccttgactagccataaaaatagtcaagatactaaattaaaggatttaagacaaaaccaccaactgaatcagaggagaattaccgggtttaaaacaacaattgaaagcttgaatggaaaaataaatgaactaggtaaacataaaaaagatgctgatactgagctaatgaaaagaggtaaggaaatcgaatatctaaaaagagaattagacgattgttctggccaattgagtgaggaaaaaatcaaaaatagttcattggtacaggaaatagggaaaaatagagagcaattgaccaaaaaaatggaagaccttctttcagaagataaagcttatcatttactacaattcaccaagtttgaggagaaaatccgtaccatattcgaagagaaactacgggaacacttccgtggtgcaatagattctttcagcttagaactgaagaacaatggcgtagagttaaatgatcatacagagactatcttaaagcaacaatgtgaacagtttaaagaaaatctacaaaacaaaatgtctttgagtgagaacaatacagcaaaatttttaacagaactgggcataaagcaaaatgaacttgtgataaaagtacaagacgaacttttgacatcatcaaagaatactcaaacagctctactagctgaaatgaaaagtacaaaacaagatatacttgatgattcatcgcaagctgctaagaactcactagtcttggccgatttgctgaaagaatacaaagcagaaatagttcagtcaaacgagtatgaagaaaggataaagcaactggaaagtgaaaggtcgactttatcttcacaaaagaatcaaattattagctcccttggtactaaagaagcacagtatgaagatctcgtcaaaaaattagaggcaaagaacatagagatttcacaaatttttggtaaagaacaaagtttaattaaaaaaaacgagagcctttctaatgaactaaagaaagctcaggaccagcttgacaaaataagcagtctaaacaccactacaaaatcaaattacgagaataaaatttcctcacaaaatgaaattgttaaggcattaacttccgaaaatgacactttgaaacaaagaatccaacagctcgtagaatttaaggagaatgcgcaaaaggatcattcaaaaaaattagaagcattccaaaggaacagcgagcaactacagaagctaaatgtcgaggtggtgcagttaaaagcccatgagttagagcttgaagagcaatgtcggtacctaaaaggctgcttagataagaaggaaatcggagtcgaagaatcactgagcgatgtaaaagttttaaagcagcaattaatagtcttgaaatcggaaaagcaagacatcactgccgaaaagttagagttgcaagataatctagaaaacttagaagaggttaccaaaaatttacagcagaaggtacaattgcaaagaagggaactagaagagaaaattaaacacttggagcagatcaaaaaccacaaaagagctgaattcaaacaaagaggtatccaaagttctacgaaaccatcgggctcacctaaaaaaaatgatacaagatcggaatttattcctaactcttcgaaaattgattcctcatctaacaggccgcctagggtcgatcatacagccaaatcaaccaaaacggaaccatctaaagaaacatctaaatacaacgatgagtttgatctttcttcgtcttccaatgatgacttagagcttaccaatccctctcccattcaaatcaagccagtgagaggtaaaattaaaaaaggttcaaatttcatgaaacctccaatctcttcaagaaaaaaattgttactggttgaagacgaagaccaatcattaaagatgagcaaaaagagaagaaaaaaataa

SEQ ID NO: 561 - DNA, 879 bp, Saccharomyces pastorianus
atggtactaagcaagcaagaacttaaagaggtcgaaaacacattcattggtttactcaaaaatgaaattgggccgttattaaagtcacatgcgggaacaaatttgcagtcctatgatgataaatccaacggtgtggatttagttacagctttggacaaaaaaatcgaatccataatcaaatcggaattagctagtaaatatcccaagttcaaattcatcggcgaagaaacttatgtagaaggagttactaaaataactaatgacccaacatttattgtggacccaatcgatggcactactaattttatccatggctatccttatagttgtacttcgctgggtctggctgaaatgggagaaccggtagttggcgcagtttttaatccacatttaaatcaacttttccatgcctcgaaaggcaatggagctttcttaaacggtcaagagataaaattaacagaaagaccgttgatactacagaaatcattggtcgcattagaaggaggctcagaaaggactgaaagttcgcaagggaactttgataaaaaaatggggacctacaaaaatttgctcagtgagtcgggcgcctttgttcacgggttcagaagtgtgggaagtgctgccatgaacatatgctatgtcgctaacggtatgctcgatgcttactgggaaggtggctgctgggcgtgggatgtctgtgctgcttggtgcatcctgagagagactggtggaataatgattggtgggaaccctggagaatggaatattccgttagacagaagatgctatttcgccatcagaagtggatgtgaacctaaagatcaaaaacaattcgcagaggcattttggtctcatgttgcaggtaaattggagtactaa

SEQ ID NO: 562 - DNA, 936 bp, Saccharomyces pastorianus
atgagctccacagataacgacagcgattcggatttgacagaggatttagccgcactcaagaccattaaagagaatcctgttgccagaaaggtggtaagatatattttatcgaggggagaatctcagaactctataataacgagaaccaagttacagtctgttatacacgatgctgctcaggaggaaaatgtgactaaactttcgtttagcaaaatgtttatggatataaatacaatactagataacatatatggcttccagctaacagggctgccatcaaagaatagcatcagcactggtggtaacaacaataacactactgctactaataataacaatactagcgcaaataaactaatggatgagccgttgggacataggtctcagagatttattttgctaaacaacgctccatatttaaaaagttttgatgattttaaacttttacagagcattcgcacttacgaggagctggtagtcaacggagagtatgttggtgatgatatagggttggaaagctccaatactttagagagcaagctgagcactgatcaggatcttgcttacaaggggatcctaaccgttattctatgcattatttttttctccaaaaataatatcttgcaccaggagttgatcaaaattttagagacatttggtattcccagtgatggctcaaagattcctatactgaacagtactatcgatgatctgataaaggccctggaaaggcgcgaatatataattaagctggaagagaaatcggacactgatggagaggtaatatcgtacagaataggcaggagaactcaagctgaattcgggttgggatctcttgaaatactagttcaagaaatcatgggccttgaagaggaacaggctagaagcttacgtgatgatatagtgaagagtgtcggtgattcctattctatatag

SEQ ID NO: 563 - DNA, 1251 bp, Saccharomyces pastorianus
atgcccttttcgtctgaacaatttaccaccaagttaaatacgttggaagactctcaagagtctattgcaagtgcttcgaaatggttgcttttgcagtacagagatgccccaaaggtagcagaaacgtggaaggactacatgttgcggtctagtgtaaatacaagaaggaaactactgggtctttatttaatgaaccatgttgttcaacaggctaaaggccaaaaaattattcagtttcaagactcctttgggaaagtggcagctgaggtattaggcaggattaatcaagaattccctcgggacctgagaaagaagttgtcgagagttgttaacattttgaaagaaagaaacatcttctctaaacaggttgtcattgacatagacaagaacctcaaaactgagacctcacctgtcgaagcactagccctaccccaaaaattgaaggattttgctcgggactatgaaaaattagctaaattgcatcataacgttcgtgctatgaaaattaggtttgacaagtcagcagatgaactggatccatcaagttcggtttatggggaaaattttaagaccattagtaaaattgggaacatggccaaagatataataagcgagtcaattcgtaaaagagaaagcggtattcagaagctacaaagtgcactagacgacgaaaaaaaccgttttgacgaggaacagagcatgctgagtgaaatagagtttgttttatctgcgaaggatccatctaggttgaaacagaataccgacgaagataacattattcctacgtatgaagtcggtgacggagacgatgatgatgatgatgacgatgatgacgatgatgatgatgataaaaatgacgatgacgacgatgataaacatgatgacgatgaatccaacggcaacagttatggacttgatataatggaggacaagaaggaaattatggataaaatgaataatgatcatataaacttcatggaagatcctggtgacgattctcattctgagctaaaacgaacacatgacatgacaggccatgatgatcataatgaggtaccagagaaaagaatgcaccttgattcaaaaacatatggggagagtatttctaacgataatggccattatgagctagacgttgacgaccatgatggtgcagaggttgaggatgatgaagatgcgaatgaaccaaatgacaactctgtaggggtttcctctagtatacaagatttgttgagtaaactagcgaattaa

SEQ ID NO: 564 - DNA, 1866 bp, Saccharomyces pastorianus
atgtttgaccaattagcagtttttacacctcaaggccaggtactttaccaatataattgctcaggaaaacgtttttctgagtcacaaattaattcctttatatcgcaactgattacctctccagtaactaagaaagaaagtgttgcaaatgcaaatacgggcgggttcgatctcaacgttttaacagtcaacgatgaaattaagaattcaaattcattcaacgcaattttttacctaaacaagcagccagagatatattttgtagtaacttttgcggagcggactttggaactgaatcaagaagctcaacaaacgttagcactagtgttgaagctttggaattcacttcacttaagtgaatccatccagaagaacattaaaggccaaaatgaaaaaaatagacacaactatgtcgacgtcctccaagggcttgaagaagatttgaacaaattcgatcaatattttggggttaaatacgaagagtccataaaacaagagcaggttgattcaaatgagggaggcacgaatgaattggtatcacaatctggtaataaaaatacaaaaaagaaactaaaggacatcaaaagtaagaagcaaactttaggaaatgttggtagtgggagaaaatggggtcgtgatggtggaatgctggatgaaatgaaccacgcagacgctgctaagttagatttttcttcgtctaacagttacaatagcagccaagttgctcttgatgccactataaataaagattcatttggtaatagaacagaaggcggtgatttcctgatcaaagaaatcgatgaccttttatcttctcataaagacgaagttataagcgaaaatgaatcaaaaaataatggctatatgaacacagcttttggatttttgcaaaaacacgtcttaggtaataaaaccattaatgataatgatttgaaatctgtattagacaaattgaaacaacaattaataaccaaaaatgtggctccagaagcggcagattatttaacccaacaagtctctcgcgatctcgtaggctcaaaaactgccaattggaccagtgtcgaaatcacagctcgtgaatccttaacgaaagcattaactcagatattaacgcccggtgtgtctgtcgatcttttacgtgaaatacaaagcaaaagaagcgaagtagatgctgacggaaaatgtaatccatatgtattctccgtagtgggtgttaatggtgttggtaagtcaaccaacctttcgaaactagcgttctggctactgcaaaataacttcaaggtcctaattgttgcctgtgacacgttcagatctggtgcagtcgaacaacttagagttcacgttgaaaatttagcacaactcatggacgattcacatgtgcgtggttctaaaaacaaaaggggtaaaagtggcaatgattatgttgaattatttgaagctggttatggtggctctgacttagtgactaaaatcgctaaacaggccatcaaatatgcccacgatcaaagctttgatatagtgttaatggatactgcgggaagaagacataatgatcctacgttaatgtcgccattgaaatcgtttgctgaccaggctaaaccagataaaattattatggttggggaagctttagtaggtacagattccgtccaacaagccaagaatttcaacaatgcctttgggaaggggagaaaccttgattttttcatcatttccaagtgtgacacagttggtgaaatgttaggtactatggtgaatatggtttatgcaacaggaattcccatattgtttgttggggtgggacaaacttataccgacttgagaacattaagtgtaaaatgggccgttaacacccttatgtcttga

SEQ ID NO: 565 - DNA, 2031 bp, Saccharomyces pastorianus
atgagtaggaaaaactcgaaaaaactaaaagtgtattatttacctgtaaggttgacccaatttcaaaaagatttatcggaaatactcatatccctacatgctgaatcgttcaagtcaagtctagtagatgagcccccggcaaactccctgagtaggcttgatgggtcatctgccaagcctgaaacgcattcatatccacggctatcacaaagacaattgacctatatcttcgactctaacataagggccatcgccaatcatccttcgcttctcgtggaccactacatgcctcgacagcttttgagaatggaacctacggagagcttgattgctggcagccacaaatttcaagtccttaatcacctaatcaattcgataatctttagagatagaatacagacacccaataaaattataaaatgcgccatcatagcacatagcatcaaggaattagatttgttagaaggcctcgttttggggaaaaattttagaatcaagaggctatctggtacatcgctctacaacgagaaacataaattcgccactctaaccacgaccgataccgcgacaaataaagatgggaccccgaattctctaagtagcacaagttccaattcaaactcgacttcttatacgggttattcaaaagacgactacgactattcggtgaagagaaacttgaaaaaaaggaaactgaacactgacgattggttgttcttagcgactacaaaacatttaaagcatgaccaatatttattggccaactacgatctcgatatgattattagtttcgacccgatgctggaacttgaattgcccgctctacaactattgaagaacagcaccaataaaaatattccaatgataaagctactggtgcaaaattctccagatcattacctattagatccagaaatcaaaagttcgagttcgtccactgattcagtttatttgggcgataacgatcatctcgataatggcaaagaatatgaagaaattaaatcgtctttactctattttctgcaaacaaggaaggcaaaagttgataacttcaacgtcgattatgctgcgttggtaaaatgttgtttggaagggggagactgtaacgaattcttaccagctttgaatttggtcacgttggatgagacttccaaagacttcagcggttccgacttttggcaaccacaattaaccgaattaaattattttactacagaattgcctctttgggacagtccgttggacatcaagacttatcaaaccgaactaatgcatagagctgttattagattaaaagatattcaggatgaatttacaaaagataacgatctactaaatgaaaaacggtctaatgaaaatcaacggcaaaacaaactggatgatatcaaaaattctattcgagttacatttaagaacaagcaggaagtagaaaagtccatcaatgattctgaaaagagatatagacatgccatgaccgaatctaccaagctagatgacaaggtgaattatctgcttaaaaataaagcagaactggagaactttagtgaattgtgtcccggaaatagttcatctgaatatgatccggaaaaagaatctacattagcaaccaagttgagtcaatatgcagatgaggacgtaattatttccaataaattaaaagcactacaggaagccaatgcggaaaaattaaagaaaaatgatgaattacgtttccaatatcaaatagaatcttcaaaagctgcggaatcagctcaaactttgaaaacgttgaaagaatcactgggatctttagaaaatgaagtaaatggtcctttgacaaaagttcccgtagaaagctcaaagagggaacttgaaatgctgaaaaaagatttgcaatcgcttaaatcaaaaaacaaatttttgaaaaattacataaactcaatgaaccgacagtacgaccttaaaaacaaaagcaacgtccaagtagaaaaaaccgctacaactagtacacggttcagatcgacgaggtcaaatacacctaattacacatga

SEQ ID NO: 566 - DNA, 681 bp, Saccharomyces pastorianus
atgaaagtaaaccagtccatttcaaggtttcgtccggcgtcgtggttcgaaaagacaaaaataatcccgccccaagtgtacattttcaggaacttggaatatggacaagtgctgtattctcagttccccaatttttcgcagaaccagcttgacaagctgttcgtgaggccgaactggagcaacaggaaaccctcgataagaagggacatctggaaatgcatgtgtgtggtgaacctacaaaattaccagcagagcgtccaactgtaccaaaacctctgccgattgagatatctgcgcgacgtggcacagcacaaggacaacgacaagctcagaaagaaggactccaacgggcatgtctggtacagcggacaatataggcccacgttttgccaagaggccgtggcggacttgcgagagtcgttgttgaagatgttcgagggcagcgcacaagcggaaacgcaggctacgcccgccaagaaaccgtcgatatactgggaagacccgtggcggatgggcgacaaggaaaaatactggagctccggcgtgttcgacgctctggggctggaacacaaacttatcgagcgtgtgggaaacaccgcaagagaggagagcgtggtcctgaaagaactagccaagttggaatcgcagtctccggatcagacgaaagcacccccacaatag

SEQ ID NO: 567 - DNA, 639 bp, Saccharomyces pastorianus
atgtttaatagagtgtttactagatcatttgcatcaagcttaaaaaccgcggcttccaaagttgctgtccctccaccagtgagattattcggtgttgaaggcacttacgcaactgctttataccaggctgctgcgaagaattcatcgattgattctgccttccaatctttgcaaaaggttgaaagtacagtcaagaaggacccaaagttaacgcatttactacagaatcctgcattgtcgttgcatgatagaaatactgttattaatgccatcgtggacactcacaagaatttggacgggtacgtcgtcaacttgttaaaggttctttctgaaaacaacagattgagttgttttgaaaagatttcttcggactttggtattttaaacgatgctcacaacgggttgctcaaaggtactgtgacgagtgccgaacctttagatcctaaatctttcaagagaattgagaaggctttaagtgcatctaaattggtggggcaaggcaaatctttgaaattggaaaacgtggttaagcctggaatcaggggtggtttgattgtagaacttggtgacaagactgtcgacttaagtatctctacaaaaattcaaaaattgaataaagtcttagaggatagcatttag

SEQ ID NO: 568 - DNA, 1620 bp, Saccharomyces pastorianus
atggctaaatcgttggcggacaaaatttccgatattgccatcaaaccggttattaaggattatgatattgaagacgaagaaaatacatctctatttcaacacgatgaaaatggtgcagaaagtgatttgagcgacaatgaagatgttaactcaggacaggctaagaagtcccattacttagaagttgaaaaatctacgttgagagcagaaaagggcttggagttaaacgatctgaaatatacaggtgtgaaaggttctagacaggctttatatgatgaatcctcagagagcgaagatatggaaaaggacgaaaatgagagtggcgaagatggcgaagacgacgacgctctttcattcagaacagattcagaggacgaacaagcagaagatgcagaagatgaagaagaagagttggatgtggacgacgatgagatggaagaagccgcacagaaaagaagcgcactatccaaacttgttcagcaagaaaccaaacaggctatcaataaactgtcccaatccgttcagagggacgcaaccaaaggttattcgattctacaacaaacaaaattatttgataatatcattgacttaagaataaaattgcaaaaagccgtgataaccgcaaataagctacctctgacttcagagtcatggaaggaagctaaaatggacggttcaaaagaaacaaagcatttattaaaagaaaatgagaagctttttaataatctattcaaccagctagtaaatttcagaataaaattccagcttggtgaccatatcactcaaagcgatgaatcgaaaaagcacaaattatccaaaaaaagatccgttaaagagctttacaaagaaaccgatagtttagactcggaactaaaagaatatagaaacgctgtattgaacaaatggtccaccaaagtctcttctgcatcaggaaactcggctttgtcatcaagcaagtttaaagccattaaccaacctgcagatgtgcaagtcgagaaccaattatccgatatgtcccgtttgataaagagaacaaaactaaacaggagaaacataacacccatgtatttccaaaaagattggaccaatggtaaattaccagagctggcatctcaaaatgtagaagatggtgacgacattgacaacaattcagatgacgggctcgatattccaaaaaactatgacccaagaagaaaggataataactccattgataccagcgaaaacccgtacgttttcgatgatgaagacttctatcgtgtcttattaaacgatctgattgacaagaagatttccaacgcgcacaattctgatagtgcagctattacaatcactacggccaattctcgctcgaataacaagttgaagaaaaacatcgacacgaaggcttccaaaggtagaaaattgaactactctgttcaagatcctatagcaaattatgaagcacctatttcttcggggtacaaatggtcagatgatcaaatcgatgaattttttgcagggctaatgggccaaagagtgaactttaatgaggacgaagaggaggaccaacatgccggagaagacaacgatgcagaattagaggctgttaagaacgatgacatccagatttttggttag

SEQ ID NO: 569 - DNA, 4071 bp, Saccharomyces pastorianus
atgaatgtgtacgatgatgtcgtcgacgctactgttgtgtcgcattctataacagctcattttaccacatctgaatatgaggagctcttagttgtaaggacgaacattctttccgtgtacagacccactagagacggcaagttgtatttgacatatgagtttaagttccatggcttgatcactgatataggtgttgttccgcaacaggatagtctattaagttgcttgttattatgcacaggcgttgctaaaatctcgattttacagttcaacaccttgacaaactcaatcgatacactgagcctccattactacgaggacaagtttaaggacaaatcgttggttgaactggccaaaacatccacgctaagaatagaccctggaaatagctgtgcattgctatttaacaatgatattcttgcttttttacctttccaaaccaataaaaacgacgaggatgatgaagaagatgaagaaaacctggacgaagaagagctcgtccatagtacagacgagaaatcgcaaacattgagcgcctttaatagcagaaaaaaaattaagtcatacgaaacattcacagaggcaagtgtaatactaactgccaatgaattgtatgacggagctaaaaatattatagatatccagtttctgaacaattttaccaaacccacaatatcgatattatatcaaccaaagctcgcttgggcaggtaatagcatcctttcaaaactccccactcaatacgtcacactcacacttaatatccaatctgcaaagaaaagttctattattgaatcaacgacaatagcttttgtaaaaggattaccttgggacttgcatacaattgtgccggtttcgaatggtgctattatagtgggtgctaatgaactggcatttatagataacacaggagcattacaatccacgattctattgaattcatttgctgataaggatctacagaaaacgaaaatcatcgacaattcctctttagaaattttattcagagaaaaaggtacaacgtcaatttggatgccttcatcaaaaagtaaaaacggtgccaacaataacgacgaaaccctactgcttatggatatcaaatccaatatttattatatccaaatggaagctgaaggtagattactgattacgtttgacatctttaaactacctatcgtcaatgaccttttaaaagaaaactctaatccaagatccataacacgtttaaatgcgacgagttcaaataaaaatatggatcttttcattgggtttggttcaggaaatgctttagttcttagactgaataacttgaagtctacgattgaaacaagggaagagcacaaaacatcgttttcagatcaaaatactttgatggatgataacgacgaagatgacgaggagatggatgatttgtacgctgatgaggctccagaaaatggactaaccaacactggctccaaggacacagtagagaccgtccagccgtttgatatagaactactatcgtcattgaaaaacattggtccaatcacatctttgactgtggggaaagtatcttctattgatgatatagtaaaagggctaccgaatccaaataaaaacgaatattcgttggttgctacatctggaaacggctcaggttctcatttgaccgccatacagactagtgttcaaccagagatcgaattagcattaaagttcatcagtataacacagatctggaatctcaagatcaagggaagggataagtacctagtaacaactgattctaccaagtcgaggagtgatatatatgaaagtgacagaaatttcgaacttcacaagggaggtcgtttaagaagagatgctactacagtttacatttcaatgttcggtgaagacaaaagaataatacaagttaccaccaaccatctatatctatacgatacgcatttcagacgtcttactacaatcaagtttgattatgaagttattcatgtctcagtcatggatccatatattttgatcaccgtttcaagaggtgacataaaaatatttgaactagaaacaaaaaataaaagaaaattgttaaaaattgatttaccagaaattttaaaagagatggttatcacttctggtttgattttaaagagtaatatgtgcaacgaatttttgatcggattaagtaaatctcaagaagagcaattattgtttactttcgttactgcagataaccaaattatttttttcactaaagatcacaacgacagaattttccaattaaatggggtcgaccaattgaatgaatctctgtacatcagcacttacacactacttgatgagattgtgcccgatccttcgattaagcaagtaatgatcaataagctgggacacgataataaagaagaatatctggcaatactaacctttggaggagagatatatcagtatagaaaactgccgcagaaacgcagccggttttacagaaacgttacaagaaatgacttggccatcactggtgctcctgataatgcatacgctaagggggtcagttctattgaaaggattatgcattacttccctgactataatggctattcggtaatatttgtaaccggtagtgttccatatatattaataaaggaggatgattcgacacccaagattttcaagtttgcaaatatacctttagtctcagtcacaccttggaatgaacgttcggtcatgtgtgtcgatgatattaaaaatgctagagtctacactttaaccgttaacaatatgtactatggtaacaagttaccattaaaacagataaaaattagtaatgtacttgatgactacaaaactttacaaaaaattgtttatcatgaaaaggctcaattatatctcgtatcttattgcaagcggatcccttatgaggcattgggagaagacggggaaaaggttgtaggctatgatgaagaagcgccacacgcggaaggattccaaagcgggatactgcttattaatccgaaaagttggaaggtgattgatcaaatcgacttttcgaagaattctgtcgtcaatgagatgagatcatcaatgattcaaattaattcaaagactaaaaggaagagagaatatattatagctggtgttgcaaatgctactaccgaagacactccaccaactggcgctttccatatctatgatgttaccgaagttgttcctgaacccggaaaccctgatacaaattataagctcaaagaaatcttccaagaagaagtcagtggtatagtgtctactgtttgcgagattagtggaaggttcatgattagtcaaagccaaaaagttttagtaagagatattcaagaagacaattctgtcataccagtagcgtttttggatattccggtattcgtgacagactccaaaagcttcgggaatcttttgatcattggcgatgccatgcagggttttcaatttattggttttgacgcagaaccatatagaatgatttcattgggtagaagtatatcgaaatttcaaacaatgtcgctagagtttttggtgaacggaggggatatgtattttgcggcaacagatgctgacagaaatgttcatgttttaaaatatgcgccagatgaacccaactctctttcgggtcaacgtttagtccactgctccagtttcacgttgcattccgttaatagttgcatgatgttattaccaaaaaatgaggaatttggctctgctcaagttccatcgtttcagaatgtaggtggacaagtcgacggatctgtattcaagctagttcctttaagcgaagaaacatacagaagattgtatttgattcagcaacagatcattgaccgagaattacagttaggtggactaaatcctcgtatggaaagattggccaatgatttctatcagatgggtcacgcaatgaggcctatgcttgacttcaacgttatacgaagattcagcgggctagctattgatagaagaaggaataccgctcaaaaagcaggacgacaggcacattttgaagcatggagagatatcataaatattgaattttcattaaggtctttgtgccggaacaagtga

SEQ ID NO: 570 - DNA, 660 bp, Saccharomyces pastorianus
atgtcgactaaaaagagacctaggaagacagtaaagaaaactgtatcgttttctgacgatacaactttgactacgcatcaaaatcatgagaaaaagaatatagatcacgatcgtccgcctgtatatgtaagaaagacacctctaatgacttttccatatcacttgatactactgctctattactatgtttttatttcttctgactacaatacagtgaagcttttaagccttttaatacctgcacaaattggatatctaatttttcaattcaataaatgtacggtttatggtaataaaattatcaaaattagctattcattgtctttgatttgcctgggtgccacatttctgttgagttttcctgcaatgttattaaccgttctatttggtgcaccattgatggatttattgtgggaaacttggttattgtcgttgcattttgctttcttagcatatcctgcagtttattcagtgttcaattgtgactttaaggtgggcttatggaagaagtatttcatatttattgttgtaggtggttggattagttgtatcgtaattcctttggattgggatagagactggcagaattggccaaccccgattgttattggagggtatttaggtgctttagtcggctatactattggtgcttacatataa

SEQ ID NO: 571 - DNA, 2682 bp, Saccharomyces pastorianus
atggatattcgtggtaggaaaatgaaaaaaccgccagcatgtgtgcagtgccgcaagcgcaaaataggttgtgaccgtgtcaagccaatatgtgggaactgtatgaaacacaataaaatggactgtttctaccctgatgttcctggacaatacgttccctccagctcgtcctcttccaatacacgccaaatagccaacggcccgtatttaaattcttattatgcttcttctcgtcgtgtctccaaggaaactgcagctcttctacagaaaaacccagagctggcttctttggagcaaattagggaatacaacacgcgtttgcaattgctcaatgctcaaaatcaactcaataataggacgtccgcggcaaacgcaaccttgaaccaacaacatactcaatatattccaaaatcggtgccttccttggaaagcaaacctgtcacttctacaaacgaattttctactcagctcaattgggttcaaggtcccgcaattttccatatgctaacttctccttacacgcaagaggaaatcatcaatcatgaaatgaatttcttgaaaggaaggctattagaattgcaggatattacaggtaagaagatctcagggataaatcttgatattaagcaagatccctcgccgcaagatccttcgcggcaaaatcaatcttcgctatcaagtcaagaccaagaagagttcttgaccattaagaaaaggaaattgagcgaagacgatactacagacggagaagataaaatggttgctaacgatgaaagaaaatttcatctcaacgagttcaaagatttggatcctcagtttttggatatgaataaggtatttaacgtatttaatactgtggttacgcgagacaatagtgaaaatttgtggctgttaccaaagaatattaacaaaaactccattttccaaatccagtacttgattgaacgcgatcctttcctattcaagtttttcagtgaattcaatacgttgattgaaaaacgattcaatgagtctttgcaagattctttagcaaaccataataacgcgaaggataacaacagtatatcgcggttgttaaaatttccttcacagtctgttacacagaacctcatcaataagtatttatcaacggttactgaaacgagttcgatattgccaatcttaaagccaaagcgactgctaccaataattgagcaaatatttccatcaaacgccatgagaaaggcaagttctaatgactttgaaacggtgtttcaaatcgtatgtttgaataatgaccagttaataaacttgggattcataaccctttgtctcttaattttatttgaatcattgaactccacggtgttgattcctctgagagatgatgggcatttgcaactcttcaatattttatttgattacttacctttgttgaaggcaaatttgacaatgcttagatttgaaattgataaaagatcaatgtgcaatatggacaccttacgatttatttccctatggaaatattaccaatcagtgataactacatcatcttcatcttccaacacgattgactatgatgaagatatgcatatggcatgtctactgtcattaaaccacgagactcagaatcaatcacatattttggtttggaatttcatattcaaaaattactgctggaggcatctatttttaggcgagttaccattgttaatatctgaaccatttacaaactccactccaattattgatccgttactgaataacgatttcgaattgattgatttcgaagtgaacttgatgaaatatttacaaagtaaagatcaacggctatctattgataagattgtacagcttataaaagttataaaaaccaagaatatcgaagttagccagagatgcttaacaacttcttcgataatcaataatattatggattctttaatttatagaaattcgatgttatatttgaatttttatcttttactacagtttgaaacgttaaagagctgtgagaaattcaacgaaattttagatgactttttggaattgttaagagagactctattcttcgttttctcaaacttagcaaatatcaaatttgccggtcatgaattcaccttcatcaataaatctattgcggttctgcaaactctggtcttgatgctgttagcgttataccaaagatcgtttgagtcttctgaagcggtgaacaatgaaaaggaaaactacacagatcaaacagacagtaaccacagtaacaacgacaataataagagaattaagaataagaacgttattcatttgattatcaacaaaattgcaatgttgttaaacgattacactaaaaactgtaaaaaacagaataggttgatcgaaaatctaataactaaaattgagataatttccaaatatatcaaaaaattagaagaaagcaagaccttgcctgtaactaattcaaacaactctaccaataacggattcagtaatatatctactgatcaactaattaagataaatcatgaattgaataaaatttctgagtctttgattaaaacagatttttacgagcaaagaaaaaataataaagtatttaatggaggtacaggtactacgaccactgttgataatgaggccaatttggagaatttcggtttaaccaaggaaaacttcagtgaaatttttgaagccattcgcagttaa

SEQ ID NO: 572 - DNA, 687 bp, Saccharomyces pastorianus
atgaagttccaattgttatccatcatcaccctgtttgcttgtttatttacgacaaccatctttgccaaagaagaaagttcggaccctgagatcacacataaggtgtatttcgacatcaaccacggcgatgaaaaaatcggtcgtatcgtcatgggtctatatggcctcaccacacctcaaactgtggaaaacttctaccaactcaccatttccagggatccaaagatgggttacctgcactctatcttccaccgtgttattccaaatttcatgattcaaggtggtgattttacccacagatctggaatcggaggcaagtctatctttgggaactccttcaaagacgagaattttgacgtcaaacacaacaagccaggtagattgtccatggccaaccgtggtaaggacaccaacggatcgcaattcttcatcaccactgtgccatgcccatggttagatggcaagcacgttgtctttggcgaagtattagagggcatggacgtagtgaactacatcgaaaacgtcaagaccgacagcagaaacatgcccgtgaaggaagtctctattatagaaagtggtgaactggaaaccgtcccgttaggcaacgaggacgccgccaagctgcaggaagaaatcaaagcggaagccgatgagcaagccagtgaagcagcccacgatgagctctaa

SEQ ID NO: 573 - DNA, 1434 bp, Saccharomyces pastorianus
atggtcaacaagtcacggccaaagaaaattaaggcaccctacaggaagtatgtggcgggcgagggcttttcctctacaagaaatgataataaagagaaagaggctactgccactgtaccacccgatgcagagctaattgagacaccacaggggtcttactactacgatgaggctaatgacactatagtgaagttgacgcgactgagcaatagtaaaaaagacagaaaaggacgtaggcgatcgtcatcgtcatcgtcatcatcgcatgccaaggaagataaagatgggcaaatgatagaaagtgaaaaaagcactcatttgttgtacctaagaatggttttgccctgggaagtacagcatagaataacgcactatcttgatattcctgaagaagaagaagttagtaataaggatactactgggaaaataatcactactggtataaccatgaactatctgctagtttgtagaaactggtatgacatgtgcttaccaaagctttatttttcaccagtattaacaagcaaaaacttcaattcatttgtcgatacaatcattttaaacaagaagaaacaactggggcattatgtctttgagttgaatttgtctacgattttacaaagtggaaggaactcatttgtttctaagctgttacgacgatgctgctctaacctaaccaaatttattgccccgcagacaagttttggttacgcgcccttgatttccttgaaatcgtgtcatgatttaaagtttctagacttaggtctagtatcagagacagttaagctaaaggagctattttccgccatcaaaaactttacgaaattgacgcacttgtcctttcccagatcgtcgattgactgccagggcttccaagatattgaatggccccagaatttgagatatttgaaattaagtgggggcataacgaatgaatttgtcattgacactaaatggccaaaaaccattaccactttagaattctcttactgtcctcaaatcacagagctgtctattttctcgttgttatcacagactggtgacaatctaaagcatttatttttctattatccgatgccatctttaacggaaaattccttggatcacgttttcacatattgtgctaatttaatctccctacaaatcatggttgactattgctccaagtggtgtttttctgaattcatgctgagtaagttgatggaatacgataggcctttgaaaacattatacctggaatgcagtgggtccttgggtttggcttctaagattcatcccgatgacctgaccatagccatattagaatcaaggctaccctgcttaaagaccatttgtgtttctcctaagttaggttgggacatgaaaagtgacgaggttgccgatttagtagtttctttggaggatcaagatggtagtttgtacctaaactattag

SEQ ID NO: 574 - DNA, 855 bp, Saccharomyces pastorianus
atggctatcaaggaagattgtataaacaatctcgctaggtggcagacagacgaagaagctcagagctgtttccaatgtaaggtaaacttttcatttttagtaagaagacatcattgtagatgctgtggaagaatattttgttcttcctgtaccgagaactttgtaaattataataaaaagaaggtccaagttttgcagaaaaagaatagcgatgcggaatcacctccatacagaacctgtaacgagtgctatgacaaccttctacatctaaatcttctggtatcttctgccaataaagacccaagactatcgcaagtcgcgaacacaaatacgcccgctgcactgaacgatgacgataacgaagatacagaaatcatggaagacgcgatagatcaagatgggccagaatgtggaagctctcgaaacgaagaagacaaattttgccccatttgtaatgccgatctagcgcagtttgctaatgatgaagaaacgagagaacacgtagaggattgcttacaaagagctgaaaatgctcaacaacatacagcgacatcagaagcgggaaatgagaccgcaaaagaaagtccgacattccaaaatagaatgctagtctataagataccgcccatcacagccaatgatgaaaaccatgtcgaaattaaggaatgtcccatctgttttgaagaaatggagcctggcgaaaaagttgggagactagagtgcctgtgcgttttccattataaatgtattaaaaactggtttcataagaaagcgcaaatgaccgcagctcaaaaggggaatagctcttcttttgttaaacgaaatttttgtcctttccatgacgctgtattttaa

SEQ ID NO: 575 - DNA, 2079 bp, Saccharomyces pastorianus
atggtcaaacgcttgctcgaattgggccaccatgatgaagctaaacagaaactgcggaaaaatcgacagcaagaggagttgttttgtgatgaagaagacgtaaatgattcatttcatgaattaagccaagatgaggaggaagtactgagcgatatcgattgggaagaaattcctttggatggaagtataactgtcactgtagctaacacacaccaaaataccgagacaatatgcaggcgcaagaggaagcataaaagaaaaatatttaattatcagcgacttaagtatgggttgcatcttgtaatgattccatttatgctatctttgttggaaactagaatgaaatggaccaccgacgagagattaaatagacgtctgaggagatcagtacccaagctgattaccaagaaatttaaagtttggggtgcaaaggatcaaacctccaaaactgcttccttgaggacgctattacttggactagtgctatggtttcgttccaactacaaaatcaatagcaacggtatcagacagaaccttaacaggttacattatctcatgaagtacgcggataatcaagaggctagtccgctctctaaatccacatacaaacacgtttttgataatcagcaagaattctatggtaacagaccattgctgaataatgacattgaggatattcgaaacatggctaagaagaagatggccaacagagatatactgactttgttcttcttaattatcttaaataatattttaccaggggccaagaatctttatttgtgctttgctttgccgttgcacgattacgatattaggtgtaataaagtcaaatggcaaattgaacacggaatcggcagagtacctaatatatttgatactgatctgatacaaccgtatttttggattgaattagaggtttcttccttaagcaaggatgagctatatatcatcgatcctatagcccacctggatgaaagcgaaattgttttaaaaactcgcaaaaatcagtttgttcctaattatcagcctccaatggacatgaagctcaatctgactcagaggttccactacgtggttcgcatggaatacaccaaaggaataatacaggatgtttctccgaggtatgtgccaaatgtttgctacagatacttcactttatctgattcttctcccatattgaaatcaaagcattatataagctaccaaaatatttctaggtggttgaaaatatggaaccgaaaaaaggccccctaccataacgatgcgttaatggctgatattgcgctatccaattttgtattgccaaaaagtgtcacagaaattaaaagaactgataattttataattccttcgatactaaagtctaatgaagtactagatttacacgcaaaaccagtttcctcgatacccgaaatgaacagtttgagagagcctgttttttggaaaaaagacgttatactattgaagagtaaacaacattgggcaatactaggccgttccattttacctggtgccagaccattaaaacgtaagaagtacctaccaatgaaagaacgaatgggcaataatctagacagatacgttataaaagaattattctcatgcgaacagacaatgaagacccctaaatactctaatacatatcatgaccacttcggttacgagcatgtggttgaagatgtgtcccattttaagaataaattcggcaacatcgaaatttattcaatagacaataaacctgacggattcgagttggttgcactcaacaaagatgacgatgtcaagggtctcataaagaaatacaacaaagcccaaaaacaagcccaaagaatcaagtacttggaagtggtgagtggttttgatttcagacagaaacagggccacgctattcccaaaatcgaaaacatcctagtcaaagaaagtgactacaaattgatccaagatttgaaaagtaaaaccaaattactaaaggggctctccctttgggatagtttattaacaaagctacgggtcaaggacagattaaatgctgactatggaaatcttgaaaaaaatgacgaagtttgcgatggccattga

SEQ ID NO: 576 - DNA, 1416 bp, Saccharomyces pastorianus
atggttgcatttccacgtccctctgtatgccttttatattggactcgacaaccgatatccaaaagcgtattcttgcaatctcaaagacggttgttatcctttacactttctagacataatgatagtcatctcaatgacgataaaaataggaaaaagctgaagaacgtgttccaaaccaatagtaataaagcagtacggaaacaaaaaaccaaagaagacctggcaagagaaaggttcgaagaacaattgaagtcgtccaatagatttgtcagatggggtgctattgcaagatctgaaaagttctcgaaagggatgactaagtacatgattggtgcctatgtcgtctttttaatttatggtcttttctttacaaagaagttatttgccagagataaagagctggaaagattgttgaagaagcaagaggagggaaatattaacgaatatgaaacgttaagaattaaagaattaaggggcaagctaagaagaagagatgaactgaagttagaagagtacgaaaagatgcgagaggaaggtgttgaaaactttgatgatgtgtatgtacagagttttgatcagaacaaattaaacgaacaaatattgccagctagagatacgacaaacttttatcaagggaaagctagtgaatatgataaagcaatcaatatggaagagaaggtaatatttcttggtaaaagaaggaaatggttaatgaaacattgccaaggtgacgttttagaagtgtcttgtgggactggcagaaacatcaagtatcttgatatgtctcacatcaactcgatcacctttttagactcatctgaaaatatgatggacatcacgcataagaagtttaggaacaagttcccgaaatacaaaaaggctgcctttgttgttgggaaagcggaaaatctcgtagatttagcaacgaaaggtaagtcccctcaagagaatgaaacctcaaagcaagtcaaatacgatacaattgtggaggccttcggcttgtgttcccacgaggatcctgtaaaggcgttgaataatttcagcaaattattgaaaccagatgggagggttattttactggagcacggtaggggccaatacgattttgtgaataaaatgttagacaatagagccgaaaaaaggttgaattcttggggctgtagatggaaccttgatttaggagaagtattggatgattctgatctagagttggtggaagaaaaacggacgcacttgggtaccacttggtgtattgttgctaaaagaaagggagatgtgaaaaagaaaagtgaacttgggtttgtggagaaatacctacagtcgagtataagaaagagaatggagtcatttgaaggggataatggcacagagtctaaacagcagcatgaaccggtttcttctattaataaaaactag

SEQ ID NO: 577 - DNA, 825 bp, Saccharomyces pastorianus
atgatacatcagctgtgttattggtcaaagaaagcgtacctagtttatcctattcaagtccttttaggcgcgataatatcaatattagtgtctgcagagacactgaattatcaaaaaaaaacgtataccctattaaaatcgtcgaatctcctcaatataatctttgcatataaggcgaacaaaatatggccgattttcttccttagtttgactctactgcaaatatacttccactatttagctagactggatgtactaccactgccgatatcgagttctgaaactggctctacatatttatcctatagtaatcgtcggcccctgctccaaaatagagtgattattactatggctgcccaatatgcatgcaaattcgtcttaaagaatctgctattatttttgagttttcaatttattgatcatgtttttatttggacgggaggagaatgtagttctggtagtggaacaacatcagctgaaaaatgtcgcttagagaaagggaaatggtacggtgggtttgatattagtggtcatttttgttttcttgtcaatattagtatgattctgtggatggaactacacttgtttagtagatttgttcaagttgaagacatgctttgggtagtcaataaatgggttcgagcttgccttgttattatcagtgttgtactattgatctggatctgcattctctgggttactgccatttactaccatacgattttggaaaaggtgttaggttgccttatggggtacatatgcccagttttcatataccacattttaccgagaatcgaattattacatgattatttgtatatatga

SEQ ID NO: 578 - DNA, 1983 bp, Saccharomyces pastorianus
atgtcagatccgtttgcacatctgttgacatcattgaagaacaaggattctggaactgaatccaagaaaacaacccctcagaccaaaactttcactgccacatctgcaactgtagttgcgagcgttgcgacaacacctaaaggtaataacaatggtctccattcactgtctgcttctcctatagtaccagtgtcgaatgtaagtttctctgcggctccgttagtaccaagtaatagcaattccaacgcaaatactgctggcaatagtccttcgccttcgccagccaatgttgaagatgactttgacgatctctttggtagtaacacaatagaaacatcggatgggcttcaagaggtagaccagctttactatggaaacaacgacggctcaaatggtggtgataacgtcttagtcgatgaagttaaggatatggaaatcgcaagattgatgtcattgggcttatcgatcgagaaggccactgatttttataatagcgatataacgtatgaaaggtatttggaaatttcgaaactaaaccaaaagaagcacaaggaccaaattgttagtcacagaccgactgatttaagttataagaacgcaagtttatttaacaatacaaattcaaataataataataacctattcagcatggctactgatttctttaacaagggaaaggaactggtagaccaatggacctcttttcctccagaggcaaacgacagactaagtaactatgcaaacgttgaagataaacttgaccactacgaattgcctttaaaaaatgattcacacgaagggtctctacctgaaaaaaaagagtatgagaaagacttgcttgggggaaatgatctggatgatgatcttttaaccgattttgaaacgaaggtagatatagcaaagaagaacacgaagggcacgactctatcgccttcaccatcccctggcatactagtcgaggatacactgagaaaagagacacctcgaacggaggataatcttttagatttctccacagacatcatcaatagcaccaacgatagcgcaatttttagtgaggatggtaacgcgaaccctgtagtgcctatctcagatatcgaattatccggttataacgaatttaaagcaaagggtaccagtctgtttaaaaatggtgattacgtgaattcgttacaggaatatgaaaagtccttgaattcattacctttgaaacatccattaagggtcattgctctatctaacatcatcgcatcgcaattaaagattggtgaatattccaagtccattaaaaactctgatacggcgttggcattatttccatcagccaaacctagatggaacgataagatttcaaagagtgatcctcaaagatcattcaacgacatctggccaaagatcatgattaggcgcgctgaatctttcgagcatttagaaagtttcaaaaatgcactagaaacatatcaagagttaattgaaaaaaatttcttcgatgataagattatgcagggaaaaaggagatgccaaagctttgttaatcctattcctgtaaggaaacccagtcctgtcaaaaagacaacaccaactccggcaccaatgaagaagccaacttcctctccttctccggatcccgttgacaacgcttcgagagtaaaggaacaggagttggaaaatgctaaattggcattatacgataatgtctctgatagaattggctgctggaagtgtggtaaagacgatgatatacgccatttgttagccaacctgtctagtctactaacatggtgcaattggaaagatgtatctgtgcaagatttagtgatgcccaaaaaggtcaaaatcacctacatgaaagctgtagccaagacgcaccctgacaagataccaaaatccttgtctttggaaaataaaatgattgcagaaaacgttttcactactttaagtatcgcttgggataagttcaaacagcaaaatgagatcaactaa

SEQ ID NO: 579 - DNA, 219 bp, Saccharomyces pastorianus
atggagaaccctcacgaacaagtgcaggccaatatactgtcgcgcataattggtaatgttaagaggctcaacgagagtgtggcgatcctgaaccaggagcttgtgaccatcaataatcggaacaagaatttggagattatgggtgcgatttgtgacaactaccacagcagcgttcagttcaacctggaggccaccaacaacaaaaaaccgcctttatag

SEQ ID NO: 580 - DNA, 291 bp, Saccharomyces pastorianus
atgtcgacggttaatgtcttgaggtactctgcgttgggtttgggactgttttttggttttagaaatgatatgattttgaagtgtaacgctaagaagaaagaggaacaagcacaatacgatgaaaaattgaagttagtagaggaagcaaagaaggaatacgccaagttgcagcctgcagcaactcttaaggacacacctgctactattgcggtcaatttggaagatcctaacattgatttcgaaaaagttattcttaacgccgttgattccttgaaagaaacttccacatga

SEQ ID NO: 581 - DNA, 597 bp, Saccharomyces pastorianus
atggtagcttctagtgttgttctcgtgagtggggagggtgaaagattcaccgtggacaaaaagatcgcagagaggtctctgttattgaagaactatttgaacgatatgcatgacagcaacttacagaacaactccgattcagactcggattcggactccgaggccaaccacaagagcaaagataatagcaacaataacaacaacgacgacgatgacgatgacggcgaagacgagatcgtgatgcccgtgcccaatgtccggtcttctgttttgcagaaggtcatcgagtgggcagaacaccacagggactccaatttccccgacgaagacgacgatgattccagaaagagcgcccccgtggactcatgggatagggagtttttgaaagtggaccaagagatgctttatgaaatcatcctggcggcaaactaccttaacatcaagccgttgctggacgcgggctgcaaagttgttgccgaaatgatcagaggcaggtcccccgaggaaataagaaggacgtttaatatcgtcaacgacttcaccccagaggaggaagccgccatcagacgtgagaatgaatgggccgaagaccgttag

SEQ ID NO: 582 - DNA, 1236 bp, Saccharomyces pastorianus
atgcttatagcgatgcgtctgccgctactacttctatatttactcgtattgcccttttcaggcgcaaataacacagatgaagctcacgaaacaatagcaacaaacacaaataactgggccgtactagtatcaacgtcacggttttggttcaattacaggcatatggccaatgttctcagtatgtacagaaccgtcaagagattaggtataccagattcacaaatcatactgatgctaagtgatgacgtagcctgcaattcaagaaacctattccctggtagtgtgtttaacaacaaggatcatgccattgacctttatggtgactctgtggaggttgactaccgaggctacgaagttacagtggagaacttcataagactcttaacggatagatggacggaagaccatcctaaatccaaacgactattgacggatgaaaattcaaacattttcatatacatgacaggtcatggtggtgacgatttcttgaaattccaagatgctgaagaaattgcctccgaagacattgccgatgctttccaacaaatgtacgaaaagaaaaggtacaaagagatttttttcatggtggatacttgccaggcgaataccatgtactcgaaattttactccccaaacattttggccgtgggttctagtgaaatggatgagagttcatactcacatcactctgacgtggaaatcggggtcgctgtcatcgatagattcacatattattgtctagatttcctggaaaatattgataaaaactccactttaactttacaagacctttttgactcatttacatttgaaaggatccattcgcatgtaggtgttaggactgatttatttcaaagagacccatcagaggtgctgattactgatttttttgccaatgtgcagaacgtaattcccgatgactcaaagcctctttcgttaagccattatcatcactataaagactacattggtactgcccaatatgagcaaaacaataatgtgttggatttggccctagaaaaaaatcatgaaaatttctcctcctcgaagtttgacagactcactaaacgctttaaatctaccaatgaattgaatgttgatataggttcgaatgaatattctttagccttttccaagcaatcagttacattaggattaatgttcgtagtaatgattgtattgtttatactgagcggaaacactacgaaggcaaattataacctgtacaataattaa

SEQ ID NO: 583 - DNA, 3675 bp, Saccharomyces pastorianus
atggattctgcaggcgcttcccaaatagttagcgcattagatgtcatttactctccgaaatctaacaactctcagcgacaagaagctcagaaatttctagatgaagtgaaattgtgttcggaatctcccttctggggctacgaaattgcactgcaaaaccccactaattctatactgaaatactttgggctagggttattagaccacgctgtgaagaaaaactggagcgactatgacgaggaaaaaagagtggccttgagaaaatgggttatggagctcaatttcggggtgcaagatcatgacaccagatatattaaggagaaactggctactctatgggtagaagtggcgaaaagaacatggggtgaagcccttaaacaaacaaaccccacggaagagcagttgctcgcatcgtgggtagatatggacaataacctttatgaactttggaacgttaaccagtcgtcaagagaactagcattaataatcttcagaattctttttgaagacgttttcttgttggatgatttaatcgtcttgaagaggatgaccgtaatccagcctttgtgtgtaatgatcgtttgtcccattgaagtcttcgccataaaatacaaattcagtgataaatggaccaagtttaaagcaaacaaagaaggctggttttctgtttggattcccgaattaaacaacgcattacaacagaataattccgaatatattataagacttttagaaactttgaaaacctgtttaaattggccattgaccgaggttattgtaggaaatgatgtgttgacctgcttattgaactgtctttccagtaacatcccaaaggcacaatcaatggcactagactcaatacatattctgctgacccgcccatatagtaacgaaagccactatcaaatgaccatagatagagtgtttgataacatggacctgttggatagagtatatgacagtttattgtttgatccttctgatgatatagatgaaacgaaatatcctataattaaaaaattcgtggatatgattagttgtctttatgtttgtgttccgaagataaaggagactaacgaccaaattcaaaaatactttaagcttgtattaaggacaacatataatccgagtttaatcgtaagtgggttgacgttagacctatggtgtacatgtcttcgaaacgatgaatatctacccaaccttgagaaacatatcattcctgatttactacagtttgctgcagacgctttggtgtactatgaacaaattgatggccatgtttctaaaaaattcgctgaaattgactttcaatccaagtccgaattccaaactttttgttccacttataggaaaagaataagagatatcattaggttgatttcgtgtgtggagttagatcttacttatgactggctgaacaacagactaaatagctatttcagttcaccattcggccaacaagtcctaagttccacgtttttagaccataaatcagaaccttatttaggtgcgctgtctcaatacatgattgtggaatgtttcattaacggttgtataagatggaagatttggtatccagcaggggacgattatgacgaaaaattagattccatattacaaaagctagagatcttatcaaaccaattgatcgcattaaatctgagagaaccactactactgaagaagcaaatccaaaactttgcacttttcttgacaatgttgaaagataatgtacttttcacactgttggaaaaaattattacaagtgccacgatggattatccagaaattaatctggaggaaagaggccccgaatccgacgcagttcgagacctaaggtatgcttgcggtatcgaattgaacagaatggctttgctaatgcccgaatcactaaaaaaaatatacccagatctggaaaatgtaattgccaaaattatgccaaatttgtcttaccatgaaaagatttcgttcaagtcctttttattgatcattgtactaaaatcttcgctagatatgaaagaagaaagatttgccgctattgtggacccagaactattagcctggtccgataagacaacggtagttggcctttctgatttgcattggtttatggaacgtttaggtattgttcagattgcagaatattttcaaagacataacattaacgaaaatagtgatcttttatctattccaatagacgatgaaggtaaagaattaaagtcagagttgaccaaacgttggcaaagtctgttccctgttcgagcaacaagaatgttcattcattattcgatgcaaagtattaagactgatgaagaatttaaaatgttacaagatctatggagacctagaatcgtcccaattttaccttatatcacaaggttgttgtaccaattacaatcttaccatgatccagataattggaagggtctgcctatagttgtacagtcctttgtcaaatattccactattgaaagattttgggaagcaggagcctccaataaatcaaaagatgaattcatcgatgaacatatgaaggcaatgcaaactttaagagacttcgcagactctgtagggcacattataagatacacaagagaatatactctacttgtcttgagcgctatatcatcgcttggtagtgtcttttactttttggatgaatcgccggatttactattaaactctattgctatattcaaaccaggcactaatgagataagtcctggtgtttcaacgcatggttggaaacacataatgaatatagctattcgtcctattctgaaaggttgtccgaaagactgtttggacaagtttatgccggcttttttgccaaaattgtttgaaatcttagatgtgctactttgccagaaatggtctttgcatatgagtgatatggacatgaatccggttccatctgatgatgatcaaatgactgaagaaattttggaagaaaatttattgagacagttaactacagttgttgttcgaatagtgattgattgtattggacaaggaaatgccaatccaaacagtgccaaaagcaggctgaacaaccaccaaattgagttgagaaagattatattcaatgatttgaatattcttgccccatttttgaaacttttaaatcatttgatttcattcaaagatacaaagtgttcgtttaattctatcctagtgattaaatgttgtctgacttcagttctcaatcaaaacaataccgttgatgaatatttcacttttgaagtgatgaaaaatttattgttgaatgtattgtgtaatagcgcatttaaggattcttttcatgaagccctgtatgtcttcaccgttatattcttaacgctatgcaaagaatatccatcggctagagcatttttatttgagttagccaacggttacaatattgatgaattatacaagaatctaagaagtgtagacgaatataagggccagagagcactcatgattgattttatagattgggtgaagtcctcaaatgggaaggaagatggtagtgtagaccatgcaggtgatgagagaaaaatgcaggagaagagagaagctattctcaaaaaggcaaatgaaagactgatcaagaagaataaggagagtggagacatgttagatgatccgaatattgaagacggcgctgtaggtaatctctttgatgacaactga

SEQ ID NO: 584 - DNA, 966 bp, Saccharomyces pastorianus
atgcggcaagtccacaaaaggtatgtgcatcattcgaccgcatttatacaaagcatcgttgtcaatacaaaaacgagaacagcaggtacacaagaattattagaaagatataaaataaaacaatcaaaggctgtttccagaaagagagttgatagttggccaaaaaaagaggttccggcttggccaagactaaatgacgactttaatacttgctacggaaagccatccgattctgatctgaataaaaccaatcatttcttcaataaggcaaaagtgaaatttgaatggagtgctgctagtttcgatgacatacctagccagaaattaaaaaatcttacaacgtttagggaacccgattgtaacacaccaaagaaacaaggacgtgatactagcatcccgcctgcgtggctcaatactttgccagaagtgatctttctcggaggaactaacgtaggaaaatcatctatcttgaacagcataaccacctcaatcctaagcaaagaagtgggaagtttagcaagagtttcgaaaacaacaggttttacaaaaactcttaatagttataatgtggggaataaactcaggatgattgactcgcccggttatgggtttaatagtagtaagggacagggaagtgtcactctacaatacctcctagaaagagaagagcttgttaggtgttttctgttacttgccggtgataaggatataaacgatacagataacatgatgattcaatacatgcatgaacatggcgttcctttcgaggttgtttttacgaagatggacaaggtgaaagatttaaatagcttcaagaggaagattgagtcttcaggcttgactgaaatgccaacacttcccagaattatactgactaactcgcttacatctagtacgtctcccagacggttcggtatagacttattaaggtatacgatatttcaaagctgcggcttgattttatag

SEQ ID NO: 585 - DNA, 861 bp, Saccharomyces pastorianus
atgtcaatcattgcaaaaaaagctattttgaacctaagaatcacattgtgttctctgaatattggccaaaggtcgttcacatcctcttcgatcaattatagtgctaaagctgtgaaattcttaaaggcccaaagacgaaagcagaaaaatgaggcaaagcaggctactttaaaggcatcgacagataaggttgacccggttttggggcgcacggataccccatttataacacgtattatggccgagctaaaagaaccgcttgttctttcaaaaggctataacatcgaagaagtagacaagtttcttgtagctattgaatctgctaaacgtgaaagggcagaattgtcggggttgaacacagaagttgtgggacttgaagatgtacagtcattagaagcaagacgtgaggctattttgagaatattgagtatgagaaactctgagaataagaacgctattaaactagccgtagatttggcacgtaaggaatttgaaagattcccgggcgacacaggctccagtgaagttcaagcagcctgtatgactgttcgtatccagaatatggcaaatcacataaaagagcatcgtaaagattttgcaaatacgagaaatttgagaatactagttcaacaaagacaagctatactaagatatttgaaaagagataatcctgaaaaatattactggaccattcaaaaaatagggttaaacgatgctgctataacggatgaatttaatatggacagacgttatatgcaagattatgaattttttggtgataaaatattgataaaggactctaagaaagtggcagatcaaaaacgtaaagaaataaggagacagaaaagaactaccttttag

SEQ ID NO: 586 - DNA, 2088 bp, Saccharomyces pastorianus
atggctgggattctgtctaaaactctctcagaagtacatccttcgttccgaacgaatggtatgggtattggtaacactcataggaggatttcgttaggttttcttcctcccaacaagaaaaatcctctagtgcgtaagtttcgtgcaaaaacaagaaacactgatcaaagaagttttaggtctttgacagtcgatttcggaagtaacgtacatgaacccagcccctacttgggaaatatcgaagaagaacctgatttatattaccacgacgaggaggatggcgagcttagtagaaccatttctttaccttcaagagtgtcagagactcctgaactttctccacaagacgttgactggatactacatgaacatgaacgacgatactcgtcagtgtataactctgataatgaggaggagtgtcaaagcaacatacccgatagaacacaaggatatcccggaagagaactggaatatgacgaatttatgaacaggcttcaagcccagaaacagaaacaaaaccaaaatgcaacaatggatgcaaaaggtatctcacatcgtagaaggccatcattcgtatctgtaaacagtcgaggttcggtgcccacgatatatcaagacctagatgagaatgatccagaagcactagctgcattggctcatagtaatgtgaccttcaaatcagaagcaaaagtattagcatcttactctttccctttaatttttacatttttactggaacaaattttccctatggtttgttcattaaccgtgggccatctaggtaagaatgagctagctgctgtatcgttagcttctatgacttccaatatcacattagccatatttgaaggtattgccactagtctcgatactctttgtcctcaagcatacggttctggaaggttctacagtgtcggggttcattttcaacgttgtattgctttttcgatggtcatatatgttccgtttgcgttcttgtggtggtattctgagcctcttctttcttatatcattcctgaaaaagaattaatcaatttaacgtcaagatttttaagagttttaatactaggggcgccagcatacatttttttcgaaaacctgaaacggttcctacaagcccaaggtatctttgatgcgggcatttacgttctaacaatatgtgctcctttgaacgttttcgtcagttatactcttgtttggaataagtacatcggagttggcttcattggggctgcaattgctgtagtaattaacttctggctaatgtttttcttactgttgctttatgcattacatgttgaaggaagaaaatgctggggcggattctcgaaaaaggctttcacccattggaacgatttgggacatctggccttctcaggtattgttatgttagaagccgaagaactatcatatgaactactaacattgtttagtgcatattatggtgttagttatttggctgcccaatctgcagtatccactatggcagcattactttatatggtcccttttgcgatcggtatatctgcctctacgagaattgccaacttcattggcgcaaagagaactgatttcgctcacatttcttcccaagttggactatcattctcatttattgccggatttgttaactgttgtatactcgtatttggacgtaacgtaattgccaatgtttattcaaaagatcccgaagttgttaaactgatcgcgcaagtattgcccttggtaggcattatccaaaatttcgattcacttaatgctgttgcgggatcatgtctcagaggtcaaggtatgcaatccttaggaagtatagtaaatctcttagcatactacctatttgggattccattagcactaatcttaagttggttctttgacatgaagttgtacggtctctggattggtattggatgtgctatgcttttgattggcttggtcgaatcctactatgtattgtttcctgattgggacaaaatcatgaactatgctgatatcttgaaggaaacagaagacgatgaagtagatagtgacgaatacttaacagactcggatgacccagatggaaacacacatcttttaggggcttaa

SEQ ID NO: 587 - DNA, 570 bp, Saccharomyces pastorianus
atgggtaaggctaagaaaacaagaaagttcgggttagtgaaaagaacattaaacaccaagaaagatcaaaggttgaaggcaaaccaggaaagcattaaagataaagaagaccctgagttaaccagaaacataccacaagtgtcgagtgctcttttcttccaatataatgaagctataaagccaccttaccaagtgctgatagataccaatttcataaatttttccatccaaaagaaagtggatattgttagaggcatgatggactgccttctcgcaaagtgtaatccgttaatcacagactgtgtaatggcggaattggaaaagttgggacctaaataccgtattgctttgaaactggctcgcgatccaaggataaagagactaagctgctcgcacaagggtacatatgcagatgattgtttagtgcatagagttttacaacataaatgttacattgtggctacgaacgatgctggtttgaaacaaagaatcagaaaaattcccggcattccattaatgagtgtagggggccacgcatacgtcatcgaaaaattaccagacgtcttttaa

SEQ ID NO: 588 - DNA, 1824 bp, Saccharomyces pastorianus
atggttagcacagaaaacatgatttctcagctaaaaaagctatctattgcagaacctgctgttgctgaaggctctcatcctgacgtcaatgttgtggatttgatgagaaactacatttctcaagaactgagcaaaatatccggcgtagacacttctctcatttttccagccttggaatggacaaacactatggatagaggtgatttgttaattcctgttccaagattgagaattaaaggtgctaatccaaaagatttagccgttgaatggtctgaaaaatttccatgtggcgatttcttggaaaaagttgaagcaaatggcccattcatccaattctttttcaaccctcaatttttagccaaacttgttattccagatgttttgacaagaaaggaagaatatggttcatgcaaattagttgaaaacaagaaggtcataatcgaattttcttctccaaatattgcaaagccattccacgctggtcatttaagatccactattatcggtgggttcttagctaacctttatgaaaaattaggctgggaagttatcagaatgaactacttgggtgactggggtaagcaatttggtcttttggctgttggtttcgaaagatatggcagtgaagaagctttagccaaggatccaattcaccatttatttgatgtttatgtccatattaacaaggatatcgaggaggaaggtgatacgattccattagaagaatccactaacggaaaagcccgtgaatatttcaagagaatggaagacggcgatgaagaagctttaaagatttggaagagattccgtgagttctctattgaaaaatacatcgacacttatgctcgtttgaacatcaaatacgatgtttattctggggaatctcaagtttccaaagaatccatgcttaaagccattgacctatttaacaagaacggtttgacacatgaagataaaggtgcggttttgatcgatctaaccaaatttaacaaaaagttgggaaaagctattgtccaaaagtcagatggtactacattatacttaactagggatgttggtgctgccatggaccgttatgaaaaatatcactttgataaaatgatatacgttattgcttctcaacaagatttgcatgccgctcaattcttcgaaattttgaaacaaatgggtttcgaatgggctaacaaattacaacatgtcaattttggtatggttcaaggtatgtcaactagaaagggaactgtcgtattcttagacaacattttagaggaaactaaagaaaaaatgcatgacgttatgaaaaagaatgaaaacaaatacgcccaaattgaacatccagaagaagttgctgatttagttggtatctctgccgttatgattcaagatatgcaaggtaagcgtatcaataactatgaatttaaatgggagagaatgctttcattcgaaggtgacactggcccatacttacaatacgctcattcgagattaagatcagttgaaagaaatgcttctggaattaccgaagacaaatggataaatgctgacttctcattgttaagcgaacctgctgctatattgctaatcagattattgggtcaatatcccgatgttttgagaaatgccatcaagactcatgaaccaacgactgtggtaacatacttatttaaattgactcatcaagtttcttcttgttatgacgtcttatgggttgctggtcaaactgaagaattggcaactgcccgtttggctctatatggcgctgctagacaagtcttgtacaatggtatgtgtttgttgggtttgactcctgtcgaaagaatgtaa

SEQ ID NO: 589 - DNA, 1704 bp, Saccharomyces pastorianus
atgaattcaactccagatttaatatctccacaaaaatcaagtgagaactctaatgctgagttgccttccagtagttcacaggtaatgaacatgcctgatgaaaaaggtgttcaagatgacttccaagctgaagccgaccaaatcctaagtaacccaaacacaggtaaaggtgcttatgttaccgtctccatctgttgtgttatggttgcctttggtggtttcgttttcggttgggatactggtaccatttccggtttcgttgctcaaactgattttttgagaagattcggtatgaagcatcatgatggtagttactacttatctaaggttagaactggtttaattgtcgctattttcaacattggttgtgccgttggtggtattgttttggccaagttaggtgatatgtacggtcgtaagctgggtttgattgtcgttgttgttatttatattatcggtattatcattcaaatcgcttctattgacaagtggtaccaatatttcattggtagaattatctctggtttgggtgttggtggtattgctgtcttatctccaatgttaatttctgaagttgctcctaaggatatgagaggtactttagtctcctgttaccaattgatgattactctaggtatcttcttgggttactgtactaatttcggtaccaagaactactccaactctgttcaatggagagttccattaggtttgtgtttcgcttgggccttgtttatgattggtggtatgactttcgttccagaatctccacgttacttggttgaagccggtaaaatcgatgaagccagatcttctctatctagagttaacaaggttgctccagaccatccattcattcaacaagaattggaaactattgaagctagtgtcgaagaggccagagctgctggttcagcctcatggggtgaattgttcactggtaagccagctatgttcaagcgtactatgatgggtatcatgattcaatctctacaacaattgacaggtgataactatttcttctactacggtactactgttttcaatgctgtcggtatgagtgattctttcgaaacttctattgttttcggtgtcgttaactttttctctacttgttgttcattgtacacagttgatcgttttggtcgtcgtaactgtttgctatacggtgccatcggtatggtctgctgttacgttgtctacgcttccgtcggtgttactaaattgtggcctaacggtgaaggtaacggttcctctaagggtgccggtaactgtatgatttgtttcgcctgtttctatattttctgtttcgctactacctgggctccaatcgcttatgttgttatctccgaaactttcccattgagagttaaatccaaggccatgtctattgctaccgctgctaactggttctggggtttcttgattggtttcttcactccatttatcaccggtgccattaacttctactacggttacgttttcatgggctgtatggttttcgcatacttctatgtcttcttctttgttccagaaacaaagggtctatcattagaagaagtcaacgatatgtatgccgaaggtgttttgccatggaagtctgcttcctgggttcctgcctctaagagaggtaccgattataatgctaatgacctaatgcacgacgaccaaccattttacaagagtatgtttagtaggaaataa

SEQ ID NO: 590 - DNA, 1461 bp, Saccharomyces pastorianus
atgttaaagtggataaaaggtgggctttctgcagtcaccgggatggctgaacctgaatacgggaaggattatattcatagtgtttctgatagggtaaaaaataaacagccttacagagaaactacccgtgaagattttttctggcaagctcctgatcacaccaacgtcgaaacagttatttgttattttagtgatttgaaaaccggtatttttggttttgccgagattatacactcgaacatcatcggtttgcataccgcatcgcaatttatcttcagaatttttgactcgaagaacccagaggatctaaatatttggacatcgaccaaattggataatttctacatcaaagatgcgaattattacgctgacaatctttcttttgaattgagtgaagatggagagggttatcacattcaatccagtgtctgtgaccaatctgttgttgacttgcatataaaaagattgactcctggtgctaagatgggtgatgaccctgccacttattacggtaacaacttggatgaaccttggggtagcatgagacacgttttctggccaagaaatgcttgtcacggtaccatcaaagttaagaaggaaatcgttccaggatcagacggccaggaaagctctggtgatgaagaagaagaaggtgatgaagaagaagaaggtgatgaagatgatgacgaagaagaatctggagattctgaagaggattctgacagtgaagaagaaagtgacggagaagaacctgaggtcgcctatgaagatcggactataatattcaaagaggaagatcctgtgatgtctacgttaataatggcttttcaaggtatgaaacctcatcacgcggctaaagcatggaatttcttgtatttccactcagaaaaatattctgctctgttgatggaattcactacaccaaaatcctacgccaacactaagatttctgccggtattgttactgacgagaaagaagtcttggccttaacaactaacaataatgtggagcatttggactcggaagtcgattccgttggctggaaagttccaaagtctatcaaaattactttaaatggtattcaagctaaagtaaaggatgaagaattggaggctgaaaacaacgctgaaggagacgaaaaatcggcaaagaaagatgatggagaagaagaagaagaatataagaacgttgcacaagaaaataagttcaatgctgtcattgaaggtccattgaataacatggtcgaaagaattgatgtcatgggtgaagttccaaattttgtcaagaatatcgtctctggtgttgctggtactaaaccatacatttaccaatatgctaatccaaaggacttcactttacaaataaacggcggtgaaaaaatccacggtgtagcttggacagaagtaacatttatttccgaatcggacgatgtaagtgaagagtcttacaacgaagcataa

SEQ ID NO: 591 - DNA, 966 bp, Saccharomyces pastorianus
atgcttcgcttcgccggtggtcgcactatgagaaggtactctacaaggcatgcactcgagcatttgaaagagggcgctcccctgaaagggctgttctctgttgatggattacagaaggtctggtttgatagggtgaagcacctcgacatgaagttgaacaacagtacggacgaagcgcaacaaaaacccttggaatccctcatacaagagaactcgaaatcagcttccaagaaacacatcgtaaactacgcatcgtcgttatacaacttgagattcagcatgtcctcactgcaaggatgcgccagaccccccccagaggaatgccccaggatgggtccagaagcgttacttcaaaccccagactttaatagagcgattagcaacgagccattgactaccgggaacgaacgcttgcaagaggcccttgtctcctcatttggttctctaatggagttcagagcactactactgaactcgaatctggccatatcaggagacgggtttacatggttagtcgcaagacgacaacttgataaacgcaccaaccacaacgatatgttgaatggggacattgaatatgataaactatttattctgaacacttataatgccgggaccccctttaacgtttctacttctggcataatgaatgaactcaacaaccaatacacgaacttagaaaaacatcgagccaaagaggaggggaaacttaatgatgctgaagcggcgtctaaacacgccaagaccaagttcatttatgaaactcagcagaagggattttctggaaaggaggtttcatacatcccgttgttagccattgatgcgtcgcctaaagcgtggttgcctgattatggtgtattcggtaaacgggaatatcttgaaagggtatgggactctttagaatggagaattgtagaatcaaggttacctcaacgtactaaaatccaagcattcagcactttgtga

SEQ ID NO: 592 - DNA, 1521 bp, Saccharomyces pastorianus
atggataacagaaatagcggtggctctaatagaccattttcggtcaataacccattcagaaatgccacaattgattcaagtattactcaatataaaaatgatgctcagtttcaagagtgggcaaggaaccagtctcgtacaaattcatttgatagaccacaattgaatacaagaacatcttcgcagttatcatttccaagtattccagaagatgagcagcaacgaagggcagaccaacagggtgtttactctggcctggaaagcttcagtactggtagtctatcaccgccgtccagagccatttcctctaaaaatccttttctggatgacgtaagtatgacagataattttgataataggaatgtgagatctcctccccctcctcctcctccttcaaagagtaaaaatctcccaaccgctaaagaagaaaaggaccaattaaggcaaagatatttggaggagagtgatgtaaatgcaatgagtaatagacaaggaagttctgacatgcccccttcttatgaagagatcactatatctgatgggccgaggcgtggatatccaaaggagaagagttctcgttcttcttctcatcgcgaacatagcaacagcgcctcttatgttccacacaaatcttcatcgcatcaccaccgcgaagcatcttcgtcttcgactccttccaagaatgggaaaagaaaaggtaaaggtgttatgcctaagaacgtggataccattgacaaattggatgtgactgggttgtttggtggttcatttcaccatgatggtcccttcgatgctgtcacacctcatagaaacaagaataacaaagccgctcctgttttagcatttccggtagatggtcccaacagtaccatcggtggtgcttcgtttaaaaagtctgccatggacgaagtttttggtagagatgatgtagatgactctgacatataccagtatagcccacatactctgaaaagaggtggtgacacacaagatgcaataaaatcaagtgtgggtaaaaatatccaacagatggatgctaaaaataaaacgcaattagttcatggacccgttacagcaggattaggctccagcacgtttttagatggggctcctgcctcctcggcggccatcagaagcgacataaaagcgcactccaaccataatcgtactggcggtctacagagaaacaaatcgctttcacagcggttaggccttggaggatctggtgacactaatgctcccatgaccggtgttagaagaaatttaagcttaagcagggagaaccacgacgtaagtaataatagcgaaggtgttagaaggtcgaagactgtaaacccgtcaagcagaactcacagatccaaatatcctacagactttgacgaccaaagtgacgaagatgaagatgaagacaatgtttacttaggtgtacgctataatgattctaacatgaaaaaaaagtctacaggtagtaagctactcaacagagttaaaagtctaaaagttggaagaaaaagtcagtag

SEQ ID NO: 593 - DNA, 1806 bp, Saccharomyces pastorianus
atgtcgcgcctaagcttattgtttctatggctcatttcaattattcggttcgcatccgcaacggctcttactactacaaaggcaataacagcagcaaaatccaaaagttcttcctcggcggttgctccatttcctgtgctagcggtaggcaaggatggtaggggaaactacttcgtgaatagcacattcggcacacctagtcagccccagcggttggcgatagatatcatccagccatacataaacctggtttctggaatgaatgaaagccgctgtggaatcgctgatgcatgtcgtaacgctccccattatttcatgaacgaatcgacatcttctactcctgtttctccgggtcaaatatacgagctatttttcgttgatggtagagtcctcaattgtactttggtaacagacaatatgaacttcacgaatgtttcagcagaaaacgcttctgcttcctcggtaaacaatttaaatgagaaacgagatagtgtgcaatttggttcaggaagtctatcgatttcaaacgtttcgttcttcaacatcgaatcgtcgaactttgggacggcaggtatgctaggtctgggggggaagatcgcaaacccaggtaccgagtatgatagctcacagtttacagagtcctcttttttcctatctcttttgaacaatgcaggcatcattgaatgcccgtcgtattcgttgtggttggctggggatacttccacatatcagtcatataaagagtctatacccgattgtgggaaattgcttctcgggggagtggacccatcgttgttcactggtacattggggaaattcgatttgataccatatgttgatccagcgagtaatgccgtaagtattgggtatccaattataccgttgggcccaatttatatcatatcgaacagtggacaaagtatgaatatgacttctaaggatttcttgagccctgtgttactggactccacctcttcagttagttatttgccaaccagtacaatcattcaaatcgctgttcaaatcgcagccacgtatgtggaatccctagacagatggttagtccagtgctctatggcggatatgggtgtaactttaggttttatgtttcgagcattgaaaatcgaaattcctctaagtgatttgttgtcatccacttacgacacaaccactaattcttcgatgtttttcagttcgggggaagaagcatgcttcttaacgctatatgccaatacaaacacgggagtaaacattctcggagaggctttcatgaagaacatttacatggcaatgaacttggatgacaacaccatagccattgcacaggcaaaaaagatagaaggtggtgctattactgatgaagcaagtgaaaccaacgcatcctctgcatactctgttatcaagaaaattaggtccggttacatcccttacgcaaagacgatgaatagtactaatacaaagaacatgactctttacccatcttacaaatccggctatatgtttacggtcccaggtcagttgacagcggcgtactcagatggtgtgattgcgggtgcaggtaggtcattttatgatacttcgagatcgactacaactactaaatcgtccagtagtctatttgacagtttttctgtttcagcctcagatgactgtgcactaaattcaagtaataaaaccagcaccttttcagggagggctgtccgcttgagtaacccctatatatcgaaacatgattcagtaggatttgtggctcgtgtggcttcattgatactactatcagtattctccgtactaatacttctatag

SEQ ID NO: 594 - DNA, 966 bp, Saccharomyces pastorianus
atgtcgtgttcaaatagcatatggcctactatatccaacctaagcggatcattatcctttttcacctctgtcgtttcgctgttcccgcagatcattgagacttatcgagataaaactgtcgatgggctgtcaccatattttctattggcgtggctatgtggggacattacctccttgatcggggccaagttaacggggcaattattatttcaaatagtcctagcgatctattttctggtgaacgattcgtttgtatgcggccagtactattattatggcgtgatacataaaaataaattagcgactattggccatgagcctaaaccccttcttcctgaattggcagaaaatggtcaacttctgagggatgaggaagatattattcgtagcggtagcgcgggaagtcgcagaagcagcagaaggagatctgccattacggccgccttggcaatagcccacacactaagcacagctagtgcatatcctctgaacatagcttctgatccatcctatgtgggaccacctggagatggtttccctgcgcacggcaaaaccagcgaactgggcacaatcctatcctggattggcgcctcgttctatgtgggtgcacgtatcccccaattaatcaagaactataatagaaaatctacagacggattgtccccgttcctgtttgctacaacattattctgcaacatcacgtataacgtgagtatttttacaagttgccagttctttactactccgaacaaaacacaatttatcataaacgagttaccatttattttcggaagcgctggaactattgcatttgacttgatatatttctaccaatactacgtgctttacgcgacagacatgcagctcagagaactagaaagagagatatacgaacctgaagaagacaacgtgagaccagaagctaccgagaatacatccttgttgtctggtgaaacccaaacgtag

SEQ ID NO: 595 - DNA, 960 bp, Saccharomyces pastorianus
atggttcacaacaaggtcactatcatcggctccggcccagctgcccacaccgccgccatctacttggccagagcagaaatcaagccaaccttgtacgaaggtatgatggccaacggtgttgctgccggtggccaactgaccaccaccaccgaaatcgaaaacttcccagggttcccagaaggattaacaggtagcgaactgatggacaagatgagactccaatccaccaaattcggtactgaaatcatcaccgagaccgtttccaaggttgatctatcttccaagccatttaagctatggaccgaattcaacgaagatgaagaacctgtgaccacagacgccataatccttgccaccggtgcttctgccaaaagaatgcacttgccaggcgaggaaacctactggcaaaagggtatctctgcctgtgccgtttgtgacggtgctgtcccaatctttagaaacaagccgttagccgttattggtggtggtgactccgcatgtgaagaagctcagtttttgaccaagtacggttcaaaagtgttcatgcttgtcagaaaagaccacttacgtgcttccactatcatgcaaagacgttctgaacaaaacgaaaagatcgagatcctttataacactgttgctctagaagctaagggtaatggcaagttattgaacgccttgagaattaagaatgttcaaagcaatgaggaaactgacttacctgtcaacgggttattctacgctattggccacactccagcaaccaagattgttgccgaccaagtgaacgtcgacgaagccggctacattaagaccgttccaggctcttccttaacttctgttccagggtttttcgctgctggtgatgtccaggattccaaatacagacaagcaatcacttctgctggctccggctgtatggcggctttagatgctgaaaaatacttgtctgccctagaatag

SEQ ID NO: 596 - DNA, 369 bp, Saccharomyces pastorianus
atgcaaaataattcaactcattctagagagtcagtttcggctggcgatgatcctcttggaattgataagctgacagttgattacgactacttactttataaaatcaaagattatgtacagagtatacaattggatacaactgagctttgcaagaagcaaaatgaactaatagtgagtggcattatcgaaaataccatagataaaaacatcgtcaaattcgaggagcttctcaagaaatgtgatgagttagaaaaccattttgagatgttaaaccaattagcaacgataactgatgctttcaaggagagaatagcagcagccgtgcacgattacaatgaattaaagaagggcattaataaaactaaatag

SEQ ID NO: 597 - DNA, 1374 bp, Saccharomyces pastorianus
atgactgctaactctaaagacagtagcatcgctttgagcaatattgatgccattaacacaagtatttccgatgatgatagcgacgacttctttatggataattcttttgatgaaaatgattacaatcagagtgacgatagtaatgaacgaaatgtcataattgattctaaagttacagattccccgccccttcatttatctctgtcagcatctgaagaggaagataaaaatgtaaaccagcaaagtctttccgatagcgagtcatctagtgaaagtgcgagttcagcaaacattataaaactcaaatcagacaagccatcaggtaggacaagaggaagatctatgataaaagaatctgtggttgaaatagaatcatctggatcaaggcaaaacaataacaaataccatcatagatcaagatcaaggtctaaatcgagtataagatctttatcgcctgaacaaaaatataaacgacagaaaaactcactattaaatgcttatgacgaaaatgatgatttctttaaagagctcgctaaggaggctaagaaaactactagcatgtcaaaagattcaacacccgatcagcccaaacgagtttataacataaagtttttttctaagctagaaggaactataaataaggccgttcaggtaaaagttttgggaaagtacgaattttcaaaaatactacctgctgcattggacgggctgatgaaatcttataaaattcctaaagtcatgaaggatatttacaaagtagagaatgtgactctttattggaacaatgcaaagttattaaattttatgacttgtaactctttgcatattccgcaagattttgaaaatgaaatatctgacatcgatattactatcgtctcgaaagagtatgaaaagaattttgaggcaactttagaatcaaaattgaaagaggaagaaacagcaatgtttgcaaaagaacgccaagaaatggaaatgaagttagaaaaaaagagaaacgagcgggaagaatctgaattccgtgaatttgaatttgaattaagaaatgtcaaagaaacagaagaattgaaagcaacagagacaattatgaatgaaccttctttacgagaagacaacttgataaaagaaaacaaaaatggcgataatgaaaaggttatgaaaattgcccttatggggcaagataataaaaagatttatgtgaatgttagaaactctacgccatttttcaaagtagctgaatattatagaattcaaaaacaactacctcaaaaggcgaaaatcaaactactgtttgatcatgacgaactaaatttgaatgaatgtatagcggatcaggatatggaggatgaagatatggtcgacgtcattgtcgagtag

SEQ ID NO: 598 - DNA, 1362 bp, Saccharomyces pastorianus
atgggtttagtagaaggctatggaaccagttctgattctgattctgacaccgtcgaaaatcaatccacatgtataagaggtgctaacttgcaaggtgatctgtatgaacgaactaaagcgagcattcataaaagaaagcaacatttaacaaaatcagaactcaaaagaaggcggaagatacgtaagggaagtgggccatggggtagctggtcaagtagcgacgacgaaggtttagaaaacaatgaaaatctggtaggacaacaagataccttcattgacgtgatagatgaggacgatcgagattcagatgcagtacagaccgaagaaatttccaatttctatggtaaattggaaaaggactatcaaggtcgaggatatttacatccaccaaatgacattgacgttgatcttcataaggaaagaatgtcctttcggtgttatttaccgaaaaacgttatacgtaaatatgcagggcattccagtggtaccactgccctgaaatttttaccaaaaacagggcacctgttcctttcaggtggtaatgatcatactataaaactttgggatttttaccacgaacgtgaatgccttcgagactttcaaggtcataccaaacccatcaaggcgttacgtttcgctgatgattgtttatctttcctcagttcctcttttgatagaaacgtcaaaatttgggacactgaaactggtaaagtgaaaaccaggttacatcttaaatcaaccccagcagatgtcgaatctcgacccacaaacccacatgagttcatcgtgggtttatcaaactccaagatattgcactatgatgaccgtgtttttgagaaacagggccttgttcagacatatgatcaccacttaagtagtattttggctcttaagtactttcctgatggttctaagtttatttcttcctctgaagacaagactgtaagaatttgggaaaatcaaattaatgtgcccataaagcaaataagtgatacagctcaacattccatgccatttttaaatgtgcacccgtctcacaactatttttgtgcacaaagcatggataatagaatatattcattcagtttgaaacccaaatataagagacacttcaaaaagatattcaaagggcactcttcagcaggctacggtataggcttgtcattttctggcgacggtcgttacatatcttcgggcgattcaaaaagtagactcttcacatgggattggaacacatcacgtatgttgaatagcttaaaaattccaggcaataagccgataactcaagttgactggcatcctcaagaaacaagtaaagttatatgcagtggagctgcaggaaaaatatatgtgtgcgactaa

SEQ ID NO: 599 - DNA, 1890 bp, Saccharomyces pastorianus
atggctgtagataaactggagaaagaaagtgtagatgctagattcgctgggatctacaatgatcctaagtttaagaacacgagaactagagatcacaaaataaaattagactctagatttagcaaaaaagatctggaagtgcaacacaagtcaaaggttgacaagtatggtagaaaaattaaggatgctcacaacaccaaggaaatggaagatttcgataaatatttcgaaaaggaagctgaggatgatgaagatgcagaggctgatgtgaaggctactgttgaccgtgctcgtggtgaagttcctaatgattatgttagctctggtgatgagtttacctcatcggactctgaatcttctggagaaagtgaagttgaaagcgaagaagaaagtgaagtcgaagctgaaaatgctaagcctgaatctggggatgcctccaaaactttggccgtagtgaatttggattgggatcatgttaaatctgaagatttgatgatcacattttccggcttcgttccaaaaggtggtaagattgaaagaatatctgtttatccaagtgaattcggtaaagaaagaatgcaacgtgaagaagttgagggccccccaaaagagctttttcaaagaaaaaaacaagacaaagcttctaagaagaaaactaccgatgattccgactctgatatagatattggcattaaagacctatatgaagaaggcgacgctgacaaagacgtggattcaagagctctccgtcaatatcagctggatagattgagatattattacgcagtagtctattgtagtgatattagcacagctagggctatttatgaaaactgtgatggtactgaatacgaatcaactgctaatatgttcgatttaaggtacgtccctgatggtatgactttcgacgacactgcaagggacgagtgtagtgcgctacctaaaaactatagaccacatcaattcagtacagatgctttacaacactcgaacgttaaattgacttgggacgagactcctgttgatagagtggaagttgccaagagggccttcactcaaaaagaaattgatgatatggattttaaagcttatttggcatccgatagtgatgaatcggatgaagaagtcaacgaagacgcaaaaagtaaactaaaatccttggtcggtggtcttggcttcaattctaaaaaggaaaatgccaacgacagtgaagaagaagaagttgatatggaaattacatttactccagccctagaaggaggagatgaaaaaccagttgaaggccaagaagaaacatcaatagaaaaaataagaagaaaggaaaaggagcgtcgtaaggctagaaagcaaaaagtaaaggaattgaaacaacaatccgaaaaggaaaaaagaggtaagtccaaatctaccaacaaaaaacatgtggcagatgaagaagaattgaagaacaacgcaaaatcaaaggctgaactagagcttctaatggacgatgatggcgacgctgaagcagaaagttcaataaatagtaaagcacatttcaatatgaacgaaattttgagatctgaaaaggaaaaacataagaaaagtagataccaaaagaaagaaagaattgttgaagatactttcacacctgatgtggaagatcctagattcaaggaagtttttgaagatcacgattttgcgattgatccaactcaacctgaatataaaggtacacaggccatgaataaaattttgaaggaacgtggtaagcgtgttcatgacagaaaaagaaagcacggtaacaatgaaaacgatgtgactaaagatggaaacgctaacaagaatattggaaacttggtcaacaaattgaaaaagaaaagtaaatcatccaagaaaataaaggtttga

SEQ ID NO: 600 - DNA, 939 bp, Saccharomyces pastorianus
atgcctgctacattaaagaattcttctgcaacattgaaattaaacactggtgcttctattccagttttagggtttggtacctggcgttccgttgacaatagcggttatcattccgtcattgccgctttaaaggctggctacagacacattgatgccgctgccatttatttgaatgaagaagaggtcggtaaagctatcaaagattccggtgttcctcgtgaagaaattttcatcactaccaaactttggggtactgaacaacgtgacccagaagctgctttaaacaaatcattaaagagacttggtctagattatgtcgatctatatttaatgcactggcctgtacctctgaaaactgacacaatcactgatggcgacgttttgtgcattccaactttagaagatggcactgtcgacgttgacaccgaggattggaactttgttaagacttgggatttgatgcaaaagttaccaaagaccggtaaaactaaagcggtcggtgtctctaatttctctgtcaataacattaaggaattattgaagtctccgagcaacaaattggtcccagctaccaaccaaattgaaattcacccattattgccacaagatgaattgatcgctttttgtaaggaaaagggtatcgttgtagaagcttattcaccatttgggagtgccaatgccccattattgaaagagcaagcaattattgacatggctaaaaagcacggtgttgaaccggcacaacttatcatcagttggagcattcaaagaggctacgttgtcttagccaaatctgtcaaccctgaaagagttgtttccaattttaaaatttttactttgcctgaggacgatttcaagactatcaataacttatctaaggttcatggtgaaaagagagtcgttgacatgaaatggagttctttcccaatttttgaataa

SEQ ID NO: 601 - DNA, 2577 bp, Saccharomyces pastorianus
atgtgggtgatacgataccagaatatattggaagatggttctatcaactctatatcatgttgtcttcaagcatctaaaagttacagcataggtagatcgagcaaaaatgaactggtaatcaaaaatgacaaaagcatttccagacagcatgtcagtttcaaatgggaaattgatgacatccctaatccaaaaagccataagctttctttaatcaaccaaggtaaactgacttcgataaataaaaagtttatgaaagtgggtgaaacgtctattatcaatgttacggaagtttcgaaccatatggagattgaactgggcacagctcctattcgcataaaagctgaatggatcggtcaaatttggaacattccctcccaattggcacaatttcaaactacactttctttgtttggtattgcaacaaaaacatccattgatgatgatccagccaatatagtgatcagcgattttccaagtaacgatgatgacggaatacgagaattgtatgcgcttgttaatactataccattgaaaaagtcacagttgctggttgagctgtgtaatactcttctatcgtcatctgtaatgaatttaaagttcgatgaaacttggaatagtatggtaaataaatcagccttcaatgtcttcgattatgatccgagtgttttgttttctaagtttatgaagctggacaacgttattatattgaccgccgttggtaataggtcagacctatcaaataccctgcgaagaattaatgttagactctcccatttcgactccttaaacagtttatataagaatgttgatcttctgaagtcaccggaaaaatacctgattttagctttaacaaatatgaaagaaaatgggcaaaaattatgcactgttcagcaattaataacgtcaataatagatgatacgttatttaacataataaatactaaagcagcagaggttaaccagaacagtatgtttggaaaagtttctgaagaacatactgctatctcaaagacagcccatagtcctgaaactgaagctactcccacagttttgaaaaaacgaaggttgaataggcgtagggtgcaaccgcttgatagtttaaattttttcgcgggaggtttgagtgctaatccttcttcaagacacaaggactttgatgatgtgaaagagcccaatttgggcttaaactcgaagactaccgtctcaagccccatcatcgaaggaatggatgaaaagcattactcgacaatacagagcaaacaagaaataagtagagatacttggaaagaaaatggctacactaatactggtgtcgtaaacgtgggtagccccgagagtaatggttcggtacgacctacggatgaagagcctgtaagtgagtcaccacggccgccaccaactgtcacacggcctagctcgcaaagcatcacagctaatgctgtaaccaccacaactgaaaatcatatggaaggttgtagaattactgagagttacaaaataagtgatgacttaactcaaaatgaaaatcaaactctcaaagataatcgggagttttctgtactctcacaaaatacaccgtctcgtctacaggccgaccataattcacctctgagggagctgtcactaaaagaaaaatctaacacaccgcattcatttgttgaagctatacagcaaacaaaaaatagagaagttaaaagagtcaagtcgaccattgttgaactggaagatgatgaactgagcgaagaagctatcagtcagctgaataacttggctcttgtggagccaagtaatgaactgctaagagacccccgcagtttgggatcaaatacgacaagaaatagtgcccgaggaagtgagaagagtataattagacaagaatggcccaagcgcaagaatttcaagaccttttctaaagtacggccaaagtccaagacaccgaaagaggggaacaaaggcaataatcaaaactcagattttatacggagtgctgccttcttaatcacgagaaactatgtgccactgaaaaaatactctaaaaaggatagggtttctaatagggatagggacaacaacgaggatgtgctcgctctgacagagatgaaagacttaggacctgatacacatatgcctgaaaatacaaatgcaagcgtgatgcaagaaagattttatgcccaagattcggatatgaaagagaataattcagacgacataaaggaaagatctttttctttttcgcgtcgctcagatactacaagtattgtccaaccagtaaaaaataagctatttgtggctgaagatgatgataatgatgacgaaaacgatgttgtaaacgatagtgaggacggctttgaattggtcacaataacaaaatcaaatttacaaccagacgcggcagaggaatcttccaaaaggaatagacgtggtagaaatggagcgagcagaccagtagggtcttatggaggtaaaaatgacaatgacaatgccaatgacaatgacaatggcgacaacgacgacgacgacgacgaagacgacggcgatgagggcccaaagttcaaatttaaaagaaaaaaaggataa

SEQ ID NO: 602 - DNA, 1041 bp, Saccharomyces pastorianus
atgtctactttacagcgtcgtagagtcaatagggcagattctggagacacgtcatccatgcaatcgacctcaaacaaccacaatgccagcggtggcaagaccactagcggtcctgttgatggtgatgatagcggaattaataaaaagattgcatatgacccagaagaatctaaattgagagataatattaagatccctactttgactttgatggaggaggttttgctgatgggtttgagagatagagaagggtatttgtcgttttggaatgatagcatttcgtatgcgttacgtggttgtataattattgaattagcattaagaggtaaaatcagaatcttggatgattctgccagaaaaagatttgatctttccgaaagattgattgaagtcattgacggttccaaaaccggggaagttttactggatgaaactttacaattgatgaaaaacgatgaacctttaacgatctcgaactggatcgaccttttaagtggcgaaacttggaaccttttgaaaattaattatcaattgaaacaggtcagagaaaggttagccaaagggttggttgataaaggtgtactaagaactgagatgaaaaatttctttctatttgacatggccactcacccaattgcagatgcaagctgtaaagaagctattaagcgtagggtactttctgtacttgtatctagaaacatggaactgagctacaatgaatactttcccgaaacaacctcttttaaaattattaggactttggctttgatatgtggatcatatggggcaaatgtattagaaaatgtcttaactacgttggaatatgagaagagagacaaggcaattagtagggctgaagagttaatggcacaattttcgcaatatccgttcgacttagagaaagatactgagcttggcgtctcagttaatttgaataaagaagttaaagaggaaggagaaagcaaccccggtcatgatttacaattggaggttgtcgctggtgtgtttgaagtcttctcaagaatggacatgctgttatga

SEQ ID NO: 603 - DNA, 573 bp, Saccharomyces pastorianus
atgggagttaagacatcgaagctttccaaagatgacctaacaagtttaaaacagtccacgtatttcgatcgcagggagatccaacaatggcataaggggttcttgagagattgccccagtggtcaacttaccagagaagacttcgtcaaaatatataaacaattcttcccttttggatctcctgaggatttcgctaatcatctttttacagttttcgataaggataacaatggattcatacattttgaagaattcatcactgttttgagcacgacatctagggggaccatggaggaaaagctgtgttgggcttttgagctttatgacttgaatcacgatggatacattaccttcgacgaaatgttaactattgtgacgagtgtttataaaatgatggggtccatggtcacactaaatgaagacgaagctacaccggaatcaagggtcaagaaaatttttaaattgatggataaaaacgaggatggatatattacgctggacgaattcagggaaggttctaaagtggatccttccattattggtgctttaaacttgtatgacgggctaatttga

SEQ ID NO: 604 - DNA, 927 bp, Saccharomyces pastorianus
atgaatcaaatttggtctacggggccctcaaatttttactataattcggaatggaaagaaaacagaaagtccaacagaacaattgaagactctttaaaggagctggatgggttgattcattctttggagaggactcacatagaagtacagacgaatccaaaggtaaagaaaagcgcaatagtcgcaaatgacgttgatacaaaagaaaataatgcagaaatttccaatagaaactacacgtatcagaatattggcaccccactggcaagaccaaacctgaaccagtccttttcttcttctggggcggttgatcaatctggtaagagtaaaatgaatgagaactactatacagagtatttgtctaaaccaaggtcttttcagcaaataaccaaggagcaagcttataatgagtttaacaaaagaaagagttctgccattgttcccccttggttgaatattccggaaaactcaaaattctttgttataaagtcctcatctttgaaacatgttaagagatcattctacaacggaatttggtcgtctacccatttcggtaacaaacggttatctgaagcgtacaagacattgaaatctggagccaagatctttttgtttttttcgatcaatacatcgggaagattttgtggtgttgctgaaatgatatcagacttgagaatggacttggataccagcatttgggaggatgaacaaaagtatggtaaggcattcaaagttagatgggtaattgtacgtgatgttaataacagatcgttaaagaggtttttgataccatcaaacgagatgaaaccaataactcattccagagatacccaagaaattccacattcgattggtatttcgatgattaacttatttaaaatgcaagattcagatattttttccttcttggacgaaacgtatgaatag

SEQ ID NO: 605 - DNA, 1482 bp, Saccharomyces pastorianus
atgaaatcagcccaaataaggtacctttcttcgcagataaaccgcaagactgtatccattatcggatcgggtccttctggcttttacacggcatatcatttacttaaaaagtcgccaattccgctggatgttacaatctgggaaaaactgcctgttccttttgggttaagtagatatggtgtagcacctgatcatccagaggtcaaaaattgtgaagagacatttacgacatgcgcagaagagtattctatacccactaacaaaaagcataagctttcctttgttggtggtgtgaccgttgggaaagaagtaacattagaaaccttgttaaataatcaagatgctgttgttttaagttatggttgtacaggtgataagaagctaaatatcccaggtgaacaggggacaaagggggtcttcagtagcagagaatttgttaattggtataacggtcatcctgacttcgcaaaagacaagaggtttaccgattttgattggagtagagtctcgaaagttggaattataggaaacggtaatgttgcccttgatatcacgcgtgtgctgatcagtaataagattgacgaaatatggcaaaatacggatatatcacctattgcattaaatttggtaaaaaaggcacctgtaaagaacattaaactaattgcaagaagagatttcgtgcattctagatttaccaataaagaattaagagaattatgggaactggaaaggtatggtgtccgcggttgcattgattctaaatttttccaaaaggatatgttcgattcatttaaatccgatcgtgcgttcaatagacgagtggaaatgtgtagcgaatatctcaaaccgtttggtgaacgttcgaagaaaaattacaagaaagcacctcccccaactagtgggtgtaacaaattctgggagctggattatctgaagactcccttggagataaaccaggacgaaagtgatgtaatcaagtcgttaaccctgtgtaacaaccagttaaaggaagataacagtttaaaacctttgaaggattcaaacaatatattgacgtatgatatggatttactaatcacatcgctagggtacgctggtgtcccaatgcccgaattttccaagctgtctatccgctttgatagagaccatgtggctaataaacagggtcgtgttttaaccgttgctggcgaaatcttcccgcatttgtacgcgtctggttggattcgcaaagggagccagggtgttattgcctcgacgatgcaagacgcttttgaggtcggtgacagagtgatacaagacttatctgtcagtggggtgttatcctctgagaaatccattggtctctctaacatcaagcatactacatgggcagactgggaaagaattaacaagaaggagttgactcggggccaaaaggaacacaagcctcgatccaagtttctaacactcgaagaactatggcataatgtagaagaagtttag

SEQ ID NO: 606 - DNA, 306 bp, Saccharomyces pastorianus
atgatttttaaacgtgcagtatctacactaattcccccaaaagtggtgtcatccaagaacatcggttcagcaccaaatgctaggcgtattgccaatgttgtgcacttttacaagtccttacctcaaggttcagcaccagcaatcaaggccgactctagattgggtagatataaggctaagtattttaatggggataacgctagcggtaaaccattgtggcactttgctctgggaatcattgcctttggttactcgatggaatactacttccatttgagacatcacaaaggtggtgaagagcattga

SEQ ID NO: 607 - DNA, 3030 bp, Saccharomyces pastorianus
atgtcagcagactctaccattaatcaatcggcttcctgtgttaggtgcgacaaatcaattgcatctagccaagtgtacgaattagaaaacaagaaatggcatgaccgatgttttacctgttataaatgcgataaacaactaaatgcagactcggactttttagttttggatacaggcactttaatatgctatgattgttctgataaatgtacaagctgtggcaacaaaattgacgatacggcaattatattgccctcatccaatgaaccctattgtgcaaattgttttaagtgctgtaaatgtgacaaacatataaagaatctaaaatacgcaaagaccaagcgaggattatgttgtatggattgtcacgacaagttgataagaaagaaaaacctattgttgggaaagcaaacaagagattcttttagagacaatattccaatagcacttccgcaaaggtctgcaaacagacctttatcaccgacgagagacaatgataaaccgtctattagtgccaatgactttgtggttcatgaaaatactacaggctcgaatgagggaaaacaagtcactccacaagttttagtttcacaggaaacagacgatactttctcctcctccaacgataatgataatgacgatagtaatgacaagcaagaaaagtcatctcatgcaagaacaatttcaatagacgatatactgaattcgactttggaacatgacagtaacagtattgaggaacagagtttgacggataatgaggattacattagcagaattgcggggaatgtgagttatagattattgcagcctcacaaacctaataaggattctataatagtcaaggaacccaagactccaaattcaaattccaacgcgaacagatttgtttcaatttatgataaggaggaagttgatagagatggcacagataataaagagaatgatgttgtaatcagtacacccaggaatagcaatgagaaaataacgagtcctttgaatagccccatggctgtgcaagcggaggaagaccttgatcagtttcatgggttagcattgagtttaccgaatgtttataaagaaagcaacaggtcatttcaaaatacgcaaacttccaaacctacgaaccaagtttcctcgcttgcgaggtcgagtacattagaaataaagccatccgcatcttcatcgacactgcgtgtatctaatagtggaaatttcagcaggcctcaaacaacagacaattcacagtctcacaacaagatagccccccctgcaaacaagaaactatcaagatctttttctttaaaatcaaaaacttttgttcacaacctgaaaagtaaaacatcggaaatattggatccaaagcatcctcacaataccactccagtacaggaatcagacacacattcgggttggggtgtctcttctgcccatactactagtgcaagaaaatcgaaaataaagaaaatccctgtgtcacggggtcaaagtgatagtacagtatacaaatcagtagcacaaaatgagaaacctattgcatcagattccagccataaaaaggcgcaaagtagtcttggtggtatacccaaaaaacaagttcctaacgatttagtggctaacagacgtataaatggctcataccccagcgcaagttcggggcatcatatagcaatgtttcgcactccacctctggaatcaacaccgttgttcaataggccatcgatatcttctgattccgcacatcacagatcttctagtttacagacgtctcgatctacgaacacgttgttggaagatgactccacaaacgtggatgctaccgatgaacaaaccactagtttggaaagggattattacgtgaccgagttaactctaagaaagttgaaatcagatgtgagggagttagaagggacaaaaaaaaaattattacaagatgtggaaagcttaaaacagatgaaagaaagactgtcaaatgatgttgtttacttaacaagggaaaaggataagcagtcagtatcatctaaggagtccctggaacaaaagtcaaacaatggaacaacgataattgtaaaatcgccaagcgcaaatatagacaggaagggaagcatatccaatgctagcccgaaaccacgattctggaaactcttttccagtggtagcaaagaccaccaatcagaagaattagaccctcagcattcaccaaattcatctttcagtggagggacaagcattgcacagaaagaaatatcaacgcccagactgattcgagcacatgacgggttacaatcaccaagcaaactatcaccgtcaccaagcccgaagaaatcggacatagtatatgatggatcgcatttatatgggtcaacattggtagccagatgtgcatttgagaaatgtaccgttccaatgatcatcaaatgctgcataaaatacatcgaagcagacgatgtaggactaaatatggagggtttatacaggaaatccgggtcacaaactctaattgaggatattgagaaggaatttgcccagaatactccattgcatactgataaggtgagttccaaattgaataatttactgcatcaagacgtacacgcggtggctagcgtattaaaacggtacttgagaaaattaccagatcctgttctacccttttccatatatgattctttggtagatttggtaagaagtaatcaactcgtcgaaagactaccattgagcaagaatgggcccgccgaatcttcacagaaatcgtcgatatatgacacagttgttaggaacctaaacgaaattctgaagagtttacccctggaacattatgaggtgttgaaggtactggcaacacatatcaacaaagttcaaaggtacagcgagtggaacttgatgaatttacataatttgtcgttggtctttgcaccaagtctaatccacgaccttgacggcgaaaaagatatcgttgatatgaaggagagaaattatattgtggaatttatactaggaaactatagagacatatttacattggcatga

SEQ ID NO: 608 - DNA, 240 bp, Saccharomyces pastorianus
atgcctaagagactgagcgggttgcagaaagaagttttacatctctatagagtttctataaggacggcgcatacgaagccaaaggaaaatcaaataaatttcatgaattatattcatgaagagtttggcaagtatagagatctaccaagaaaggacttcaccactattgaacacttgttaagggttggaaataagaaagtagccacgttttcgcatcctgaactaacaaacatgcattga

SEQ ID NO: 609 - DNA, 1908 bp, Saccharomyces pastorianus
atggcacctgttacgattgacacgtttatggaccaagacgagccacatgttgttttcaatcaatcagcaacaattcctttcggtgagtacatatttagaaggctattttccatcggtacgaaatccgtttttggcgttcctggtgatttcaacctatctttattagaatacctctatgccccctccgttgaagaagacggtttgaaatgggtcggtacctgcaacgaattaaatgctgcctatgccgctgacgggtactcccgctattctaataagattggctgtttaatcaccacgtatggtgtaggcgaattaagcgcgctgaatggtatagccggttcgtttgctgaaaacgtcaaagtcttacatatcgtcggtgtagccaagtcgacggattcgcgttccgataattttagggaacgtaatctgcatcatttggtcccacgattacatgattcgaacttcaaagggcctaatcataaagtgtatcatgacatggttcaggataacgttgcctgttcggtagcttacttggaagatattgaaactgcatgcgatcaagtcgatgctgtgatccgtgacatctatcgatattctaaacctggttatgtttttgtccctgcagattttccggatatgtcagtaaggcttgataatttgattagtgttccacatatatctcaacaagattgtataaccatcccatcagaaactcatttgttcagcatcatcgacatgattactacttggatgtactccagtaaaacacctgcaatccttggagacgtgttaaccgatagatatggagtgagtgatatcctaaataagcttatttacgccagtaaaatctggaatttttccaccgttatgggaaaatccgtaattgatgagacaaacccatcgtatatggggcagtacaacggtaaggaaggtttgaagcaagtttatgaacatttcgagtcctgtgacttgatcttgcactttggtgttgacattaatgaaattaataatggacactattcttttacttataaacccaatgcaaaaatcattcaattccatcccaactatattcggtttgttgacactagatatggcgaagaacagatattagaaggcgtcaattttgcacctgtattacaggagctatatcaacatattgatgtttccaaactttctttgcaatatgaccctagtgtaatcccatatacaaatgaaactatgaaactagaagacccaactagtgatcaatcaactgacatcacacaagtccacttacaaaaagtcattcctaaatttttaaacccaggtgatgttgttgtttgtgagactggttcatttcaattttctgttcgagattttgcctttcctactcagttaaaatacatatcgcaggggtttttcctttccatcggtatggctttacctgcggcgctaggtgtggggattgccatgcaagaccatccaaacgcacacataaacggcggtaacataaatgagggatataaaccaagactgatattgtttgaaggtgacggcgctgcacaaatgacaattcaggagttgagtactattttgaaattccacattccaattgaaattgtcatttggaacaataatggctacactattgaaagagctatcatgggtcctaccaggtcttataacgacattatgtcttggaaatggacaaaactatttgaagcctttggagacttcgacggaaaatacactaacaacacgattattgaatccacctccaagttagcactgaaattgaaggatttaaagaactcaagcgcaagagaccggatagaactcctagaagtcaaactgggcgtcttagacttcccagaacaactaaagtgcatggttgaagcggctgcacttaaaagaaacaagaaataa

SEQ ID NO: 610 - DNA, 336 bp, Saccharomyces pastorianus
atgaaatacttagctgcttacttattattggttcaaggtggtaacgctgccccatccgccgctgacatcaaatccgtcgtcgaatctgtcggtgctgaagtcgatgaagccagaatcaacgaattgttgtcctctttggaaggtaagggttctttggaagaaatcatcgctgaaggtcaaaagaagttcgcttctgtcccagctggtggtgcttctgctggtgccgctgccggtgcttccggtgccgctgccggtggtgatgctgctgaagaagaaaaggaagaagaagctaaggaagaatctgatgatgacatgggtttcggtttattcgattaa

SEQ ID NO: 611 - DNA, 831 bp, Saccharomyces pastorianus
atgacatcgattgcttcctcaccacaagatttagaaaagggtgtaaacaccatcgagaacatcgaaacgctgccccagcagggctccatcgcaggcgtctcgcagggcctgcccaacatccaagaaatttactccgatagggacttcatcacactgggatcgtccacgtatagacgtagggaccttttgaacgccctggacagagatgatgtttcagaggagcgctgcgcgagacaggcgcctcctcatcagtttgccaacccagttcctctcggtctggcctccttctctctgtccgctttggttttatctttgatcaatgccaacgtccgcggtgtcaccgacggcaagtgggcgcttagtctgtttttgttctttggtggtgccattgaactgtttgccgggttattgtgttttgtcattggagacacgtacgcaatgacagtgttcagttctttcggcgggttctggatttgctacggttacggactaacggacacggacaacctggtaagcggctacacggatcccgcgatgctgaacaacgtcatcgggttcttccttgcgggctggaccgtgttcacctttttgatgctgatgtgcactttgaaaagtacttgggggttgttcttgctgctgacctttttggacataaccttcctgctactgtgcatcggcacctttatcgataacaacaacctcaagatggccggcggttatttcggcatcttgagtagttgctgtggttggtactcgttatactgttccgtggtgagcccatccaactcgtatctggccttcaaggcacacacaatgcccaacgctccttaa

SEQ ID NO: 612 - DNA, 2529 bp, Saccharomyces pastorianus
atggttgctttcactgttgaccaaatgcgttctttaatggacaaagttaccaatgtgcgtaacatgtccgttattgctcacgtcgatcatggtaagtccactttgaccgattccttggtccaaagagccggtatcatttccgctgctaaggccggtgaagctcgtttcaccgataccagaaaggatgaacaagaaagaggtatcactatcaagtccactgccatctccttatactctgaaatgtccgacgaagatgtcaaggaaatcaagcaaaagaccgacggtaactccttcttgatcaacttgatcgattccccaggtcacgtcgatttctcctctgaagtcactgccgctttgcgtgtcaccgatggtgctttggttgtcgtcgacaccatcgaaggtgtctgtgttcaaaccgaaaccgttttgagacaagccttgggtgaaagaattaagcctgttgttgttatcaacaaggttgacagagctttgttggaattgcaagtttccaaggaagatttataccaaacttttgccagaactgttgaatccgttaacgtcatcgtctccacctacgccgatgaaattttgggtgacgtccaagtctacccagccaagggtaccgttgccttcggttccggtttgcacggttgggctttcaccatccgtcaattcgccaccagatacgccaagaagttcggtgtcgatcaatccaagatgatggaaagattgtggggtgactctttcttcaacccaaagaccaagaagtggaccaacaaggacactgatgccgatggtaagccattggaaagagctttcaacatgttcatcttggacccaatcttcagattattcactgccatcatgaacttcaagaaggaagaaattccagtcttgctagaaaagttggaaatcatcttgaagggtgacgaaaaggacttggaaggtaaggccttattgaaggttgttatgagaaagtttttgccagctgctgacgctttgttggaaatgatcatcttacacttgccatctccagtcactgctcaagcttacagagccgaacaattatacgaaggtccagctgacgatgccagttgtattgccatcaagaactgtgatccaaaggctgacttgatgttgtacgtctccaagatggtgccaacctctgataagggtagattctacgctttcggtagagtttttgccggtactgttaagtccggtcaaaaggtcagaatccaaggtccaaactacgttccaggtaagaaggacgatttgttcatcaaggccatccaaagagttgttttgatgatgggtagattcgtcgaaccaatcgatgactgtccagccggtaacattatcggtttagtcggtatcgatcaatttttgttgaagaccggtactttgaccaccaacgaaacctctcacaacatgaaggtcatgaaattctccgtctctccagttgtgcaagtcgctgtcgaagttaagaacgccaacgacttgccaaaattggtcgaaggtttgaagagattgtccaagtccgatccatgtgtcttgacttacatgtccgaatccggtgaacatatcgttgctggtaccggtgaattacatttggaaatttgtttgcaagatttggaacaagaccacgccggtgttccattgaagatttctccaccagtcgtcgcttacagagaaactgtcgaaaccgaatcttcccaaaccgctttgtccaagtctccaaacaagcataacagaatttacttgaaggctgaaccaatcgaagaagaagtttctttggctatcgaaaacggtgtcatcaacccaagagatgatttcaaggccagagctagagtcatggctgatgaattcggctgggacgtcactgacgccagaaagatctggtgtttcggtccagacggtaacggtccaaatttggttgtcgaccaaactaaggctgtccaatacttgcacgaaatcaaggattccgttgttgctgctttccaatgggctaccaaggaaggtccaattttcggtgaagaaatgagatccgtcagagttaacatcttggacgtcaccttacatgccgatgctatccacagaggtggtggtcaaatcatcccaaccatgagaagagctacctacgccggtttcttgttggctgaaccaaagattcaagaaccagttttcttggtcgaaattcaatgtccagaacaagctgtcggtggtatctactccgtcttaaacaagaagagaggtcaagtcgtctctgaagaacaaagaccaggtactccattgtttaccgtcaaggcttacttgccagtcaacgaatctttcggtttcactggtgaattgagacaagccactggtggtcaagctttcccacaaatggtcttcgaccattgggccactttgggttccgacccattggacccaacctccaaggctggtgaaattgttcttgctgctcgtaagagacacggtatgaaggaagaagttccaggctggcaagaatattacgacaaattgtaa

SEQ ID NO: 613 - DNA, 1899 bp, Saccharomyces pastorianus
atggagctcccatcaaacttaaaggatctgtatgttgagtggttacaggagctggtcgatggagtaagccctaaacaagaacagctgaaaatagcttatgacaaagcaaggagaaatctccaagataccgaaggtacattttataatcccatggatctcaagaaagtgaaggggattggcaatacaatcattaagagattggattccaagttgcgagaatactgtaaggcacagggaatccctcctctggagctgcaggcctcgacgaaaatggctactactagaccatctaagagaactacaacagtcttacgcagtatagaaaatttgagcgaaaacaacaaggatgaagataatgaagaggggggtgctaagaagaaaagagtcagaaaatacatacccaaaaagagatctggaggctacgctattcttctttccctgcttgagctaaaggccataagtcgaggtgttagtaaagagcaaatcgtcgagcttgcgggaaagtatagcgaacactgcatgacccctaacttttctacaaaggaattttatggtgcttggtcatccatcagctctctcaaaaaacattctttagttctcgaagaaggtaggccgaaaaagtattcactcacagaagaaggtatacaattaacaaagagcttaaagatagcagatagaatctcgtttttaaaagaaagttgtgagaccgatgagcattctgcaattagaaacgaaaccagcgaattcacggcaaatttgagtgacctccgtggtgaaaatagtaaggaagaagagatcaatcacatgaatgacacctcatccatgttagacattactttccaagatctaagcacgccgcaaaggccacagaaaggtttgcttaaaaaccaaaggctgcgtactcaatccgatttatcccctcatgtatcaaaagaggtcttcggtaaccagccaatttccagcactctgttgaaacgtaaaaataaaaatgtcaggagaagatataatcaagtgagttatgagttgtggaataacggtgattttgaaattttcccaattattgaccatagagaaataaaatcgcaatctgatcgtgagttcttttcaagagcgtttgaacgaaaagggatgaagtcggagataaggcagctggccttaggtgatattatatgggttgccaagaataagaataccggattgcaatgtgtgcttgatacgatagttgaaaggaaaaggctagacgacttagccctaagtataagggataacagatttatggaacaaaaaaataggttagaaaaatctggttgcaatcacaagtattaccttattgaagaaaccatgagtggaaacattgggaacatgaatgaagcactgaaaaccgctctttggctcattttagtatactacaaattttccatgataagaacttgcaattctgacgaaactgtggaaaaaatacatgcattgcatactgtcatatctcatcactattctcaaaaagatctcgtggtgatatttccaaacgacctaaacagccaagatgattataaaagaattttgttacaatttcgcgaagaatttgaaaggaagggtagcattgaatgttgccacaatcttgaatgctttcaagaaatgatggggaagggagatttgaagactgtcggtgagttaactattaatgttttgatgcttgttaaaggcatatctttagagaaagcggtagccattcaagaaatatttcctacgctgaataaaattctgatggcttataaaacatgcgcttcggaagaagaggcaagattactaatgttcaataacctaggagatgcaccaggcgcaaagaaaataactaaaggcctttcagaaaaaatatacgacacctttggtaaaatgtaa

SEQ ID NO: 614 - DNA, 1014 bp, Saccharomyces pastorianus
atgatggacaagcacaagtatcgcgtggagatccagcagatgatgtttgtctccggagaaatcaacgatccgcctgtggagaccacttccctgatagaagatatagtaagaggccaggtgatagaaattctcctgcagtcaaacaaaacagcacatctcaggggtagcaggagcattctgcccgaagacgtcatttttttgattagacacgacaaggcaaaggttaaccgtttgaggacgtatttgtcgtggaaggatctacgtaagaatgccaaagaccaagacgccagtgccagcgtagcagctgggtctgggaatcctggagccgggggtgaagacgacttgaaaaaggcaggtggtgtggaaaaggaagacaaggatggcgggaatatgatgaaagtcaagaaatctcagatcaagctaccatgggaattgcagttcatgttcaacgagcatcccttggagaacaacgacgacaacgacgacatggatgaagacgaacgagaggccaatataattactttgaaaaggctgaaaatggctgatgacagaactcggaacatgaccaaagaagagtatgtgcactggtctgattgtcggcaggcaagttttacatttagaaagaacaaaagattcaaggactggtccggaatatcccaacttactgaggggaaacctcatgacgatgttattgatatcttggggttcttgacttttgagattgtttgcgctctgacggaaacggcactaaagatcaagctaagagaacaggtcttgcaaacacaaaaggacaagtcccaacagtctaaccaggaaaactccaattttgaattcacctcgtccacagttcataggaaaaaaagattattcgatgggcctgaaaatgttgtcaacccgctcaaaccaaaacacattgaagaggcctggagagtactgcagacgattgatatgaggcatagagctttgacgaatttcaaaggggggagactaagttctaaaccaattatcatgtaa

SEQ ID NO: 615 - DNA, 1287 bp, Saccharomyces pastorianus
atggaggaactaggtattgtgacatccgctgaaaagactgtggaagagaagccaaccatcaaatcatatggatcgttgttggctcaacttaatggcacagccaataataacaatgccctatctaatgtgaattctgatatatattttaagttgaagaaactagagaaggagtatgaattgctgactttgcaggaagactatattaaggatgaacagcgccacttgaaacgtgaattgaaaagagcccaagaagaggtaaagagaattcagtccgttcctctagttattgggcaatttttggaacctattgatcaaaatacaggtatcgtttccagtaccacaggaatgagttatgtcgtaagaatactgtccactttagaccgtgaactattaaagccttccatgtctgtggcattacaccgtcattcaaacgcgttggtcgacattctgcctccagactcagattccagtatatctgttatgggtgaaagtgaaaaaccagatgtcagttatgcagatgttggtgggttagatatgcaaaagcaagaaatcagagaagctgtagaactgccattagttcaagcagatttatatgaacaaatcggtattgaccctccaagaggtgttctattgtatggtccaccaggtaccggtaagacgatgcttgttaaagccgtcgccaatagtacaaaagctgcattcattagggtcaatggctccgaattcgttcataaatatcttggtgagggtccgagaatggttcgtgatgtttttagactcgccagggagaatgccccatccattatattcatagatgaagtggattccattgccacaaaacgttttgatgctcaaaccggttctgatcgtgaagtacagcgtattttgattgaactattgacacaaatggatgggttcgaccaatccacaaacgttaaagttatcatggccacaaacagagcagacacactagatccagctttgctgagaccaggtagattagatagaaagattgaatttccctcgcttcgtgatagacgtgaacgtcgtttaattttcggtactattgccagtaagatgtcacttgccccagaagcggacctagactcgctaattattcgtaatgactctctatcaggtgctgtcattgcagccatcatgcaagaagctggtttgagagccgtcaggaaaaatagatacgtcattctacaaagcgatttggaagaagcttacgccacccaagtcaagactgataataccgtggacaagttcgacttctacaaatga

SEQ ID NO: 616 - DNA, 2835 bp, Saccharomyces pastorianus
atgttacaagaacaggaaattttgagctgcattgagcagactatggttgctgacgccaaggtcatcaagcaagccgaacagcagctatttgagttccaaaaacaacctggtttcacctcctttttgctgaatatcgtgtccgatgagagttttgcattaaacgttcgtctatcttctgctatctacttgaagaataagatttacagatcatgggatactaagagagaagacggcattaaacctgacgagaagctttctataaaggaaaacttgattcagactttagtcaagaactgtgaaaacaatcacattagacccgtcttgactgaaactataaatgggattcttgttggtcaagaagactgggatctggcacctattattaaaaatctgttatcgagtggggatgcattatacatctaccctgggttattgcttttatttcaggtttgtaaagctcatagatgggatatggttggatcaagagagtatatagactccgttatcgaagaacttttccccgttgtggaagggatagcctctactttttgtagtcaaacagattacagatctaacgaaatattatacttgattttgaaatcattcaaatatgcctgtttgaataacttaccgcaatacttcagtcaacctgaaagaattatgtcatgggtgcaattacatttgtatttgtgttccaaaccattcccggcagaagtaatggaactagatcccgcagacaggtccctagacaagagagtcaaagtcaacaaatgggggttcggtaatttgaacagattcctgcagaggtacaacaaagtcacaaaggcaattaccaaggaattcgttgactacatctttgacacaattgttcctacgatccttcgagaatatttcaaagacattgaagcttggggtagcaattccttatggttatcagattcttcattatacttcttgatttcatttttggaaaaatgtgttacaattgatcagctttaccctttgatcgagcctcacttacaaattatttttgaaaacgttatcttcccatgtttgtgtgctaatgaacaatccatcgaattattagaagatgaccaagaagaatataccagacgttatttcgatattaacagagaaggctctacaccagatgctgcttcagcagatttcatattcctaattggttctaaacgccctgagaagttgaatagtatcctaccgtttatcaatgacgttttcaccagattcagtgccaataatgacgatttgaccatggccttcaaagaagagggtgctttgagagcattgtctaacttgttttcgtttattgacgaacctactattttggaaaatatttttaaccacttcattatcccattgttatcccaggataaatacatgtttttagtcgcgagaagtttggaaactatagcactatactcagaggaattcaaagacatgagcgtcttgtctcaattgtttgaactaacatatactaatttcctaaacagtaatgtcttaccagttcaaattgaagctgcggacgctattaagtgtttgattgtatctaatccccaaattcacccagccgtctctgcacatgttccgggaatgatggaaaagttactgaaattgtccaaaatctttgaaatcgatatcttatctgaagtcatggaggcattggtggaaagattttctgatgaactgtccccatttgctaaggatttagcatccaatttagtagaacaatttctacgtattgcccaagctttggtcgaaaactcatcagagacatacagcgcaagcgatcaagaacaagaaattcaggctagtgggctattacaaacaatgactactatggtcatgtcgatgaacaaggtttcactaatcgaacctttggcacctgtggttaaatttgttgtccttcatgcacaaatttcttttattactgaagccgtcgatttactagacgccttgacaatttcatctcacttactttataaccaaatctcaccttcaatatgggaattgatgcacgacatattggattctttccaaacttacgctatggactactttgaagcatacagtatattcttcggaaccattgttatgacgggtttcccacaagatcaaacttatgtacaacctttgttggaaattttatccgttaaaatggaaagtgaagttgattacgatattgaacatgttatgcaaatcttaatgtattttgcattatctatgagagatatcccactattcagtaaagctatcaaagtatccaccaacgatgagcttggattggattctaaatgcattgttaaattgggtctggccaatttgtttgccaaaccaatagaaaccttacaaatcatggaaaccgaagggttcacgataaattttttcagcaactggtttaacgagaacttttacagtgtcttcactattaaattacaggtcttggtaattttgacccttttgaagttacctgaaattccaaatagcgtcagcccgctcttaagtaatttgacaaacaagttggttgacctgacactatcattacctaaggccataagaaatcgtgatgctgtcaccgagggcaagtccttggaaggcgatttgactccggaggaggaagaagaatacttcattgaatgtgatgacgatatgaaggagaccgtattggaccaaatcaatgttttccaggaagtacatgcattttttaagaatctacaaaatgaggacgccagtaaatatgaaaaaactataaactacctggacgaatctaagagagactcgctggaggtaatcttagagtttgtttctcagaactaa

SEQ ID NO: 617 - DNA, 1932 bp, Saccharomyces pastorianus
atggactcccctattgtacattccgcttacgacccgtccggtcaatatctgtgctatgtcactgtagctttggataagcaacgtgttggtgtgcagcccactcaaagagctacttcctccggaatcgacactgtatggaacgaaaacttcctgtatttggacgactctaatttgaaagttacgtgcttgaagtgggtgactttggcctcttcagacactgtggctattatactgggtatgaataacggtgaaatctggctgtattccgtattggcgaacgaggtcacttataaattcactacgggaaactcgtatgagattaaagatctagatttgatgggcgaccagctgtggtgcattgactccaacgacatggtttaccagttcgatcttttacaattcaaattattacagcattttaaaataaacgactgtgtccaattgagtagattggccattgttcccgcagccaattcagctacgcaactcttggtggcatctcattccatttccttgattgatatcaaagagaaaaaagtggtaacgacattcccaggtcatgtatccccagtttccatattgaggaatataaccagtgattatttcatatctggtgcagaaaacgacagatttttgaatgtatacgacatccactctggtatgaccaaatgtgttctggtggctgaagcagatatcagagaagtatcccattctggtcaagcagactctattgtagtcaccactgaagatggtaatctagagatctttgtcgatccattaatttcaaattcaacaaagaaaagaggtaacaagtctaagaaatctaccaagaaggtccagatcgctagtaaagatagcaaaaaggttccgatttataatgccttcataaataaagacctattgaacgtttcgtggttacaaaacgctacaatgccatttttcaaaaacttgcaatggaaagagctgcctaatgaatacaccgttgagataactttaggtttgaatatcaaaaataagtccgccgaccgtgatttacatggcaaagatctcgctgcagccacaaactatgtggaaggtaatgcaagagtcacttcaggtgataactttaagcacgttaatgatgctattaagagttgggaaagagaaatgacgtctttggaacaagaccaatccaaatccccagggacaaacgaactactaaccgaatcttttggtgataagctggaatcgggcaccattgcaaggctcaacgggaaaaagaacaactcgaaaacttccaatctcaagaccgcgactacaacaggtacagtcacggtcatcctgtcacaagcattacagtcaaacgatcattcgctcttggagaccgtactcaataaccgtgacgaaagagtcattagggatacgatttttcgactacaaccagccctggctgtcattctattggaaaggttagccgagagaattgcaagacaaactcaccgtcaaggaccactgaatgtttgggtcaaatggtgtttgatcatacacggtggctatttggtttccattccaaaccttatgtctactctgtcttcgttgcattccacattgaaaaggcgttccgatttgttaccaagactgctagcactggatgccagactggattgcactgtaaataaattcaagagtttgagttacgaaacgagcgatgtctactcgtcagaaacagttgttgatgacgatgaaagtgacgttgaatacaatgaagaactcgacgatgccggccttatagaggatggcgaagaatcttatggaagtgaagacgaagaaagtgatagcgacgataacgaagaggagaaaaacgtctctccaaaacaagatggacgcgtagaagaagagcaggtcgaccacgaagaagaggaagccggttatagtgatgttgaaatggaatag

SEQ ID NO: 618 - DNA, 1611 bp, Saccharomyces pastorianus
atgacattaaacgacaaaattcctcaaggccctgagcagacagactcaccacctacgtcttcttattcctcttcgcctgaaatattgaaagatattatcattccccacaatgggcccgatttatccacgtatagtaagtttctagctctctattgtagaagtgataagaacgatgacttctactctttagaagagaaacaaaactgtaagttcggagagcaatggtctactttcgttgataccattaccggtttggattgttctggctctaaagtaagcggtaggataacggagagaattttgccatcttcattagctaacaagtttactaataatttaggagtggcaatcaaggtttctgaatatacccgcgatgatgaatgccaaatccgtggttgtgttactacaattgagaatgagaacatgtttaataactggttcatatatcatattttggaccaatcccggctatccttaagtgagcatccaattgtagccaaagaagtcaaatatcatgaattatttgctgacttctttgcaaaaaatttaaaaaacacaatcgttaatgaccaatggaactttggtggtcgtgattactttgttgaacgagcaagatacttcaccgatcgatatttgagaattgaatgtattttgccagctttcccatgcaagtcgtccaacgaacaaaaggtgtatggctcggttcctgataaaggtgaagaacttgctttgaaaagacttatcaaagctacagaagaccttgctgacatatatccaccaggtatgaagatttggattgttagcgatggccatgtgttttcagactgtattggggttgatgatgatgtcgttaccacgtatactactaaattgcacgaactatataaaagagttgccattccaggcgttgacgctattggattttgtgggttaaatgagttgttctttagcggtgcagctggtgacatttttaatccggattgggtttctgatactgaagtggcacattatactggaactcaaatttgttcaaagtctgatctgtcaagacaaattttgatgaaaggctgtgacacagacgcaggtcgtttgaaaaagcagattgccatacaagatcatccaagattgcatctgtatagaggcttttcacggtttatgatggaggacttgtctttattgacgcattttcagaccttttcaagaaagaaatttaagaaaactatttcgaaaattgcgtttaacatgattaaaagaaatgacgcttattcgaatttggtagaattgatattcccacaccatttaagaatttctattcatgcgcatactaatagcggaccaaaattcggtatcaaagtgatttccaacgatcagtgttctattgtcagctcattggaagacctagaagaacctgaatttgaagatttcttacatattccaacgccttggcataattgtgtcgtcaaggtggaagatgaaaaggagaaatattttttgacgaaatcgaaagtcatcaaggatgcccttgagaagggaatgtatgacggtgaatggaaagacacccgtttcgacaatggagaaggggggcatttcgtcatcaagaaaatctcttaa

SEQ ID NO: 619 - DNA, 516 bp, Saccharomyces pastorianus
atgtttttcattaaagacctttcgcttaatatcacgcttcatccgtccttttttggccctcgaatgaagcagtatctaaagacaaaactactagaagaagttgaaggctcatgtacaggtaaattcggttacatcctttgtgtactagactacgataacatagacatccaacgtgggagaatattgcccaccgatgggtcagcagagttcaatgtgaaatatagagccgtcgttttcaaaccattcaaaggggaagtggtggacggcacagtagtatcatgttctcaacacgggttcgaagtacaagtaggtccgatgaaagtattcgtaaccaagcatttgatgcctcaagacttgacattcaatgcaggctcaaatcctccgtcgtaccaaagttcggaagatgtcattacaataaaaagtagaattagagtcaaaattgaaggttgtattagtcaagttagttccatccacgcaatcggtagtatcaaagaagattacttgggtgctatttaa

SEQ ID NO: 620 - DNA, 645 bp, Saccharomyces pastorianus
atggccaggattgtcgttttgatatcgggctccggttccaacttgcaggccctaatcgatgcccagaagcaaggccgattggacgacgatgcccacattgtctctgtcatatcttccagtaagaatgcatacgggttgacgagggcggcagacaatggcatccccactagggtccactcgctgtatccatacacgaaagccatcccgaaggaggacaaagctgcaagagccaatgcgagaactcggtttgagaacgatcttgcgcggttggtccttgagaacaagcccgatgtaatcatttgtgcaggctggctgttgattctcgggtccacctttctgagccaactacaatccgtgccgatattgaatctgcatccagctctaccgggctgtttcgacggcaccacgcacgccatcgagatggcgtggcagaaatgccaagatgaaaacaagcccttgatggccggatgcatggtacactacgttatcgaggaggtcgacaagggcgagccattggtggtgaaacagctcgaaatcaccccgggcaaggagacgctggagcagtatgagcagagggtgcatgctgctgagcacgtcgccatcgtggacgctactcagaaggtcttgcagcagctccgcaagtga

SEQ ID NO: 621 - DNA, 708 bp, Saccharomyces pastorianus
atggctgttcacactaatagacagatccttacgaggggaaagaactatgctacaaagcaatcaaagaaatttggtaccgatgaggtaacgtttgacaaggattcccgtcttgattatttgaccgggttccacaaaagaaaagtgcaaaggcagaagaaggcacaagaattcaacaaggagcaggacaggctcaggagaattgaagaaagacagaaagttcgtcaggaacgtaaagagataatggaagagcagttaaagacgtttaaagaaagtttgaacttggaggccgagatagaagatgcaaaaaagggtgatgttgacggtgccaaggtagagtctgacgattcctggcacgggtttgattccgatgaagaagaagtcgatggcgacaaagaaggcaacgacgtgaagcccattttgaagaagggcgccgttactgaaatatacgatgactcaactacagtagaagtggaatccttggagcccaacgataactttgaatatttggccaacttgaacaatgtcaagttggaaaaggcagaaaaagtgctcacccaaagcataaacagagctaccaaatacgccaaatttttaggtgtggatgacaagcagaagaagaagccaaaggtaaagaagtttagatatttgaccaagaatgaaagaagagtaaaccaaaggaaggctaacgacaataagcgcaggagatga

SEQ ID NO: 622 - DNA, 1089 bp, Saccharomyces pastorianus
atggagaaaagtgacatcgcatctaaaggactgtacttctcaactgtattcaaagttccagctccacagcgtttcattgtacttttggtacttgcactttggatctggacatggatattaagatttttctcgcataacagtttggacatatctcaagttatactcaccagagtaccgcatgacatacgtccaggctatactttaccgcaattgcatagaacagcaaggaattttgctctcaaaataacacggctcattatacctttccatttcatcactgtgcttcttttcgaatacaagaatgttgcagaagcgccagccaataacattgttttagttgttttttttttacccttactccagtctatgatcatattttggtttttactaagagattgtcaaataataaattattgtgtcaggagatgtctgcttattgaaccgtcaccgcgctccttaagaaacacctatatcttgctctctgatacgttaacatcatttgcgaaaccattgatagacttcacattattcagctcattgatattcaaagaacccttcacgcattttgacttatccgttgctcttttccctgtattggtcagattactacaatgtttaagagaataccgcttactgcgcgataaaacattactatttaatgcattgaaatacagctgtaacctccccattcttttttgcatttggcaatcaagggtgtatgagggctcaatcaattcagaaaggctgctccacgcgcaaagatggttcatgctactcaattcttcgtataccttgttttgggacataagaatggactggtcgctggattcgttgtcaaatttaaggtccaaatctaagagtgtagttacattgaaaaaaaacatgtatcattttgcgattgttatcgattttgttcttaggttttggtggttatgggtctacttgttccagggtttggaattcgtagctcctaatacagattgcctttttttccagggcgaaatgcaatatttggaagtgattagaagaggtatatgggttattttcaaactagacgcggagtattataccaaatgtgtaagcaaatga

SEQ ID NO: 623 - DNA, 1128 bp, Saccharomyces pastorianus
atgaagataaaatctctcttagctttggttggaggtattgtaacaacagtgtggtccctcccatccgagcctttaagggtgttacaattgagtgaaaatgaaatgatagaagttcctgaatcagaaaaactgaacctccgtagaagaggtgtcaagttttttgatgtgaccaagcatgtttcttctttatctttttttaacaaagaacaggagccggaagtcccagtatatgcatatcccactgatatatcaaataaaggaatcgtggatgacttaatttccaatattgacaaggattccatgtacaagaacttggcaaagttcacgagtttttatactcgttattacaaatccgaatatgggtttgaatcagccaattggttagctaccactatcgttaacattacggagggtgtttcacaggatatcttaactatcgatcattttgaccatgttgagtggaagcaatattccattatcgttcggattttgggactcacaaatccagaagatgtcatagtggtcggttctcatcaagattcgatcaatttattattaccatctataatggcagctcctggcgcagatgacaatgggtcaggtacgataaccaacttagaggccttgaggttatatgtagaaaaatatttgaaggtgggccacagacctaataatactgttgagttccatttctattctgctgaagagggtgggttactgggttctcttgatgttttcaccgaatacgccaagcagggaaaacaagtgagagcaatgctacaacaagacatgacaggatatgtgtctaatccaaaagatgaacatgtgggcatcgtgaccgattacactacccccgcgttgaccgattttataaaattaatcattgattcttacctgtccattccttacagggacacagaatgtggttatgcttgtagtgaccatggcagtgccaccaggaatgggtttccaggctcctttgtaattgaaagtgaattcaaaaaaaccaacaaatatatccatagtactatggatactttagatagattaagtttcgatcatatggccgagcacacaaaaattgttttgggaaccatcattgagctcgggttttggtctacctggtaa

SEQ ID NO: 624 - DNA, 498 bp, Saccharomyces pastorianus
atgcctccaaagtttgatccaaatgaagttaagtacttgtacctgagagctgtcggtggtgaagtcggtgcttccgctgctttggctccaaagatcggtccattgggtttgtccccaaagaaggtcggtgaagatatcgccaaggccaccaaggaattcaaaggtatcaaggttaccgtccaattgaaaatccaaaacagacaagctgctgcttctgttgtcccatctgcttcttctttggtcattactgccttgaaggaaccaccaagagacagaaagaaggataagaacgtcaagcacagtggtaacattcaattggatgacatcattgaaattgccagacaaatgaaagacaaatctttcggtagaactttggcttccgtcaccaaggaaattttgggtactgctcaatctgttggttgtcgtgttgatttcaagaaccctcatgacatcattgaaggtattaacgctggtgaaattgaaattccagaaaactaa

SEQ ID NO: 625 - DNA, 1893 bp, Saccharomyces pastorianus
atggatcgcaacatatttgacgggcttcaggagcaacacagcagcgcctcagagatggacctctcagaggaagacaacaacccgttcgtgggaacccatcacctgtatgcctctggtatcgggactggtatcggtggagcccgtcccacaaacacaaacacaaactctccgccctcttcgtcgtcttttccgacgagtccagtgcattcttcatctgctggctcttccagagcatccaccgcctcttctacatcttcgcatgccgttgtggaggctgaggctgaggctgagactgagccgtttgtttccttgtcaatgtctactactactaccacccccaagaatattcctcataatgtgaatggaccagaacatatccagattatcgatgctggcgatttcaaagacccctgggggaaacacgctattggctatgtaattttatatgaaaacaacaagattattagaagatactcggagtttcattcgttgaggcaatccctggctagactgctgcctacgataattattccacctatcccatccaagcactctctcctcaaatatatatggaatcccataaatgccacgaatgactccaaggtcatcaccaccagaaagaaaatgcttaattcatttctgtgcaactgtttgaacatcgaagagataaatgatgacatcgtttttcaaaaatttctgaaccctgagttcaattggaaagacgttttaagctcatcgccgataataatcctaccattgaataatcttttagctccacctctaagcccaacaaaaccaagtcctttgcattctatactacccattccgtccaactcttctctgaaaaattataacttgatatggcaacaacatatcacaatgaaaagtcacaacgaagtctctaatctaccaatagaggttattcaaaatgagccacaatttacacatattgaaaatctatttcaaaactacaaaagaataatagctctcctgctgaaaaatataagatcaaataagtctcatttccactcgttatccacgtattttgccgaattgggtgcttattataatgcctttagtttggaaaacgataccgccatgcctaatggtgacgacaaacatagaagaaatttaaacaatccaatgttagaaatcatcggtcacatcgaaaagataggccattcattcgatattatatacatatcttcagaaattctaattgaaaaatacaattctatgctggaggaccccattaacgaattgtcacaatttctaaatgaatcattcaaagttctaaattttaaaaaattgaagtttttgcaatataaaatcttggagaaattaattatcgaaaaggagaccaaattaaccaaccttaccgaaatcgaaaaccaactgcaaaaaattaatgataacctggcaaactccgctatgttggcagacgataataatatgacggatacgaggggcaatgagccaaacgctgttaaaaaggacacaaggtcgctatcgaagtcaagtacaaactccagttccagcggtcaccaaaatgaaattcgtataggaacaagcaaactaaactacaaaacatctacacccacaatgaatttgaacaaacttgaaatcaaacaactaacagaacaagagagatctaaacagattaaacaactgacacaggatttaactaagttgaaggattgtctgtccatatgcgtatcggatatgctagaaataaacacttcatcgtacaagagtttgatgtatgcatataatcacatccacttgaccatcgccaagatcttaaaatttttcacaaccaatttcaaagcatggatcagagaatgtctagagaattggaaactagccaagtcgcaaatcgaccaatcattataa

SEQ ID NO: 626 - DNA, 786 bp, Saccharomyces pastorianus
atgtcaaataccgtaagagccatttcaccagatataacactattcaacaagacattgacattccaagaaatctcacaaaacactagagaggctgtcatatacattcatggaggtgcatggaacgatcctgagaatacgcccaatgattttaatcaattagccaataccatcaaatcaatggatactgagtcaacggtttgtcaatactctatagaatacaggttatcaccagagatcacaaatccaagaaacttatatgatgctgtgtcaaatataacaaggcttgttaaagaaaagggattaacgaacattaatatggtgggacattccgttggagctacctttatttggcagatattagctgcactcaaagatcctcaagaaaaaatgagtgaagcgcaattgcaaatgttgggacttttgcagatcgtgaagagagtatttctattggatggtatatactcattaaaggaactgttggtagaatacccagagtatgattgttttacaagacttgccttccctgatggtattcaaatgtacgaggaagagccctcgagagtaatgccttacgtgaagaaagccctttctcgcttcagtattgatatgcacctagtgcattcttatagcgacgagttattaacgttaagacaaactaattgtttaatttcttgtcttcaggattatcagttaagtttcaagttgtatttggacgatttgggtttgcataatgatgtttataagaatggtaaagttgcgaagtatatttttgacaatatttgttga

SEQ ID NO: 627 - DNA, 825 bp, Saccharomyces pastorianus
atgagtgaagttgcgccagaggagattatagaaaacccagatggatccagatccatcatttcatacaagatcgaagatggtgttgaatacaagattactcagaaagtaaaggatgttaaagtactggaaaaagttcacaaatctgttgcagaaagaaaaaactggaataaatatggttccgaaaaggggtcaccagcaggtccaagtgctgttactgcaagattgggtgaagaagtcgatctaagattgacaaggaactggaagcaagctgaagaagaaagaatacagaaagaaaagggaagtctcacaaagaccggtttacaatgtagattatgtggtaacgaccatatgacaatgaattgtccattcaagaccattttgagtgaactttccgcattagaagacccagcagttagtgaaggcggagctgaagctgtcagtgaagataagggtggccaagctggcggagctggcgccatcccaggccaatatgttccaccttctcgtcgtgctggtgctagagatccttcctccgatgcttacagagattctagagaacgtgatgatatgtgtactttgaagattatgcaagttaatgaaaatgctgatgaaaatagtttgagagaagaggtattgttcccattcgcacccattccaagagtttctgtcgttagaaacaaagtaacaggtaaatcaagaggtctcgcctttgttaccttttcgagcgaagaagttgccgaacaagctttacgtttcttggatggtaggggttatatgaatttaattttacgtgttgaatggtccaaacctaaggttaaggaatag

SEQ ID NO: 628 - DNA, 987 bp, Saccharomyces pastorianus
atggagagaatcattcagcaaacagactatgatgcgctgtcgtgcaagctagcagctatctcggctggataccttccttcgagtgccctacagagattgccagcggatctggctaagaagtacacacagtggcaccgcgagtatttgctcactctcaagaaatttagcaggcgggcctttgggaaagtggatcagactatgcgatcttccttcccagtgatgaactacggaacttacttgcgtactgtggggatagatgtggccatattggattttctggatgcgaatgaaaaagttcaagttgtcaacctgggttgcggttcagatttacgaatgttgcccttgttgatgatgtttcctcatgtgaggtgtgtagacattgactatagtgactcagtgcagctgaaaaataaaatactgcgtgagaatggaactttgcgtaatgaccttgacttgtcagaagatagtgccgactcatcaccggttttggtagatcaggaaaggtataaactcattgcgtgcgatttaaacgacatcttaaaaacaactcgcctgttgaatacgtgtaccagcggcgacattcccactatcataatatccgaatgcttactgtgctacatgcatgaaaaggagtctcaactgctcatacacgcggtctcagcgaagtatgcccatggactatggatatcgtacgaccccattggcggttctcagcccaatgatcggtttggcaccattatgcagtccaatctaagggaatcgagaaatttggaaatgcccactttgatgacttataattccaaggagaaatacgcttcaagatggcccgaaactctgaacgttatcatcaatgatatgtgggaagttttaaatacacagattcccgaaattgagaggaaaagattaagatctttacaattcttggatgaattagaggaactaaaagtcatgcaaacccattatatcctcatgaaagccgaatggtga

SEQ ID NO: 629 - DNA, 423 bp, Saccharomyces pastorianus
atgtatacaaaagagtactactggttttcccagtatatgataataacaagtaccttggtgctcaccataatatggtcaatcctaccatcgtccttcggtgaggctaccccacagcagttcgtcaacacgatactagacatctttccgcagaggagatggatcatcactctggaaggcataatgcttatgggcatgctgtgtatctacaccggtcttctgatgtacaatgaagactcgttaaccccaccactggattccttgtccacagtgacggatgcgggcggccagctcgtaatactggaagacacagtcgagtttgtcaagaaatgggcatttaaggaaacaagtgggatttacgatctgcccctgatggatgcctgccaactcttgtacctgtacgataacgaagatgccaacacatag

SEQ ID NO: 630 - DNA, 1050 bp, Saccharomyces pastorianus
atgacaactttgttgcagcttttgtcaaactattataaagctaaactagaatcggaacgaatatataatgagtatgttcaatcgcagtacgagtttgcctcttcggacaacttgaacaataacaaagataaccagttttcgaagaaggttgttgatgaaactttattcttacagcgacagattgctcaattaaataagcagttacagctttcatttcaacagaatgagaaattactaaatgtacagaagaatcaaaaggcactataccaaagtaaattatccaacaaagacacacttatcgatgacctaaaactcaagctaaaagttgagaagatacccataaatagagaaaggacaccctctatcacttctgatgagcaacgagacaatttaaaatcgccgcataaacccacgattcatcttctttcgccaattgttaaccgtgataaaatcaaaaatcaaactaaagaccaaaacaacaacgaacctgactcacctatatcaaagagaaaatcaaaagggttgagatctttattgagttcggggaaaaatacaatctttgattcaatatccaagaatctcgacgatgagattaatgaaaatggacctatgagacaggataatgaatcttctaagacggcagataaatcagtatcaatatcaccattgctttcaaaacccgcagaatcgcataaggaaaagaaaaatagtatactgaaagaatacatatttccttcgaaggatgaccatttggcggatcatgatatactgccacctagaaaactagataatattgagctgtcgagtatcggtgattcgaccacgatgacatctaggagctcaactgccaatacaaacgacacattgaggaacgaagaaaatcgtcatggaatagacaatctaaaaagaatcaacaccttggtcagttccccagtcaagggcgtatccgatacaaaaaagaaaagaaaactaacgaggcaacggatcaccacattgcccaattcagatgaggaactgaataacgatttaaatatagatgagtttgtgtaa

SEQ ID NO: 631 - DNA, 546 bp, Saccharomyces pastorianus
atgtccgcttctgaattctacgcaaaggagattaagagtgcatttaagcaatttactgacttccccatagagggagagcaatttgaagattttttgcccattattggaaacccaaagctattccagaagttgatcaacgctttcgcaacacatttacaggaaaaatttgttaccagaaagatcgattttattgcgggtgtagaagctagaggtcttttgtttgggccgtccgtagcattagcactgggcgttggattcgtaccaataagaagagccgggaaactaccaggtgagtgtgctacagtaacgtttacgaagctggaccatgaggaaactttcgaaatgcaagtggaagccattccctttgattctaatgttgtcatcatggatgatgttcttgccaccggcggatccgcaatggctgcaggtaatctcatcaaacaagtgggtgcccatattttggaatatgacttcgtactaacgttggatagtttgcatggtgaagaaaaactagctactcctatcttttccctattacattcctaa

SEQ ID NO: 632 - DNA, 915 bp, Saccharomyces pastorianus
atgactgtcataaaaaccgagccttcaaacgaggttgcgttgtattccccaacagcaaatgaatctttgaataaaaatgaaaccgtaaaaaagagagaaaacaataaacaatctccttcttccaatataaatagccgctcaagtataacgaagcataaagttgctgccaaggcgccggaaaaaaagtcaaaggattcagaaaagcaagatctttctgcttttttgttaaatccttcgctgattgtaaaaccttcagaggggaaaaggaaagaaaatgctgtggcagttagcgacacaccaaatgttaagaccgagcccacaggatttcagttgctgaccccaatttcaaagaaaagggctttaaaagaaaaaccaacatctggtaaatacgataatattgatttttcgaaggaggagagagcttacaaccaaaaaaagccaaaaatactttctcctgctacagagacttccccctctgaatataagttctcgtcaattgtagaaaatgtatcatctccggctaaacaaaaatcacaggaactaactgaaaatcctggtgagtaccagaaaatacaaaactatctgttcgacaaaccaaatcttttagatacgtgtctccaagactactctagtatgttacctgctgacatagcagaggaggatcaagaattttttattagtgtagccgattcgacattggaagagtggacaaacaagggccaggaaatccttgatcagcaattccaactctaccaagaaataataaagaaacgaatagaattgagctacaaattcaaagggattatatcagtcatcaatgatagggcagacgccttggaggaacaaggccagcaattagagggaaaaatcaagaaagtcaagagtttagccaatgaaattctcgacattatataa

SEQ ID NO: 633 - DNA, 1074 bp, Saccharomyces pastorianus
atggaaagcagaaatatggtgcttccttctctaccggccattcttacaagtaattctagctcgccttttcagatgcatgttctaccaaacacaaactttcccagtgatgaacagggtgttatcaggctcccacccttggctacgtctgtgcaccttccaagaccggttgtaagcacttgtaaaagcccatgcgatgaggcaaggtcgaacagtaatagcccgcaacctctgagcttcctatcgcaacgcttggctacttccaggacacctttatccaaatccaagaagccgagttctcattccccttcaccctttaccccaacaatcaagaaccctaccaaaggacagccagctcagggtacgcattcttatagaaaagttaacattctcacacctttatctgcagctaaagccatcctgacgccacgagcaaagggtgacaaaaaaagatcatttgcattcattacacattcacaagaaacgtttcccaaaaaggaaccgaagatcgataacgctcggttggctcgtcgaaaaagaagaagaacgtcgtcgcatgagttaggaattttgcagactgcgttcgatgaatgtcccactcctagtaagaccaagagaacggagttgtccgaacagtgtaacatgtccgaaaaatctgttcaaatatggttccagaacaaaaggcaagctgctaagaagcacaaaaacaacaatggtaatgcaagccgttgcaagattcactccagtgattcgatttctatgatatcatattcagatgctactttagagattacttccaccccaacatgctctagcaagaccattactgcggagttattaaagacctcacctccaaacatctctgcatcgattttcaaagacgatcatattaccccttgtaaaccgggtagacaattgaagttccatggcaaacctgtggttgctagaagaacactaacaagtaccagtcataacgaaccaatcgacagtcttgaaaaaaaagaaaatcatttaaaattcaatgcatatgaaagagtacctctaggagagattgaaatgaactcttttgaaaactaa

SEQ ID NO: 634 - DNA, 2052 bp, Saccharomyces pastorianus
atggttgtagtgggtaagagtagagtgcacgatgtaagcatgagtaggccgcacaagagatcgttgattgccattttttctacctgcgttttggtgtttctcgtgttgataattgatgctaaatttgaatatataacctttttccccaaatctttgagtggtggaggtaaagacaggtctattgaatcgttgagggataaggaatttacaagactaggcttgacacccagagaaccgataattgtaagggatgtaagatctgggaaggataagaaattacatggtaggttccttcatatcactgacatgcaccctgactcttactatgtagaaggaacttccatagatgccgtgtgccattcaggtaaacctgacaaaaagaatgatgttgccccaaagtttggaaaagccatgtctggatgcgattctcctgttttattggtggaagaaactttgagatgggttaaagaaaacttgagagataagattgattttgttatttggactggtgataatgtccgccatgataatgaccggaggaatccaagaacagaggcgcagatttttgatatgaatgatattgtcgctacaaaaatgactgaaatattcagtgctgggaatgaagaagatccaagagatttcgatgtatctgtaattccaagtcttggtaacaacgatgttttcccgcataacatgtttgcattgggacctactcttcaaaccagggagtattataggctttggaagaatttcgttccgcaacaacagcaaaggatatttgatagaagtgcttcgtatttgacggaagtcattccggggaggctcgctgttttgtcaattaatacactatatctatttcaggctaatcccttagttgacaattgtaattcgaagaaggagccgggctaccaactcttactctggttaggctatgtcttagaagaactaagacatagaggaatgaaagtatggcttagtggacacgtgcctccaattgcaaaaaatttcgatcaatcttgttatgacaagtttaccctatggactcatgagtacagagacataattgttggaggattatatggacatatgaatgtcgatcacttcattccagcagatggcaaaaaggcaagaaaatctcttctcaaaaatttggagccgtatagtcgtgttcgagaaggagaagagattgcagaggaggaggaggatgatgatgatgatgatgatgaaactaatctaaatagaattctgggtcatgcaatgactgcaaaagaagcctatttgatgggtgctaagccatctaacaaagaagcatacatggacaccgttcgtgatacacactaccgtaaagtatggaataagctgcaaagagttgaatcggaagataccgtggagagtgaaaacaagaacaaaaagaagaagaacaaaaagaagaagaagaagaagaagccaatcactagacaagagcttattgagcgttattctattgtaaatataggtggttctgtcattccaactttcaatcctgcctttagaatatgggaatataacattagcgatatagcagatgaatccgacttcggtatctcgaaggataaaccttgggatgagttttttgaatcactagacaagattatggaagaatccttactggaagacgaaccggacagcaaaaacattgactcccgaattagcagcgagggctctgacaaaaagaaaaagcgaaagagtgatgataaaacggttccagttgaaatgccagaaggatacggactaggtcccgcgtatgtaccgcaactgtttactccaacacgttttgttcaattttatgccgatttggagaagattaataaagaatattatagctcattggatgagtcgaaggatgttttcaagtatgaagtagagtacacctcggatgagaagccgtactcgatggacacgttaacagtaggaagctatttggatttggcaggtaggttgtatgaagacaaccctgcatgggaacaatatgttgaatggtcatttgcatcttctggctacaaagatgattga

SEQ ID NO: 635 - DNA, 1914 bp, Saccharomyces pastorianus
atgttatctaaggtgttgctaaatatagcattcaaggtgctgctgaccaccgctaagagggccgttgattctgatgacgatgatgaacttcttccttcccctgatctaccggatgtcgatgatcccataacaggtgatcccgatgttgatataagccctgttactgaagaaatgttctcttcatgggccttatgcatcatgttgttcttattaatctctgcattatggtcaggttattacttgactcaaaaacgtataagagcggtacatgaaactgtgctttcaatcttctatggtatggttatcgggctgataataagaatgtctcccgggcattatattcaagatactgtcacgttcaattccacctatttctttaatgtcctgttgccacctatcattttaaatagcgggtatgagctgaatcaagcgaattttttcaataatatggtatccatcctaatttttgccataccggggacttttatatctgctgtcgtaataggtatcatactctatatctggactttcctaggattggagagtatcgacatttcatttgcagatgcattgtctgtcggtgccactttatcagctactgaccctgttactatcctttccatattcaatgcctataaagttgatcctaaattatacacaattatttttggcgaatctttgttaaatgatgcaatttctattgtcatgtttgagacttgccaaaaatttcatggtcagcctgcgacattttcttcggtttttgaaggggcaggcctctttttaatgaccttctctgtttcattattgatcggtgttctcataggaattcttgttgcccttttattgaagcacactcttataagacgctatcctcaaattgagagttgtctaatcctgttaattgcctatgagtcctatttcttttccaacggttgccacatgtctggtatcgtttccctgttattctgcggtatcactttgaaacattacgcttattataacatgtcaagaagatcacaaatcaccatcaagtatatctttcaactgctggcaagattatcggagaattttatcttcatttatctaggcctggagcttttcactgaggtggaattagtttacaagccacttttaatcattgtcgctgctatttctatatgtgtagcacgttggtgtgccgtatttccactatctcgattcattaattggatttatagaatgaagacaatcagatccatgagcggagtcactggcgagaatatctctattcctgatgaaataccttacaattatcaaatgatgacattctgggccggactgcgtggtgctgtgggtgttgctttagccttgggtattcaaggtgagtataaatttactttattggcgacggttcttgttgtcgtagttttaactgttatcatctttggaggtactacggcaggaatgttggaagttttaaatatcaaaactggttgtataagtgaagaagatgtatctgatgacgaatttgatattgaagctccaaggacaatcaattttatgagtggtagccccatgccgacaggtttagggccatattctgataacaattcacctgatgtttcaatagatcaactaacagtcaacaacaacaacaacaacaacaacaagagtgttcctgatcatccatcaatgggtgacaattccttcggagagttggacgagaccgaaaacaccagccctaacttgggaagatcatcaatcgataagcgtaatttaagagataagctaggcacgatcttcaacgccgactcacaatggttccagaattttgatgagcaagtattgaagcccgtgttcttggataacatgtcgccgtccatacaagactcagccactcagtctccttccgaattcacttcccaaaaccactag

SEQ ID NO: 636 - DNA, 9801 bp, Saccharomyces pastorianus
atggtgctttttactcggtgtgaaaaagcaagaaaggagaaacttgctgctagctataaggcattagttgactacttggtcgattgtgatgttcccaccttcttagcaagaattgagactatacaagaatgggaccggtcaagagatgacctttacgtttggatccccattctagatcgaatggatgaactcctgtcgaaagtggcagaaaaatataattacaagcaagattctaaaaaggaatccgaagttaaactattagaaatggaagagcatgacgttatttactgtttgaagatgctacaatttactcgtcgattacttatgaacacagaaaacagatttgtttactcctctggggatgttttaatacatctgctaaattgtccaaacttcacaataaaattagcagttatgaggattttggctattttaggcgaaagatttgtcatagcgagagaaaagatagttgcgcataatatttttggtgatcatgatctaaggaaaaatgctcttaaattagctttatccttgtcgtcttctgtcatggatgaagatggagaacatttttcactcgtagatttgtactttgataagaagaaagttcctcaaaaatggagaaagttaagatttacgcactatacttcaaatggcttcaaaaaatcaaacctgtcgaaaaataacggtaatgaggtaacttccattaagaaggtgaccatgacaagtcaagaattatgcaatcactctttgcaggaaatcttcaataaaggtatggaacttttaccatcagaaagttggtttgacttttcggtaaaagcctcggtggcaaaagccttcagtgatgattctaacgaaaataaggatttgaggaacttaatcattgaaacaaaattgaacgctattgcattcgtgaacaccattttctcacctcctcaagtgagttccaagttattcgaattggatccttatgcttttaacagtttaactgacttaatttcgttatctgaaaccaaaataccaaaggaattaagaacagatgctcttttcacattggaatgtatttctttgaagcacgtctggtgttcagacatcattagaaaccttggtggtaacatatcgcacggcctattgttccagattctgcgttacattgccaagacattgagagaagcgacagatgaggttgacgaagaatataatgtgaggtttttctacttgatatcgaacctagccgacgttaaacctttgcatgaatctctgtttgctgccggtttgattcctacattattggagattgtatctataagaaactgttcgtataagcgtacgctagcttcggcaacacatcttttggagacatttatagataacagtgaaactgctactgaattcatcgaaaacgacggttttactatgttaatcacttctgtggccaatgaaatcgactttacacttgaacatccagaaacatggcaacctccgaaatattctgtggtctattactcaatctccttcagagagttggcatatatcagaagtttgctgaagctcgttctcaaattattaagtacagactcaggagacaggattagaaatttgatagattcaccaatactcgtttcactaaagaaaatcctggagaataaatttgtatttggtttaaatttaataacttacactctcgatgtagttcaaaaagtaataaatagtgagcctactatttatcctgttctcgttgaagcaggtctgattccatatatcgttgacaatttcccaaagctattagggccttctgcggaattattgagtttacttcctgacgtcatttccgcaatatgcctgaattcagaggggctaaaccaagttaaagaaaaaggtcttataaaccatctatttgattttttgctcgatgctgaccacgcacgtatattaactgggggcgatcgctctaccgaatacggtactgacatcgatgaattggcaagacattatccggatttgaaggcaaacattgtagaggctctatgtgatgtaattagaaaaatgccaagtgcatataaagatgaaagagaattccttttcacttcgccgaaagatgagaaatatttctttcatgaaaaaaatgaggaagtgctggttgataaagaggagcatgagcccgcttattgggagttattagataagggaactatgttggacacgttcactagtgttttgtttggtatgtcattgggaaatggctctttttcgcaggttccacaacatttagaagcaaaagattttttggcaattctattcatggaaaatccgccttatgaatactttacttcagtagcaatatcaaatgtcaccgaggtccttcagtatttggatgaaaaatatgaagattatgcattcatggatgtaatgaaagcattgaatgaccaattagaaaatttgagtgaatttttaaatagtcctaatgacattagtttctttttggcaatggatggcgacacttcgatacgtaaatgtcattcaaagctttgtcgactcgccgctattttaaacattgttacaaacgtttacgttgatcttacaaccctatcgtgtaagagaatcatgcaaatttacagttatttcaataaaagcggcttttctctaattaaaaacttaaaactactactccaaaagtgtgcattagaggaaatgtatttacgccaacatatgccagattctattattacggaaactatgccattacccatagtagatgtttcaggagatgggccgccgcttcaaatatatatccatgatccaaaaaagggtgaccaaaagggaaaagttactagcataaaaacaagaaatactctccaagtgcgaacgacattgtataccttacaatccaatactgcagttttattccgttgtttcctaagattaagccactccagaagtatggacttagaacataaagatctaacaactgagattcacatcttcgaaaacgttgttgaaaatgttctcgaaatgttaaaagtcactgaacttgaaggtcatttaccgtactttcttgttctactaaacttcaatacctttgtgtttacgattccaaaagcttctccaaactcaactgaaattttacaaacaatacctgcttatattttctatcaaaagggaggttatttactttatttgcaaattataagagatctttttacaagaatgacaaaaataaaagatctttcttcccttgacaacttaaattacatcgacgaatcgaacggtattttaaccttaagctgcttaataaatgccctaacttttatcaacaagtctatgcaaactgaaaccatggaaaatgttcaaagtataggtaagtactacgtttcagtagatgaagattacaatatcatgaaagcccttacggttcctattaaagtaatggctctagcaatgattttagatttggataaatcagatggactgttcaagacacagtctcgtaatgtgccttattctgtattcaagcaactcttgagtatgctgaagaatgtattcaccactgttaacattcataccaaagaactgtacgaattgcactgggacttggttttcccaccaattagaaaaataaacttatttgaacaggttgatattcccggcgatgttgcggcgaattacttaactgaaaccggggacgaccttcctacagataatagtattggtcttttctcacctgaacaatgggaaaagtatgtaaaattagctggagaagataagtcaatatactacccacaaccaatacaaccacaatactacaaaggatgtacgtccaaggagctagatgaactaagggatactttcttcaatgatggactgccctctaggatttttacagtactgcccttctatcccaaacttgtcaatgcttttgcaaagactctactacgaatctttacaaaatacgatgaacccaatgaagtatttgctggcaaaatattggataggatcctggagacgagattggatgatcccgccactttgtcctcattgattcatttattcggtatattcttaaatgagaaatatatttatcaaaaggcttcgcacttgatgcagaagtttattgaatatcttgaaaagtctttgaagccagaacatgttaatacaccttggttttcgaaagctctttacgtttatgaaatcataatagcaaaatcagaattgccccagtttgaagagctgtctaaggatgttctcttgagatatcctttactttccatggccaaagtcttccgcataccagaatctataaaacagaaattgttcgatatactaatcagagtttctgatatttccaatttttattccgcgctggcaacatcgcgtatattaattttttattctagggacgagttctacgctaacaacatagcaagatcaggtattttgtcaagattactaaaagtgataggaagtttccaaaaattggacaaaattaactttctagagtcatcttttcttttattgacaagaaggtgttttgaaacaactgaaaacgttgacaatttgatacgtgcagaagttgatagaagctttactgctagaccgttaggcgatggagatgatgctgtgcgtgaattaacaactattttagaagagaaagcacacgtagttatgcgaagtccctctcaatttattgacattctttgtgaaacggctcgattccaagaatttgatgaacaaggtgctttgattgattactcgttgaaaagatttttggataagaaaaaggaagatactcgagtaattctagacaaggctgatatatatgagcggacaggtattatgcatttattattatcacagcttatggctgcttctgaaaaagactggttatctgaaccggctaattcctcagacttgccggagaacaagaaaaatcaactggacccatcaagaaatcccgtttgtgcttacatggtatttctgttgaagcttttggtagagctagttagtagttacaatcagtgtaaatttgaatttctaacgttcagcagaagaaacacatatgcagaacgcccaagaccaagaactaccgctatcaacttttttctttatagattattggacaaacctgttggaaatgaccatgataagcacgaagctaaaagaagagaagttgttggaatgttagcgcgctccgttattatcggtttcttagctactgttcaagatgacaaaacgatcaaaagtgatgtcaagattgttgatcctcatatgaattttattagaaaatttgcaattgaagcgatcatgaaagcaattcgaaatgcaacttcttcttccaaacttttggaaggcaatcatttaaaattagatatgtggttcagaattattacgtcaatggtttatgtccaggcgccacatcttcgccaacttcttgatccgaataaagttgaggctgaccaataccaattgtgcaagctcgttatagatctgggacttccatcagttattacggaagctatggccagtatagatttaaactatccgttttcaaagaaaatattcaacgtagctgttgaagccctaaataccatcagttcaacgaggaataatttttcggaacacttcaagattgaagaccatgacgaagttgacgacgaggttgatgaatctgataaagaagagattccggacatgttcaaaaactcagcactcgggatgtatgatgtagaagatattgaggaagatgacgatgatgatgacgatacttcgttaattggagatggtgatgctatggcatttgttgatagtgataatggattcgaagtagtgttcagtgatgaagatgacgatatgggagaagaaggtgaagaagatgttcattcaaggtcagaggaaaacgacttatcctcagaaatgaattcaagcacaacaggcggttcagatgttgactatgaagttgatgacgcagaaggactggttatcaatattgagcaacaatcaggagatgatgaagatatggctgactacgatattgatcatagccattcttcccgtactggtgatgaagatgaaggttctatggatgtcatagaagtttacgatgacgagctaagctctgaatacgatgtcgatttgagcgattatgacgtggatgagtctgattgggattcaggattatccagtttatccatttcagatgaagaaggcgaaagtagcgaaaacgagccgattaactccaccagaatgggagattcaagaagaaggtggttgatagccgaaggtgttgagctttcagatgactcacaaggggaaagtgaagacgacgggagggatgttttccgtgatatcgaacacatcttttcaaatgaaaatgaacctttgtttagggttcacgatgaaatgcgtcatagaaatcatcgtcgctcgattaatcgtactcatttccattctgctatgagtgcaccctctttaagtttgctgaatcgcggaagaagaaatcaaagtaatttaattaatcctttagggcctactggattagaacaaattgagaacgatatttctgaccaagtgactgttgctggttcaggttctcgcccgagatcccatcatttacatttttcagaagttcttttgtcaggtggtgtgtttgatgaacctgttttggatggcatcattttaaagtctacggtatcaagatggaaggatatatttgatatgttttatgactccaaaacatatgccaattgtatcatacccactgttatcaacagaatatacagggttagcttagatttacaagaaaactctgaaaaacacaaacaaggaaaatcaaaggataagcaccctattttctctgagccaagagtggaaagtatcagtagtacagacgccatatcagcagaggaagatagcgtgcaagcaagcaacgtttcccatgatgaccatgaacctgtctttgttactattcaaggatctgaagtagatataggtggcacggatatcgatcctgagttcatgaatgctttaccagacgacataagagctgatgtatttgcacaacatgttagagaaagaagagctgaagccagacttgattcagagcacaatgcacactccagggaaatcgattccgatttcctagaagcaattcctgaagatattagagaaggaattttggacaccgaagcggaagagcagaggatgtttgttagaataggttcctctgcgaacgtgctaagagccgacgacggtgctatcgataacgatgaggaagctgaaaatttggatcatgaaaacagtgatgatcgtaacattgccgaacctgaaaagaaaaagccggcaagaatatactttgctccattaattgatcgtgctggtattgcttcgctaatgaaatctgtgtttatctctaaaccttacattcaacgtgaaatataccacgaactgttttatcgcttatgctctagtaagcaaaacaggaacgatttaatgaatacatttctattcattttgagtgaaggtatcatagatcagcactctttagaaaaagtttataacataatttctagcagagcgatggggcacgcgaaagctacgaccgtcaggcaattacctccagactgtacgccgcttacagtggctaatcaaactattgaaatcttacaaaacctgattgatgcagattctagattgaaatactttctcatcgcagaacacgataacctgatagtaaacaaagcaaataataagtccaggaaagaagtgctcactgataaaaaattgagatggcctctgtggcatttattctcacttctagatagaaagctcatcacagatgaaagcgtattaatggatttattgacaaggatattacaagtctgtacaaaaacgttggctgttctttccgtcagttcgagtggtaaagaaaatttgaataaaaagtttcatttaccagatttcgatgaggatgacctcatgaaaattttatctatcattacactcgatagttgtaccacaagggtatttcagcaaacattgaatataatttacaatctctgtaaaataaaagggtgtatggcgatttttacacaacacctggtatctttggctatagagataatgggcaaattaaaggatgctctggatggcctatctcgtgaggtgagtacgataacgaatgggatggagatcaactcagaattgctacagaaatttacccttccaagttctgatcaagcaaagttactgaaaattctcacgacagttgatttcctctatactcataaaagaaaggaggaggagcgtaatattaaagacctgcaatctttgtacgatcaaatgaatagcggctccgtgtggtcctcattgagcgaatgtttgacccagtttgaaaaaagtcaagctatcaatacttcagcaaccatcttgcttccattgattgaatcgctcatggtggtatgcagacgaagcgacttaagccaaaatagaaatacggcaaataaatatgaagatgctaaattacttgatttttcgaaaacgcgtgttgaaaacttattcttcccatttacagatgctcacaagaaattgttgaatcagatgattcggtcaaatccgaagttgatgagtggccctttcgcacttttagtcaagaatccaaaagttttagattttgataataaaaggtacttcttcaatgccaaactgaagcccgataatcaagagcgccccaagttacccattactgttcgccgtgagcaagttttcttagactcttatcgagctttgtttttcaaaacgaatgatgagatcaagaattcaaggttagaaattacatttaaaggagaaagtggtgtcgatgctggtggtttaactagggaatggtatcaagttctttccagacaaatgtttaacccagattacgctcttttccttcctgtgccatcggataagaccaccttccatcccaaccgtacatcgggcatcaatcctgagcacctttctttcttcaagtttaccgggatggttataggaaaagcaataagggatcaatgttttttggattgccattttagccgtgaggtttacaaggatattttaggtagaccagtatcgttgaaggatatggaatctttggatccagattactataaatctttggtatggattctcgaaaatgatatcacagatatcatagatgaaacattttccgttgagactgatgattatggggaacataaagttatcgacttaactgaaggaggtaaagacataatggttaccgaactcaataaacaggattatgtaaagaaaatcgttgaatataagcttcaaacatccgtcaaggagcaaatggataactttttggttggcttctatgctctgatatctaaagacctcattaccatatttgatgagcaagaattggagttgctgattagtggtttacctgatattgatgtcgatgattggaaaaacaataccacctatgtcaattataccgcgacttgtaaagaagtcaattacttctggagggcggttagatcatttgatgcagaagaacgtgctaagctactgcaattcgttacaggtaccagtaaagtacctcttaacggattcaaggaattaagtggtgtgaacggtgtttgtaaattttccattcatcgtgattttggttcatcagaaagattgccatcatcgcatacttgcttcaatcagctgaatttgcctccttatgaatcgtatgaaacgttacgaggttctttattgttagcaattaatgaagggcatgaagggtttggccttgcttga

SEQ ID NO: 637 - DNA, 444 bp, Saccharomyces pastorianus
atgctgggacaaaccttcaagaagccatgcaggaccgtcgtggagcgggtgtccggaaccacagtgttcgtgagaaacaagaggacgaagagcaagagcgcaatgtcgcccctggcgcagagagtggtcacgcagctgagtgtgatttcagcgagcagaaaacagcccaagctgctgaaactctcgcgggaggatttgatcaagcaccaaactatcgagaagtgctggtcgatctaccagcagcagcagcgtgagcgcaggaacacacagctagagttgcagtacaagagcatgcagggtgccatgtccttgctgcaagagctcagccctcggctattcgaggctgccaacgcccccgagaagggcaagcgcttccccatggaaatgaaggtgcccaccgacttccctccggacacgccatggcactaccactttcgcaagtga

SEQ ID NO: 638 - DNA, 666 bp, Saccharomyces pastorianus
atgaataacagtgaagatccgtttcaacaagtcgtcaaggataccaaagagcaattggaccgcttgggaaactatataacccgtcacaacaccgccggtgatgatgatcaagagggggaaatacaggatattttaaaggatgttgaggaaacaatagtggatttagaccgaagtataatcatcatgaaaagggatgaaagcgaagatgtgtctgacagagagacacaagttaaggacataaaacaacaatttgatgccttgaaaacgcgtttcgatcaaaggatacaagaatctactcagacaactattccactagatgaaacagaggaaaatccgacggtttccaacactaataatgacggcggtatgtccaacccatttcaagaacaaatgataagggaacaggatgttcatttggacggtattcataagacaatgcagaatttgcatatccaagcccaaacaatgggggatgagttagaaaatcaaggacaattattggatgatatggatgaaggtatggacactgttgtcaataagttagcgaggggccgtagacagttagaatgggtttatgagaagaacaaagaaaaatatgatgactgttgtataggactactcatcgttgtcttgataatcttattaattttggcattcattgcttaa

SEQ ID NO: 639 - DNA, 1500 bp, Saccharomyces pastorianus
atgaataataatagtgccacggaggcttcctcaagggcccagatacggccttattacgatcctgattcatttaatgctggttatagtgccgtcttcaagccagaagaaggtgtagtcgatccacaggggtatacgattgcttcaaaattaaacgttatcaactcatctccgactacaaaaagaatggccaatgccttgtttagaagttccccaatgaagaaattgtcaaactcgatgaatgatgggctgtcgccagaagggagcagtggtgagataggtagtctgaataactttgagtgggcggaactggttaaccttcagaaatggcggaaaatatttgaacaactgctcgatatgtttttcagaaagtactttcaattgctcatccaacaaccctttgatgtagctagattactgactcaagtaggtgagttccaaataggcaaacctacaactgatgcaagtaaacctcaaccaccaatagtcttgcgggatgaggagcgaggcgttgtgggggatgacgaagaaggagaaaatgattacgatgaggaggagatcgattttttccccatagaaagaaagatagctgaggctaattccattgtacctagcaccgtcgacgaggatgacggtccacattctgggctcactgatagctctttgatcatcatgccacagtccctgcatacaatagatgtcattaattccctattcgaccaggaaggtattcgtgggctatggaaggctaacaacacaacttttatttacaatttcctttccctaagtattgacacatggttcactgggttactttcatcttttttgggtgttcctgacccttatttcatggaggttatcaactcatcagatatctctaaatcatttattttagccttgggtgcaggaatatttaccagtattatattgttacctgtggatttaataagaacaagactgatagtaacgtcattcaaaaggaaggcgaatgccaaaagtaagatcaccaacaccagaagtttgagacagctgattaggtgttggtcgtggcgtagaaacggtgtttccattcctttagatatgtggtctttaaccattttacaatctatcaataacagctttttcaacaaattatttgacttggtcatttacaatcaattccacatagaaaaatattcacaaactgtcatgtataacacgatgaaattcttttctaaatccttagaactgtttattaagttacctgtggaaaatttattacgtcgttgccagttaaactatctattaaatgaccaaagattattgtttaaagtcgattccactgaattaatagtgaaaccaaagaaatacaacgggatatggaatgtggttagaaacggttccaaaacaaatacaggccaattatggaatggctggaaggttggcgtgatcagtttaatttgcggatatgggctacagataatgaataaagttgacattaatatggaacaagagaagttttaa

SEQ ID NO: 640 - DNA, 1398 bp, Saccharomyces pastorianus
atgcctccacggaagaaatatgaaaatggtaattcgaaaccgcaatacaatccacgtaacgagccagattattcacaacgccaagaggctaataatgaaggaggtgaaatacaaggccgtggtttgcaaaccgaactccattccgcattgaagtcttccaatttaaacttaatcagaagaaattaccaaactggtgataatccatatctcagtgatctaaacaattcaggttcattaaggaagcttaacaaacgttatgaaagaggcctgaagttttacaagaaaggtgaaatcagcaaacaaattgcacttgaaagggagtcacaaaaaattctagacgagaaggaacttgagaggaaactaaaattggaagaggaggctaaagaaagagagaaattagttaaatcaggtgatttacccaacttaacattgcatgaagataacttcatactagatctgtcaaagttcgagacataccacaagaccaatcacggccacgaatggtgggatactgtgttcttagatgagaggggtgagatgatggaaaaatatatgattgaagacccagcgcttggtaaaggagaggaaagagatgatgacgatggcgatgacattgaacatccctcaataaaatacgtgtctcatccctcacctgagaagaccaatgaggcaaagacagtaatcaaggcatatttgacacagcatgaaaggaagaaactaagaagaaatagaagaaaaatggttagagaagcacaagaggtaaagattaaattaggactactaccaaagcctgaaccaaaagtcaagctaagtaatatgatgagcgtctacgaaaatgaccagaatatatcggatccaactgcctgggaaaaaacagttaagggccaagtagatttgaggaagaggaaacatttggaggaaaatgaaaccagacatgaacaagcggttaaaagaaggaaagaaactcctggtgtaactttcgtaaagccgtcggcgtaccactgcaaggtatttcaattcaagaacttacagaatccgaagataaggtataaattgaagatgaacagcaaagaactgtcattaaaaggcttgtgtcttcgtataaatgatgatggaccgggaattattatagtggtgggcgacgagaaatcgtgcagattttatgagaacctggtgatgagacggataaaatgggatgaagattttgaactacgtacaaacaatgagaatgtgaaaatgagcatgcaacataattcgattgcgaaaacatgggaaggttatttaaaagattgtaaatttaaaggttggtttatgaaggtgtgtaatgaccaagaaactctattacgtactttgagccaatttgattcagagcatttttattcaccgatccagacttaa

SEQ ID NO: 641 - DNA, 1905 bp, Saccharomyces pastorianus
atgagtaataataacaacaatggtaccggcgcagcacctactaacgctccccaccaccaccaccaccatcaccatcaccaccaccatcacggccatggcggaagtagttcagccctaaacaatccgaaatcttccttagcagacggtgcgcacataggtaactatcaaatcgtcaagacgttaggtgagggttccttcggtaaagttaaactagcttaccacactaccacagggcaaaaagtcgctctcaagatcatcaataagaaagttttggccaagagcgatatgcagggtagaatcgaaagagaaatctcttatttaagactgctaagacacccacatatcatcaaactgtacgatgtcatcaaatccaaggacgagattatcatggttatcgagtatgctggaaacgaattgttcgactacattgttcaaagagacaaaatgagcgaggatgaggcaagaagatttttccaacaaatcatcagtgccgtagaatactgccatagacataaaattgtgcatagagatctgaaaccagaaaatctgttacttgatgaacatttgaatgtcaagatcgccgatttcggtttgtcaaacatcatgactgatggtaatttcttaaagacttcttgtggttctcccaactacgccgctcctgaagttatcagtggtaagttgtacgcaggcccagaggttgacgtttggtcctgtggtgtcatcctctacgtcatgctttgtcgtcgtctaccgtttgacgatgaaagtatcccagttcttttcaaaaatattagcaacggtgtttacagtttgcccaagttcttatcgcccggtgctgctggcctcattaaaagaatgttgattgttaacccattgaatagaatcagtattcatgaaattatgcaagacgattggtttaaagtcgatttggcagaatatttacttccaccagacttgaaaccacatcctgaggaggacaatgaaaataaagaatcgaaaaaagagggaagtggtcctgaaaatgatgaaattgataccgacctagtcaacattctatcatccaccatgggttacgaaaaggacgagatttacgagtccttggaatcttctgaagatacccccgcattcaacgaaatcagagatgcttacatgctgatcaaagaaaacaagtctttaattaaagatatgaaggcaaataaatctgtcagcgacgacctagatacctttttgtcccagtcccccccaactttccaacagcaacaggtccagccacatcaacagcgagaaatagatacggaggctgctaagcagcatgcaaaaagaatggccagttccactactcagcaaagaacataccaccaatcacccttcatggaccagtataaagaggaagactccacaatctccattttacccacatctttaccacagatccatagggctaacatgttggcgcagggttcgccagccgcatccaagatatctccattaataacgaaaaaatctaagaccagatggcattttggtatacgatctcgctcttacccattagacgttatgggtgaaatttatatcgctttgaaaaacttgggcgccgagtgggcaaaaccttctgaagaagatttatggactatcaaactaagatggaaatacgatgtcggaaacaagaccaacagtaatgaaaaaattcctgatctaatgaaaatggtaattcagttgtttcaaatcgaaaccaacaactatttggtcgatttcaagtttgatggttgggaaagcagttacggagatgacaccaccgtttccaacatgtctgaagatgaaatgagcactttttcggcttatccatttttacatttaaccacaaagcttatcatggaattggccgttaacagtcaaagtaattaa

SEQ ID NO: 642 - DNA, 1380 bp, Saccharomyces pastorianus
atggctatctttctcagtaagagactgttgaggtacaccttctttgccggtgtagcccttattttgctgctaacgttgaactcccatagtagtacccaacaatacgtcgcttcatacttaccatctgcgtttgatttatcctcacatgactcctcctctgttgaagaacaattgcttagtgaaaaaagtgatgctgagaaactaaaagaacatgctttgaacccagaagtagataccacagccacgatggatgaggaatccaaggctctcaaagcttctgccgaagaggctgatgctccgttagacacgaaaaagggtagcaagggcaaggtagacggaactacatccacaggcttggaaaagaccactatggattatatcaccccgtcctttgctaaaaaaggtaccaaaccaaaagcttgctacgttactttagtaagaaactcagaactatatgatctgttaagctccattaagtacgtggaagataaaatcaacaagaatttcccttacccttgggttttcttaaatgacgaaccattcaccgaagagttcaaggaagcaatcactaaagctgtctcatccgaagttaaattcggtatcttgcccaaggaacactggtcgtatccagaatggatcaacgagacaaaggctgctgaagtccgtaaagaagcattcaaccagtatatctatggtgattcagaatcttatagacacatgtgtcgttatcaatccggtttcttctggagacatccattattggatgaatatgattggtactggcgtgtggaaccaaacatcaagctacactgtaatatcaactatgacgtttttaaatggatgcaagataatgaaaaagtttatggtttcaccgtctccatccatgaatatgcggccactattccttccttatgggaaacttcgatgaatttcataaaagagaatcctcagtacgttgacaagaacaatttgatgaaatttatttccgaagataagggtaaatcatataacatgtgccatttctggtcaaatttcgaagttgcaaacttgaatttctggagatctccagcatacatggaatactttgatgctttagatcatcaaggtgggttcttttacgaaaggtggggtgatgctcctgttcattccattgctgcttctttgtttttaccaaaggataaaattcactatttttcagacattggttactatcacgggccttataataactgtccgttggataaagatgtatttgaaaacaacaattgtgaatgtgaccaaggaaatgactttactttccaaagttactcttgcggtaaagaatattatgacgctcaaggtttggtaaagccacagaactggaaaagcttccgtgattag

SEQ ID NO: 643 - DNA, 1920 bp, Saccharomyces pastorianus
atggaagttctcagagatgtattatcacttgatcaagctaaaattgacgagttaaaggcaaccacacaggatgaagcagaaaacaacaatctgtttgaaaattatttgaaggattgcaaattcaaagcaccttcgaaccaagaccaatcaccactaaccaaactaaaatcattacaagaaactcattccaacaacgaagtggcaattaatgtggttataccccaactagttgactacttgacccaatttactgacagattatccaattacacacaggacttggactttattaaaagaaaatctaatgaattgcaatcgcttctcgaatacaactctaccaaacttgctaacatttcacccatggtcaatgatctaatgattcctcctgaactaattaatgatattgttaaaggaaagatcaatgaaagctggcaagataacatagcattcattactgacaaagagcaaatttatgataaatatagacacactgataatattgagcatcaagaagatacgaataggtcgactaccatagcaccaaaagattttgacaagctatgtcaactcttggatatcctcaaaaatgttatcctagaaagatccaaaagactcattatttcgaaaattaaaagtttaagaaatcatcacccaataccatcccaaaggctacaaacacagttgttaaaagttcaaaaaattttcccctttataagagataacattctttctttagcccttgagttaaggcaagcctactgctatacaatgaaatggtattataaagagtatttctcaagatacatcagatcgttgacgattttacaatttcaacaaatcggctctcaatttgcattagggaatggcctttccacaacttcagtgggtggatttagcaattcctcgtctctgtttttctcaaattacttaactacatctgccacaaacgctttttataataaagcatctgtcactgacgaggagattaacagatattttcagattaagaaaaggctaaccgttttgactcaagaagataatacagtcatggtttcacaaatcgccgaaaataacacaactaagaattatattgaaattggatttaaaaatttgaacttagccattctagacaattgtacagtagaatacctttttttaaaggagttttttgctataaatgatgataattctgaggaaattaatggactgttagaacaaatattccaaccaacttttgatgaagcaactgaatatacccaacaactgattcaatacaattacgatatttttggcgtactaatcagtatccgtgtggcaaatcaactgcagtttgaatccgaaagaagagatataccgtccatgtttgatagtttcttaaacggccagttgattcagttatggccccggtttcagcagttggtagatttccaatgtgaaagcttgcgtaaagtagcaatcactacaaacgtagcaaaatatggtagctcaaacgcaacaaacaatgacccattaacttcaccacatgaattagctgtacaatttggtaagtttttagtaagttttctgacattggcaataacacataaactggccattgatgaaagatctgagccattatacaattccatcattagattaagaaatgattttgaaactgtcatgacaaagtgtagcaaaaagactaaatctcccgaaaggtttttaacgacgaattacatgtatttatacaataatttacaacaattacatctacaattgaatatgactgactcgaatacgcaaaattacgatttcaattctacggagaatgttaatactgatgctatagatgagaatgaaggtaactctggggtaccgctaataatcagagagaccgagaaccacttcaaaactttagtggaggctttcactagaagttga

SEQ ID NO: 644 - DNA, 885 bp, Saccharomyces pastorianus
atggacattaatatagatgacatccttgcggagttggacaaagaaactaccgctgtagactccaccaatatcacgcagggctcttcttccactgcccacggagatgcacttacaatagtaaactcgtcactagactcaagtgtcaagactcatacatacgtttcgccccagcgggattttgccaacttaatgaagtgctggaggaacgaacggtgttcgccggagcttttggcgtatccgcatcagctaatgaaaagactgttgaaccgaatatccgcgcaatcacaattgattgagaacatatcaatggggttcctcgatatgcaaaacgcatccagtgcgaaccattccatgcccaacgactccaaactccctctgctttgcatggaaaccgaactagagagactgaagtttgttattagaagctacgtacgatgtaggctcggcaagatcgacaaattctcgctctacttacgacaactaaatgaagacgaaaactcgctgacctcccttaccgatttattgtccggtgacgaaatcaaataccacgactcgcattctcttatctggttgaaactcatcaatgattccatactgaagtacatgcctgaagagctgcaagcaattaacgacactgaagggagcgtaagcatgatagacgagccagactggaacaagttcgtcttcatacacgtgaatgggccgccagaaggccactggaacgaagacccccttctgcaggaaaacgagtttggcaagccgtgctacaccgtgacaatcccggacttgaacgaagaggtcgaactaaccattggcagtatttatgtcatgagatatgaggtgatcagggatttgttaagagacgataagatcgctcttatttga

SEQ ID NO: 645 - DNA, 2283 bp, Saccharomyces pastorianus
atgggaaataggtctttaacggaagcagaccacgcactgttgttcgagccatcgctgccgacagccgaggaccctacacaaacgcagcatcgtcttcatcctttcgtggatggcaatggatcagggttgaaggcttcaccgcaaggtcagtttggtgataaggcgttgaccagcacccaccggttcattccctcggcaaacgaggactcctcgccgcgtgatatgggccttgatccctccatgaggcgtagaagagacgagtgggcagaccgtggtgcggccaagatcatcaaagaagttgttgaccctacaacgggagagttgaccaaacatgtggtgaagatggggataaaggacttcaagttcggagagcaactgggcgatggctcgtactctagtgtcgttttggcaaccgcccgcgattcggggaagaagtacgcagtcaaagtgttaagtaaagagtacctaatacgtcaaaagaaagtcaagtacgtcaccgtggagaaactggcactgcagaagctgaatggcaccaagggcataatcaggctttttttcacctttcaggacgaggcaagcctgtattttcttctagaatacgccccccacagtgatttcttggctttgattaagaagtacgggtcgttaaacgagcaatgtgcgcgctattatgcttcgcagatcatcgatgccgttgactccttacatactatcggaatcatacacagggacatcaagcccgaaaacatattgcttgataaagacatgaaagtgaagctaacagattttggtacagccaaaattttaccggaggaaccatcgaacgacgcggacggtaagccttattttgatttgaatgcaagatcgaaatcgtttgtcggtactgccgagtatgtgtcccccgagctactaaatgatagctatacggattctcgttgtgatatttgggcttttggctgcatcctgttccaaatggtggcgggcaaaccgcctttcaaagcttctaacgagtatttgacgttccaaaaggtaatgaaggtccaatatgccttcactgcgggtttcccacaaataatcaaggacttggtcaagaagctattagtcaaagaacccaatgacagactgaccattgagcaaatcaaagcacatatatttttccagagcgtcaatttcgataacggttcagtatgggatgatgatccgccagagatacaaccatacaagataagtgcagaggcgctgaagccgctgccaaaagttcccgagccggatgccactgctaagctggccaaccagcaactcgcatataacagccacgcggaaactacaccacagacgtcagccgcgacttgtcaagatcgttctgcgatcagtatgaccgctgcaacggccgcgtttaataaagactgcacgggccaactgaagtctgggtataattccaatgcatttgttagatcttcgtccagtagcacggatcgtgaaaaggcccataagaaaaccacaaatatccatgcatctcgatcgtctccttcgattaccagtgtctccaaagggaaagagcccagaagtcggtccgctgataacttttggtcgtcctacttgaaaaatctcgacgaacacgttttgttggtgaaggatattgagctttctgtagaagccacggaaagctcagcggttgatcttgagacgcttgctccagactacaagagcccctgcgatatcgattctcctacagaaagcgccgacaaattctacaagaggatactggtgataacgaatttgggtagaggacttatttttgctaagaaaagccccaagatgcgaaaagagcgtgagttcgagctacagtttgaattgaaattaaaccaagtggaaaaaataaacctaataaatgaccaaatgttacaaatcgagggtccaaagacagttttcatggcgtgtaaagacagggcagttttgatagaggtatggaaactgatgaagagtgagatttgtgcaaagcccaaagtggcgtcctcgaaactggagcataagatgtttgataaattcatttctcaaaaagtcaaaaagacaaaagggaaaaaccaggttcctcatgtacctgaatcgagcaggttagtcaacggtcttcctggcagttgtatgacgaaggctcccgagggaggaggcagcaacttgaagcgacccgcttcgttgcagacgcgatcatcgtccaattattccaaattgcttgcaagatcaacggaaatgcggaagaacatgacacgaacaaacgaaaagtaa

SEQ ID NO: 646 - DNA, 1104 bp, Saccharomyces pastorianus
atgcgatcttccatgttcaggtgtgtgagccgtgcccactacagcacaaatgtcacagaagaattcataaacagcatcttggcaagggctcaagaagcaacggcaaaagcctcctctaatgctattaagatggatcagaagaaaggacatagagcatctaatatgaacaggagcaggaaccagaacaggaataacaggaacaacaatgaaggtaaagatatagaagggagacacggagagcgaaacatgagattaaacaaccgtgctcctaatggtgattctactcaaaacaccaacagacagaaatggaatagaagtaccacaacgtcattcatcaaggatccttccgatactacagtggtcgtacaaccacagttcaaaaaaatgcagaaccacagaaataattttaatgaaaattcaaaagtggaagatgatttacttgacgtttttaattcgtcgatggaccaaaagcaaagaccaaataatttcaataaaaacaccaaacctcaggcaaggtttcaaaagaaaagtcacattttgacggcatctaagagaagaaatgctccaaagcaacagcaagtgcaaagaccggttaagagacctgctagtactgaatatgttctgtatgagccaacgcctttatctttactagaatactcacctcaagtgtttccaactaaggaatcgaaattagtcaactatacattggatagcttgaagaagtccaattaccctgtttatagatctccaaatctaggaattcttaaaaagcatgattatactttgaatactccatattttggtaaatataccccaggatcgtcattaatttttgctaaagagcctcaattgcaaaatttgcctttgcaggaggattttgatggattggttaagcatgtaagaggcgaatatcagctcttgaagccatacgaaagaaaagattttgaaaaattaacaaaatctaaggaagttgttgataagctcgtacaaaatagccgaatcgcaaggctgtcattacaatctgttgccatagcctctgaagaaaaaaaattgatatatgatgtttgttctggaataaaaccaatttctgaattacaacaataa

SEQ ID NO: 647 - DNA, 1977 bp, Saccharomyces pastorianus
atggcaccagtaactaagaaaacaaacggaaaacgttccgctagaggagtcagtcaatcagataaaaaatcgaccaaaaagcctagaatttctatcgattcctccgatgaagaattggaactagccaaaaacgaagatgctgaactatcttcatcagatgaagatgacctagatgatctggacaagggtaaaccagaaggagagaaaaaggaggaagacaaagaggccgatgacctagatatctccgatgatgatgaagatgaagatgaagaaaaggaagggaaaagtaaaagtgaaggaggtgaaggtggtaaccatactgaacaaagaaaactgctaaaggaaagaaaaatgcaaagaagatctggtactcaagtgcaacaaattaaatctgtctgggaaagattgcgtgtgaaaactccacctttaccaaagcaaattcgtgagaaattgtccaacgaaatctgggaattatccaaggactgtatcagtgatcttgtcctaaagcatgatgcttctcgtattgttcaaaccttagtcaaatattcttccaaagaacgtcgtgagcaaatcgttgattctctaaagggtaagttctatgttctagccacatctgcatacggtaaatacttattggtcaaattactacattacggttccagaacctcaagacaagccatcataaacgagttgcatggttcactaagaaaattaatgagacatcgtgaaggtgcctatgtcgtggaagatttatttgttctttatgccacacacgaacagaaacaacaaatgatcaaagagttctggggctctgaatatgctgttttcagagaaactcacaaagacttgaccattcagaaagtttgtgaaagtagtgttgaaaagagaaatatcattgctagaaacttgataggtactattaccgcttcagttgacaaaggttctactggtttccaaattctacatgccgctatgagagaatacgtgaaaatcgctaacgaaaaagaaatttctgaaatgattgaactacttcatgaacagtttgctgaattggtccataccccagaaggttctgatgttgcctgtactttgatggctaaagctaatgccaaggaaagaaaattgattttaaagactttgaaaaaccatggtgaaaaactgattaaaaacgaacatggtaatattgttttcattacaattttaaattgtgtcgacgatactgttttagtattcaagagcttcagtcctactgttaaggataacttacaggaattcataatcgacaaattcggtagaagaccatggttgtacatactgttaggtttggacggtaaatatttctcccctattgttaagaatgaattattaagatacattgaattatccgaagccacttctaagaaagatcctttacaaagaagacacgaacttttatccaagttcgcccccatgtttttgagtaccatatcaaagaactatgctgagattttaacagagaacctgggctgtcaatttgttgcagaagttttgattaacgatgagttatacgcacaattgaatgaaaaggaccaacaaaaataccaaactgttttagacaacatcttaactacctttaagggtgacataactgaagaaacacacccaatacatagagctttctctactagattattgaaggctttaattcaaggcggtaaatggaataacaaggaaagaaaggttgaacctttgaagaatgttcaaggcttaggtgttccattcgcctacaaattatatgatgaaatcatcgattcctccaacttgttggaatggattaacaacgctgatagctcatttacaattgttgccctatacgaaactttgaaagatcaaaaggaaggaaaacaatttttgaaggacttgaaagaggttcaaagtaaaataacctctgatgaaaacaacaaaggctctcatcttttggttaaacttttgaaatag

SEQ ID NO: 648 - DNA, 1740 bp, Saccharomyces pastorianus
atgggaatccatataccgtatatcacgtccaaggcatcgccgtcgaatgacagtgatggcgacagtgtggtgctcagcaacgaccacgaatcgcctatgaagtcagttaaactgacgtccgagacgcatgaaatacaaagagcgcccgctggcgacgaggaagaccggatccagatcaagcctgtgaatgacgaggacgatacctcagtcatgattacgttcaaccagtccatttcaccctttattatcatactgacgtttgtcgcgtccatatccggatttctgttcggttacgacacaggttacatatccagtgctcttatctcgatcggcaccgatttggacaacaaggtgctgacttatggtgagaaagaaattatcaccgcggcaacatctttgggggctctaataacgagtatttttgccggtactgcggctgacatatatggtagaaagcgctgtctgatgggttctaatcttatgtttgtcatcggggcggtcgtacaagtctctgcacacactttttggcagatggccattggtagacttgtcatggggttcggtgttggtatcggctccttgatctcgccgcttttcatcagtgaaatcgctcccaagatgatcagggggagactgaccgttatcaactctttgtggttaaccggtggtcaactggtcgcttatggttgcggtgctggcttgaactacgtcaacaacggttggagaatacttgtcgggttgtctctggttcctactgccgtgcagtttacatgcctgtgctttttgccagacaccccaagatactacgtcatgaagggcgatttgaagaaagcctctgaggtcttacggagaagttacaccgatacttcggaagaaatcattgatcggaaagtggaggagctcgtcaaattgaaccattccattcctggtaaaaacgttccagaaagagtttggaatactatcaaggagttgcacacagtaccatctaaccttagagccctcgtcattggttgtgggctgcaggcaatccaacaatttactggttggaactcgctgatgtatttctccggtaccatttttgaaacggtcggtttcaaaaactcctccgcagtttccattattgtttccggtactaacttcattttcactttggttgcctttttctgcatcgataaaatcggccgtagaaccattctgctaatcggcctgccaggcatgacgatggctttggtcgtatgcgccattgcattccattacctaggtatcagtttcgatggcactagcgcagttgttgcctcaggattttcctcctggggtattgtaattattatcttcattattgtgtttgctgcattctatgcccttggtatcggtactgttccatggcaacaatcagaattgtttcctcaaaacgttagaggcgtcgggacttcgtatgcgaccgctacaaactgggctggttctctagttattgcgtctacgtttttaactatgttacagaacattactccagcaggttcctttgcctttttcgccggactttcatgcttatcagtagttttctgttatttctgttatccagaattatcaggcctggaactagaagaagtacaaactattctgaaagatgggttcaacatcaaagcatcgaaggcattggccaagaagagaaaacaacaagttgtcagagttcagcaattgaaatatgaaccaactgaagaagttatagaagatatataa

SEQ ID NO: 649 - DNA, 2241 bp, Saccharomyces pastorianus
atgaaagaaggagtctccgatgaattttcctcagatgatgatgatgacgacattctcttagaattaggcacaagacctccaagattcacccaagtgccgtcgtcatcaatagcactacaaacgcaactacctgtcattggggaaacaccaacaaccacatcgaataaaaagagcgataatgatcatgtgttggtaaatcaactaaataaagctcaaggtgaagcaagcatgcttcgtgataaaatcaactttttaaagaatgaaagagaaaaagagaaaaacactcaagttatcaaagtcaatgaattgcaagctaagcatctacaagagttggccaaactaaaacaagaattacagaaattagaagatgagaaaaagtttttacaaatggaagcaagagggaaacctaaaaaggactcctcagccttaaacgcaccaccaacgacatcgtctgcacctacaaacactatgacaccagattcatcatcagttacaatagaagcaaagaatcaatccccacagttaaaaagacgtaaaattaacgacattttacaaaaaaaatgcatagttcccctaaaccccaacaggatcatccccgatgaaacaagtttatttctagaatcactattgattcatcaaataataggtacaaacttgggaacaatagaaatactcaacagattaaaacttgaacagattgatcaatttgaatttaaaaattttgtcatctctaagggcgcacctatagggaaatcaatagtctctttgcttttacgatgtaaaaagactttgacactggacagatttatagatactttactagaagacatagccgtgctgatcaaggaaatatcatttcatccgagggagtcaaaattggctgtcccatttttagttacgctgatgcaccaaattatccaattccgtccgagtgctacacataatttggcgttaaaggatttgttcctttttatatgcgatctaataaagatctatcaacatgtattgaaaacaccatttcacgaatcgaacatgaatttgaatgtagagcctcaaatcttccagtatgagctaatagactttttgattatttcatattcctttgatctgttagagactactataagagtgttacaatcacaccctaaacaaacctatatggaatttttcgatgaaaacgtactaaattcattcgagtttgtctacaaattagcattaaccatttcatacaagccaatgataaatgtgatatttaatacagtggaagtacttaatattatttcaaatatcattttaaacatggaaaatccttcaaacctgaaatctttagtgagcagcgtttggtggagagattgtattacaaaattatattccctcttggaaagagaaattaagagcggcgatgtgtataatgaaaacgccgatactactattctccatatgtctaaatttcatgacttctttggattggttagaaatattggtggtaatgaattgggagggctaatatcaaatctgatctatgacgaccggttgcaaagtataccgagagtaatttctaaagaagacatagtgtctgataaagacaacctgaccgcgcccctaataaaatataagttagaaaaatggcttctaaaattaaaggacgaagtgttgaatatctttgagaatctattaatgatatatggagacgatacaagcataataaatggagaaatgctcatctgttcatctgagtttttatcgagggaacaagcactaatggtagaaaggtatgtaggacaagactcgcccaatttggatcttcggtgccaccttattgaacatgcattgacaataatttatacgctatggaaagaccattttgaacaactacgtgaagaacaaatcaagcaagtagaaagtcaactagtcatgtcattatggagatttctcgtatgccaaacggaaaatgtgacaacaaacgaaagagagatgaaagatcatcgacatcttgtagacagtttgcatgatctaaatataaaagaccaagtctcttattatgaagatgcttttgaagaacttccaggatatatcgaagaagagttgatgacggagttaaataagaggactgcaagaataatgcaagtgaaatacgatgaaaaatttcaagaaatggcaagaagtattctagaatcaaaatcattcgacttaactacactagaagaagccgattcattgtatatttcaatgggattgtga

SEQ ID NO: 650 - DNA, 1596 bp, Saccharomyces pastorianus
atgtcacatctgttcccaccatcatcgcctgttgccgataagccattacaaagcccccaaaaagagctaagtgtctttggaaaatcttcagtattaactcttggaagaaaacggttcaatcacccagactccgatgtagaagagtaccctactccagatccgtcttctagtattggaagattgtcgtcgccggtgaagaaccgaacttcaaatatagaggagtccaagtctacttgcactttgttatctccttcaaaaaaaatgaaccgtagtgcaaaatttatcaaggttgagttagatcccacagatccttctcgtttggcaattggtagaaagaaatcagtttgtaatgtcattttgccatgcaggaaaaatatatctaggcaacatgcgttcatttcatatgtcactggtagaaacgaaataaaattggagtgcaacggcactaatgggttatctgtccttttcccatgctccatggacttgcacttgctaaaaccctttccaacaaggaatttttacaaactaatgatggaagtgcctgcgaatttacagaattcaaatgaaacacttacaaagtctctccagaaaaacaacgacgtcagcagttttgccttagtgaaaggtgaagctgtgtcgttcccgtatatcgaaggaactctaataaactttactggcgctacagtctgtctatgcttgaaagaagtacaacattatcttgaaaattgcaacaacgattttaacgaggaaaattcaacagaaacggaagatgaactgtgtttattatcagcaaatagtgacgattttcctcggccagcaaagactccttcgatgaaactcatccccgttgcgcattcgccttgtacagaattgatctccaaaccgtcactttccgaatcaccagcctttatgaagaggtcccccataacccataaaacaacaccacagtcatctttcgttattcaacagccatgtaccccaaagaagctcaagcggaaactaacttctataaaaaacaatactgttcaggagacgccgcttcctaaagataaggttacggaaccaccaaattctcgtagtagcaatggaaatactaacgaaggcgcaaatcaccgtctttcagataattttgcggtcgaaacaagattcaccgagccactttcaaaaattactgacgaatctccttcatgtaaacgtcaaaagacattaataaataatcattccgaaatttttcaattgcttgcgaaaagaggaattcatagggacgactttgttcatatattatgcaatcatcttgctttttctaatctccaacaaactccgttatccgacttacagaacatcaattcaatcacttcgcagttgagcagaagtgaattaaaagaagtactggatactattggctgtattggtatcatcatacgtacagggaaagatgcctctggtaatgagttagaagatgagtattactatgacattgaaaatgatgataacgatgagagaaagatcttgtataattcattgaaaggcagtagtcgattaagaacatgcaggaagaagcataaacagtatttttggaaaaagccaacgaaatga

SEQ ID NO: 651 - DNA, 2448 bp, Saccharomyces pastorianus
atggacctcccaactatcaatagtacaacaagcatttccgacaatgtggatttgaaaaactactatgacgacttactgttcaaaaacaacagtggtaaatcgctatcagacttaccccgtaaactgaatggtaattccgataactcaagcaatggtgctgttgatccgctcgctggtttgaacaccttaagaaattcaataaagagtagtggaaatggtatggaaagtagaagaacttttgacgatattgattttatgaataggttttcctatccgcaacagcaaccacaccaacatcaacaacagccaccgttctctcacccaaacaggttcattcaagaacagccttccagcacactaacttcttttcaaatgtcttcttctaattcagagccaatgtcaacaccacctgtttcatccaataataatcacatgggtcctactcaaatgggcacctatcaagctcagcaacagatgtttccacaatttaacggaaatttatttcgtccaaatggaaatgaattactgaataaaggaaacctaaattttatttcaaacaacggcaacaactttgctgccccatctcatagtgccggtaacccatccgatgttaacaaccaacatcaatcacaattcaactggcagcaatcgtctcatccagaatctaccgttaggagatcatcctatatatcggatacactaataaatcatcaaatgcctgggcttcaacaaaagcaagcaccaccatcgcagcagcagcaatctcaaggttttaatccctttaatagcagatttggctatgataacttgaattctactcgtttgaatccaaaaggtgtgcccgattttggaaatggtgtaccaccccttttctcctacgataatgatgctaataccagcaacaacggcgctaacaatcacaacatgattccaagccaacaataccggcggaacacgcagcctgtggcaggcttcaatccagccccctttagctttcaacaacaatcaagaaagtcgaacttagctaaccctctaaatggggaacgcatagacgatattcaacttgttcagttacaaaggagcagttctggcccttcttcaacgaactcacataatcttgaaaacgataactccaacgaagaaaaggtttcattggacaatggcttagttttgattaagggtaaacatttaacctcttccaagactttacacgatttatatagtgactgtggtagtggttattttgctgcttctgcagtttttgaattcacggataatatgaagaaaatgttaaagttacacgattctaacgaaagtcacggcaacaaaaacatgagctcaatcgatgaagaaggtagtactcatgaatctatattgggctttttggacgttttaagaggttgtaacttgaattatatcaatgatccagaatcgaataatggtactgtttccaataacggtaaaaacagaagaaaggggtcttttacaacagatttgacatctagaaataataatagctctttcctaccatatacaccattagtgttggttgcattgaagaatgggaaactagagttactatcaactccacaagccaccaatttgctaatgaaaagaggtgatttagttatcattgatggtgatcgtgggagagatttagttttggttgttgagccatgtgtggatttgaatttggcgttgttcataaacttcctcaagaagaaaattcactttgactctctaattacaagtgaatctcaacactatcgtaacaaagagtttattcaaatgctgattgattcaaaaaggggccaaaagaaaaagttaaaccccaaattgtatgatgtggttgaattaactgaattgattattccttctaagcaagtcttacggtttgccactccgtgggaagtaactactaatctacacaataaatttgaagacgaattaaaggctctacatattgctcaaacaaaattacaagctttgaatgataattctaaatctcaaaatacaaatgatggcgctcctaacagttttccaaattccgcaaactactctaagccgaaattgaatattaagattctaaatgcagaatttcaatttgatagaaagaaattaacattctactatgtttgtgaagaaagaaatgatttcagggacttaataaaggagctattcaaatattataagacaagaatctggctatgtgctatcccaaacaatttatcgatcgattctaagtattacgataatcaacaaaaagaactgaagttgtatcaagacatagtaaaaaattataataccgaagatctaatgaatgtaaatgacttctctcaaattaggtcaaataatagaattaactttgcgcctccgcttaatgaaatccaactcgataattttcaagttgctgtttataaagaattggttcatgaattgtttcactag

SEQ ID NO: 652 - DNA, 3390 bp, Saccharomyces pastorianus
atggcagtcaatggtaacagcatccaggccataaaggacaacaccattggtccgtggaaactaggtgaaaccttgggtctaggaagcactggtaaagttcaactagctcgtaataaatctacgggccaagaggcggcagttaaagtgatatcaaaggcagtattcaattcaggtaatgtgagtggtacttccatcgttggttccactaccccagacgctttgccttacgggatagaacgtgaaataatcattatgaagttgctaaatcacccaaatgtgctgaggttgtatgatgtctgggaaacaaatacagatttgtatctcgtactcgaatacgcggaaaagggtgagttattcaacctattggtcgagagaggacctctgccagaaaatgaagctattcggttcttcaggcaaattattattggcgtttcatattgtcatgctctaggtatagtccatcgcgatttgaaaccggaaaatctattattagatcacaaatataacatcaagattgcagactttggtatggcagcactagagacagaagggaagctattagagacttcgtgcggatctcctcattatgctgcgcctgaaattgtatccggtataccatatcagggtttcgcaagtgatgtatggtcatgtggtgtgatcctattcgctcttcttaccggtaggttaccttttgatgaggaagacggaaacataagagcactgctgttgaaagttcaaaagggtgagttcgaattaccctctgacgatgagatttcccgcgaagctcaggatctgattagcaagatattaaccgttaaccctgaaagaagaatcaaagctagggatatactcaaacatccattactgcaaaaatatccaagtattagggactccaaaagtataagagacctaccaagagaagatacataccttacaccgttatcagaaagcaactcttctattgattctagcatcctacaaaacttagtaattttatggcacggaagagaccctgacggaattagggcaaaactacaagaacctggcgcgaatgccgaaaagacattatatgctctactgtatagatttaaatgcgatactcaaaaagaacttattaaacaacagcaaatcaaaaaaaggcaatcaatcagtagcgtatctatttctcctcctaagagaacatcaacgactccgcaacgcagaagaaatagagaatctataattagcgtgtcatcttctcgtaaaaagccaatttccttcaacaaattcactgcatccagtgcttcatctagcaatttgactactcctggctcttctaaacgtctttctaaaaacttttcctcaaagaagaaattatctacaattgtcaaccaatcttctccaactccctcatcacgtaataaaagggcctcaatagcaaacgttgataaaaatcaaaaaagggcttccattttttccactacaaagaagaataaaagagcatctaaatccacaaggagaatgtcactaataccaagcatgaaacgcgaatcagtgacaacaaaattaatgtcaacatacgccaagcttgcagaagatgacgattgggaatatattgaaaaagaaacaaagagaacaagttctaattttgcaactttgatagacgaaatttttgaatatgagaaatacgatcaaataagaaaggaaaaggaagagctagaacgtaaagtgaaagaagcgaaagcacgtgaagagctagaacgcagaaaacgtaaacaggaagagaaagaacgttcaagaaaaatgctagaaaaagaagaactgaaaagaaaacaggaggaattaaagaagcagattgaaattgatataagtgatttagaacatgagttgatcaaccacaaagaagaaaaatttgaagggaacatcagatcgatttctgctccgatggaaaatgaagaaaataacattaatcatttggaggctgatattgataacattcttcgtcgccgtaatttttctttacaaacacgtcctgtatcaagacttgatcctggtataatattctcgagtccaattgaacccgaggatccggtggaaccaaagaaagctgaaaatgaaagacttacaacagaaaagaaaattctcgaaactattaggagatcgaaattcctgggttcctcatttaatatcgataaagaattaaaactgtcccaaatggagtatccaaatacggctgcctcacaaagattatcggaagagaggatagtgtctgaccctgatggtaaatacgaacctttggttcttccgaaagatgcaaagggtgtagctcacttaaaggataataccgcgccaactacagcagaacttctgtctaatggtgaattgagaaaaatatccgatattagagtaccacagtttactagaaaatcaagacattttagcgagtctaacaaaaggctctctgttttgtcaatgtactccacaaaggaatcgtttacaaatttagttgatattctaaaaaacggtaacctcgatgttaacccacaacaaaatcaaagagtgccaacaccaagaagtgcagatgattcagaatttctttttgaaactgtcaatgaagaggctgaatgtaccggaaatagctcaaacgatgaaaggttatatgatatgggtgattcttgtgtcaaagacaagaacactttaaagctaaattttgccgatcgtttcaatggatccaacaatgaaaagggaaacaacaacttgcatcttccaaccctgcctccattaaacggggaagagggggcaaataagcagggggaggagaagaaggagaaggaagaacttcatgagcaagcgaaggttaagtcaatgatacctgaatcagattcttcgtcgcatgctgaaaaagaacaaaacgagaaagaagatcaacaaagagatggaaaagatttagaaccaccattgaataagaccgtacaaaagacaagagaaaagaacaatggtacacaggtcaaaaatcaatcgacggacctaaaaccaaacaagaatgcgagtggaagtggctcttttttcagaaaattttcaaaatcttctacttcggaaaaatcaatagagttatacgctaaagtttcagcaaaacaattattcattggtttagagaaattgctacgtggttggaatcaatatgggttgaagaatgtcaaatccaatccaaacaatttaacattaacaggcaaactatcaagcgaaaatatgttttctttacgttcgacactatttgaggttagtatttatccaaagggtaaggtgagtgttggggatttcaagaaaatttctggttcattcaaatctgttaaaaaattggtcaaggaagttgaaaacgtactaaataaagaaggcgtacttcaaaaatag

SEQ ID NO: 653 - DNA, 1998 bp, Saccharomyces pastorianus
atgacacttggtaacagacaccatgggcggaacaacgagggaagctcgaacactaatatgtacgggaacaactcagacggtgtttcgcattacgaaatgaaggaaatccaggcaaaggaacgagaaatcaattccacagcgccagaaaatgaggtcgagtattttgaaaacacaatggaaaagaccatggaaaatcttgaatacgagggcgaccgtaaggcgtcgcatctgcgcagatttattgactcatttagaagagccgagggctcgcacccaaactctccggactcgtctaactccattggcgatgggtctatccccatatcgacaaacgactccagttctcagttggacaacgagctgaatccaaagggttcttttgttaacgagaacgggatcaagcagccttcacaagaacaagaccaaaatcaagaaaacttgaaaaaaacgataaagcctcgtcacatcgtcatgatgtcattggggacaggtatcggtactggtttactggttggtaactccaaagttttgaacaacgcgggcccagcaggtctagttatcgggtatgccatcatgggtagttgtatttactgtatcatccaagcttgtggtgaattggccgtcatctacagtgacttgattggtggtttcaacacttacccttcatttctggtcgatcctgcgttgggattctccgtcgcttgggtttattgtttgcaatggctatgtgtttgccccttggaactggtcaccgcgtccatgaccattaagtactggaccgtgaaagtcgatccggatgtctttgttgttatcttttacgtcttgatcgttattatcaacgttttcggtgctaagggttatgcagaggcagatttcttcttcaactgttgtaagatcctgatgattatcggtttttttatccttgccattattatcgattgtggtggtgccggtacggatggttacattggcagtaaatactggcgtgatcccggtgccttccgtggtgataccggtatccagagattcaaaggtgtggtggccacatttgttaccgctgcatttgcctttggtatgagtgaacaattagccatgactgctagtgagcaatccaacccgagaaaggctatcccatcagcagctaaaaaaatgatttacagaattctgtttgtgtttttgggatctttggctctggtcggtttccttgtaccttacacttcagaccaactgttgggggcagaaggctcagccactaaggcgtctccttatgtgattgccgtagcttctcatggtgttcgtgtggtgcctcatttcatcaatgcggtcatcctattgtctgttctttccgtcgccaacggtgccttctactccagttctcgtattctgatgtctttggctaagcaaggaaatgcccccaagtgttttgattacattgatagagaaggtagaccagcagttgccatgcttgttagtgcactatttgctatcattgcattttgtgcctcttctccaaaggaggaagacgttttcacatggttgttagcaatttccggtttgtcccaacttttcacttggatcaccatttgtttgtctcatattagatttagaagaggtatgaaagcgcaaggcagatcccttggggaggtcggttacaaatctcaagttggtgtttgggggtctgcgtacgctataatcatgatggtattggctttgattgcacaattttgggttgccatttccccaatcggtggaggtggcaaattaagtgctcaatcatttttcgagaattacttggccatgccaatcttgattgctttatacttcttttacaaattttggaaaaaggattggactttgttcattcccgctgataaaatagacttggtaactgacagacaagttttcgatgaggaattattaaaacaagaagatgaagaatatcaagaaaaactaagaaatggtccatactggaaaagaattgttgatttctggtgttga

SEQ ID NO: 654 - DNA, 306 bp, Saccharomyces pastorianus
atgtcagacactgaagtcaatcaagaagccaagccagacgtcaagccagacgtcaagccggagactcacattaacctgaaggtgtctgatggctcttcagagattttcttcaagatcaagaaaaccactcccttgaggagactgatggaggctttcgccaagagacaaggtaaggaaatggactcgttaaggttcctttacgacggtatcagaatccaagccgaccagacccctgaagatctggacatggaggacaacgatatcatcgaggctcacagagaacagatcggcggtgctatctattag

SEQ ID NO: 655 - DNA, 1452 bp, Saccharomyces pastorianus
atgaatttttggacaaagtctatgaaagcatacgaagcaataggcaaaatggcttcacatagatttaactccaaagcagttcgcaattaccatcaaccacaagctttgaatagaagtttaacaacccgtaatgcagcaaaagtcagaggtatggttccttcaagaagggagggcattggatcatacaagagctcgagtaacaatttaaaaaataaactggggaaacacgtaacgtggataaatgaatttgagcattttaatgctttgcataaagtttcatattctcctaatgatttgttgagagatgaaattcaaaaatacttgaagatcttgaacacaaactaccagtcaatcagcaaaaaaagcacagaatccttaaacaagaaactggaagttgtgaacaaggaatgggttgagaaaaatggacatatacctgaagtatcgaaagatgacaaagagaaaggcttaagaaagcagtatttggcgcatgtaaataacgtcaaaaacgagcatataccgacgatggattgcaaacctggtagttctcaattcacatatctttccaatacgattgagctgttatcatccaacaaaacaatttgttttgccgttgatgtggaggctttcgagttcgatacaaatatcgttaccgagattggaatttccatatatgatccaagagaaaacaaacattctttgacaccgatcataagaagttatcatttagttgtagctgaggcattaccgctaagaaataagaaatttgtgtgtgatttcaaggactgctttttattgggagaaagtcttgttctaccattggaacagtgtgtggaatttatacaatcgttgatcaatttctacatgaaatgtgagacagatgaagatttgagttgggaaagagcttttgtaggtcacagtatatcgggggatattagatggttgaagaagattggcgttcacatacccgagttggataatgaattagacaaaccagatggttcggtggaggctagtgatctcaggaaacacataaagatgcttgatacagagaaaatctatagcatctgttacggtaaaaagggcagtagtttgggtaagctgctaagactatttcatatgccacatgccttcttacataatgcgggcaacgatgcatactacacactgctattgatgctgaagctgggagactttaattttagaaaacagattggagccgatgatttggaagcaatgggtcataggataagacaatggtttgatcgtgagaaggacgagcccaagattttacctatgtcgtatgtattaagcgtgatgaatgccaacaacgataagggaaaagcaaacgataatggaagaaagaaaataaaggacctggtcccccagacggaatttagcgggtcacaatggttccaaaacgcacgggcagcgttcaaaagtacgcttgtataa

SEQ ID NO: 656 - DNA, 1311 bp, Saccharomyces pastorianus
atgtccgctcaagggcctaatgataattcaaacgatttgcccttagtgcctgaagataagaagaaacaggcatcatctttaaagttggctccaataccaactacatcaccgtggaaatcatcttcaccaaatagcaccacgacacttcctgtggaagagttaagagacaaatcgaggctttcgaagtccaataacaacggctcaggatcgatcagattgagcagcgacacaaaatggactccaattacaccttctgttataatttcaggatctaaagaggcaaattccaattcaagacgaaaggctaaaagtgtcaaaaataatagaaagatgaaacaacatagcagcaacaacagtaatgctattaaaagagtttgcggtgatcaacccagtactgttgccgaaacgaatgatgaccccaattcagaacacaagtctaccgatgctgacttaagagcaaaagcaaatttagaccaagaagtacccattgccggtattggccagaaaacagaaaatggaaagaatacatctaatcccagacaacaaaaaaatcaccacaacaaaaatagtaaaacgaggtacaataaggcggctcatcataacaactcgttttcgaataaccattatcaatcaagatctgactatattccaaatttcggccacgattcggggcctggttacaaccaacaaacgcatttccattcacagcaatactataacaattacaactaccagcaacagttgcaaacaccatattataatctgatggaccctattctcaaatccatcgaaagcattaaaaatcaaattgaatactattttagtgcggagaacttgacaaacgataaatttttgaggtccaaattcagtaagaccaacgatgggtttatccccatgagtttaatagggaaattctatcgtatggtcaatttatctttaggtggggacccgaatctaattttggcatctatgagagaagttctgaataacggtgaaacaaaccatttggaaatagcctttggaaggaccgaaaacgcccaggtaaaaccggcatatgagttcaacccattagataactatttcatcagacctgagaattgggccgagttcacggaagaaaattccaatgaaactgatgaaactgagaagtataaaattgaaaagattttagaaataggcgatttggataatcattcatatatgggatatccgtctttttaccccagtaatgtaaatgaggaaaatagccaaactcaggatgaaaatacgatgaacagggagtttgagcaaaacttgcaaataaacaattaa

SEQ ID NO: 657 - DNA, 1503 bp, Saccharomyces pastorianus
atgtcgtttgaaaatttacacaaggtcaatgccgaggcattggaagaagccgtggtggagatctgctcctcactggacgtcgatgcagctaagctggacgaactgacagcctacttcatcgaatgcatggaaaaggggttgagcagcacttctgtgggcgaggagaagacagtggacaagggtctgcccatgattcccacgtacgtgaccagtttgcccaacgggacggagcgtggtgttctcttggctgccgatcttgggggcactcacttccgtgtgtgttctgtgaccctgaatggtgacgggacgttcgacatgcagcagttgaagtccaagatcccggaggagtacctgaacgacagggagattaccagcgaggagcttttcagctacttgggtcgccgtacaagggcgtttgtgaggaaacaccacccggagttgttgaagtccacgggggagaacatcaagcctttgaaaatggggttcaccttctcctatcccatcgaccaaacctctttgagctccggtacgttgatcagatggaccaagagtttcaagatcgaggacaccgtcggcaaggatgtggtgaggttgtatcaggagcaactggacatccaagggctctccatgatcaacgtggtggctttgactaacgacaccgtcggtactttcttgtcgcattgttacaccacagcagctcgtccttcaagcgctggtgaaatcagcgaacccgtcattggctgtatctttggtacgggtaccaatggttgttacatggaagacattgaaaacatcaagaaattaccagaagaactgagaacacggctacaacacgaggggaagacccagatgtgcattaacatcgaatgggggtctttcgacaacgagttgaagcatttatccgccaccaagtacgatatcgacatcgatcaaaaattctccccaaatccaggctaccatcttttcgaaaaaagaatttccggcatgtacttgggtgaactactgagaaacatcttagtggacttacacgcaaggggcttgatcctgggccagtaccgtacctacgaccaactgcctcatcgtttgaagaaccccttccaattatgcagtgaagttctatccagaattgaaatcgatgattccacaagcttgcgtgaaactgaattatcatttttgcaaagtttaagacttccgaccactttcgaagagcgtaaagccatccaaaacttggtccgttccattacaagaagatctgcgtacttggcgtctgtgccaattgccgctatcttaatcaaaacaaacgcattgaacaagagatatcacggtgaagtagaaatcgggttcgatggttacgtcattgaatactaccctgggttcagatccatgctaagacacgccctggcgctaagtccaattggtacagagggtgaacgtaagattcatttacgtttagctaaagatgggtctggtgtaggtgcagccttgtgtgctcttgtagcatga

SEQ ID NO: 658 - DNA, 1554 bp, Saccharomyces pastorianus
atgcaagtgaccacaagcttcatatttgctatagtctcattctgcctgtctgcctctttcacactggctcagaatgatgcaagagctacgccaggctccgatttgctcgttttgaatgaaaagaaattcaaatcgttcatcgactctcatcctttagtccttgcagaattctttgcgccatggtgcctgcattcccagatcttactgcctcatttggaagaggctgcctccatcttaaaggagcacaacgttccagtcgttcaagtcgactgtgaggctaacgacttgctttgctcgcaacaaaccataattacctatccaactttgaaaatctttaaaaatggtcacatttttgagggtcaaatctaccgtggtgccaagattactgacgacatcactcagcacatgatacaactgtacgaagcatccgtcatttatttgaattcagaagatgaaatccaaccattcttggacaattccactttacccgtggtcataagcagaggtttaacagccttgaatgaaacgtatcaagaagtgtcactggacttgaatgacgactacgttttcctatcccttttggactcaaacgataagtcgttgtcagtttacttaccaaacgccactgaacccatcctgtttgacgccgatgtgagttccttagttggaaatcctatcgccctgtctcaatggttgagggtggtcgttctaccttatttcgtcgatgtcacgcccgatcttttctccaaatacatctctagtagtttgcctttgggttactttttttatacttctaaggaagaactggatgattacactgaattttttaccgaactaggtaaggaaaatcgtggccacataaatttcattgctttggactctgctctgtatccaaatcatgtcaggttcttaaatatgaaggtgcagttccccttattcgctattcataacatgatcaacaatctgaaatatggattaccgcagctgcccgaagaagagtatttgaatctaaagaaaccacaaccattagataaagatgcgatcgttcaattggtcaaacaataccgtgaggggactgctgaaccagttgtcaagtcagaagaaattccaaaagaacaaaactccaatgtttacaaaatagtaggcgacacgcatgatgacattgttcatgatgataatagagacgttcttgtcaagtattacgcctcgtggtgtgttcacagtaagagattcgcgcccgtttacgaagagattgcagatgtttttgcctcagatgagtccattcgtgataaaatcttagtagccgaagtaaattccggcctaaacgatatcatcagctttcctgtcacgggatacccaactattgctctctaccctgcaggaaataactccaaacctgttgttttcaacaaaattagaaatttggaagacgtgtttgaattcgttaaggaagcaggtacccatcatattgacggtcaagcaatctataatgaacttcacaaagcagaagattccgaaaacgttaaagaagatacagtgcatgacgaactgtag

SEQ ID NO: 659 - DNA, 408 bp, Saccharomyces pastorianus
atgttatccaatatataccttttcttcactttttttgccgcagttttagctggctctttaacggatttggaaatcggtgtcactaaaagaatacccgtggaagaatgtcaaatcaaggcaatgccaggtgataaggttgaagttcattacactggttccttattggaatcaggtacagtatttgactcaagttacccaaggggttcccccattgcttttgaactaggtgttggcagagttattaaaggctgggatcaaggtgttgctggtatgtgcattggcgaaaaaagaaaactgcaaattccaagctctttggcttatggtgaaaggggtgttcctggtgccatccctccaagcgctgatttggtgttcgacgttgaattggtgagtgtgaaaccagccgcttaa

SEQ ID NO: 660 - DNA, 1437 bp, Saccharomyces pastorianus
atggatcattacagcactaataccaatcgaaatgtcgtgtccttgtccatcgaaggtatggcagcagcaacactagcaacaccgcatcactttttatggtacaacaacacgcaaaagctaactaatattcttcttaaatctctacgatgtaaactactaaagaaacgctacgagacggattggggttccgacgtgtgtcgtattatcgtaaaaagcatcgcttcattaataaccgcgaaagaaatattggtattgctacagttacctctttccttacctccaaaattcccacgtcatccagcccaactgtcattcacacacctctcatctggccttggtgggaatcagcagaaaaccacgcattctcatcatttttatcatcgtactcgtcgcgttcacagtgatggtaacagtaaaagtcgcatgccatcaaagactgagtcgtccaaacaacatactcagcacatttctttcaccaatacgggaccttccaacaaggatgagctattgacaatcgttcgcaatcttgataagtcaaatctgaaatgctgtgattgtaatagcactgcaaccgtggagtgggtttcaatcaatttattatgcatattatgtatcaaatgttcaggcgtgcatagatctttaggctctcacatctctaaagttagatccttaacactagacaatttcacctcgatagaactaatacatcttttacaaaacaatgtctctaatagtaacatcaatgccatttacgaaagcaatctccacaatctatcgacaaagaaaataacatccaactccacggacttggaaagatcgagatacattattaataaataccaatttaaaaaatttgttatcgatagcaaccaggacaaagaaacttccttaaagtctctgatcaaggctatccatttagatagcatcttcatgatgcaaagagctattgcgcaaagcaagcattctttaagagaattaacgacaagcgaaaaagagcagaacgacttgaaccatccatccattttccagtactctttaaaacattacgaaattattaacggaatcccgatattcttcattacagagtatttattatgcaacggcatttatatagatgaactacccaagatcactacaaattggtctccaaaagtattagaatattgggagaccaaactagaaatgtacggaaatttccaagccgccactgctcgcccacaatcaggtccacatttaaatactccttctagcacgccttgcacagctgctcataataagaaacaaaatttgaaagtgaatatacctgaacgtagtgcttccgcaagtaagagatggagtttgagttccattcctaaatcttctcaaaatttaatttccccgacaaatttactatcaatgcacaagtctttaaaattggccaaaaaggacaaaaaatag

SEQ ID NO: 661 - DNA, 204 bp, Saccharomyces pastorianus
atgcaattcaagaccatcgtcgctgccttcgctactgttgccgctgtccaagccgctaacgtttctaccaacggttctaccaacggttctaacggctccaactccaccagcaccaagatctccaccggtgctgctgcttccaacgctttgggtgctggtgtcttcggtgctgccgtcgctgccggtgtcgctttcttattctaa

SEQ ID NO: 662 - DNA, 243 bp, Saccharomyces pastorianus
atgcacgcccgcgattggttattggtcttcattgcaattttcgtccccccattagcagtctggctgaagagagggttcttctctaaggatctgctcattaatttcctgctgtttttgctgggattcttccctggtttgatccatgccatgtacgtgattagctgccacccatacgaggaaaacgaggcctctgggtactcgcacctatcttccactgacgataactatggtagtttagcatag

SEQ ID NO: 663 - DNA, 1317 bp, Saccharomyces pastorianus
atggatctattgggtgatatagtagaaaaagatactttaaacgtagtcgaaagcaacgacaatgatgctcctatggccagcaactccaagacgggattccctgaattgtacagaccccaaaaaatatcttcctggaaagaaagattaagagagaaaagagctcaaaggaaggactctggggctaaagaggctaaaaaacaacaagtggccactgctgctccgcgatccgaggcaaaatccattcatgaagaaaatatcaaagtcttgcaggagatgaccgatgagcaaataatgaacgaacgccaggacctgtatgattcgttggatcctaaattgattgccaatcttctgaaaaacataaacaagagagctaaagacgaaaccgatactccattatttgcggaaatagaaggtgcgtctggcacctgggtcggtggcaataagcaaggcattaataatctaccgcctttggaagacgaagacgtggatgctgctttagatatcagacctaaatctagtacgaacgcaaagcacgttgcatttgaagaagaggaagaagaagaggaagaagaagaagaagaaaacgataacgatgccgatgatgttgcgcctttggatttccaaatggcacaaagcattgaccacatgaaaaacgaagatcttttcaaagacgttcatttcataaaggaagagaagcaaaacgaaatagatttggagaaactagacatcaatgaccctgatttcaatgacaaactgcacgataagtacttcccggatctgcccaaagaggtcaataaactgaaatggatgcagcctatccgccaggaggaaaacaaaactcgcattatcgaagacgttttcgagtgtaggttcgattttagcggtaatcttgttccacccacaagacaaatagaatctaccgttcattccggcttgcaccatcatagcgactcgcccgaactggctggttacaccatagtcgagctagaacatttagcaagatctactttcgcatctcaaaggtgtattgccatacaaaccctggggagaatcctttacaaactaggccaaaagagctactaccaactagtgccggagatcgatgcagagacatacaaagaagatgggagtatatccaacgttatggataagatttattccatgttttgggatttgattatagatggcaaaatcattgaatcactggaaattgcctcggatgaaaaatatactagaaatctatcagtaagaaattatgctattgacgcactttggctatggaaacaaggcggcggatactttagagtcaagaaatag

SEQ ID NO: 664 - DNA, 384 bp, Saccharomyces pastorianus
atgccacaatcatttacgtccattgtgaaaattggtgattacattttaaagtcacccctcctatctaaactatgtgtccctgtagccagccaatttgtgaacttttcgggctacaagaaactagggctcagatatgatgacttaatcgcagaggaaaatcctgtcatgcaaactgccctaagaaggttgcctgaagacgaatcatatgccaggtcgtataggataatcagagctcatcaaaccgagttgacccatcatttgctaccaagaaacgagtggatcaaggctcaagaagacgttccttacttgttgccttatatactagaggcagaggctgcggcgaaggaaagggacgaattggataacatagagatctccaaataa

SEQ ID NO: 665 - DNA, 714 bp, Saccharomyces pastorianus
atgtctccaaataaagtattactagcactcacttcatataacgatgtcttctatagcgacggctccaagaccggtgtcttcgcagtggaagctttgcatcctttcaatactttcacgaatgaaggtcttgaagttgactttgtatctgaaactggtaagtttggttgggatgaacattccttggctaaggaagccctagacggccaagataagattgatttcgaaaataagagttccaatttcaataaggcactggcaaaaatcaagactccaaaggagatcaatgcagatgactaccagatattctttgcatctgccggccacggtactttgttcgattacccaaaggccaaagacctgcaagatattgcatccgatatctacgctaacggaggtgttgttgcggctgtttgccacggtcctgctattttcgatggcttaacgaataaaagtacaggtaagccattgattgaaggtaaatcaataactggtttcaccgatgtgggtgaaaccgttttgggcttggacagtattttgaaggctaagggcttggcgacagttgaagatattgctaagaagtatggtgcgaagtatttggctccggttggtccttgggatgattactccattactgacggaaaactggtcactggtgtcaacccggcctctgctcattccactgctgttagatccatcaaggctttagaaaattag

SEQ ID NO: 666 - DNA, 1491 bp, Saccharomyces pastorianus
atgactgtagcacaacctgttgctcacctaactgctgaggaatacccaaaagtcaagagaactgttgattttaagattctagatcctactgatttgtcatatttccattctattttgtcaaacgatgaaatattagaatcgaagaatcctggagaccttgtttccttcaaccaggattggatgaaaaagtacagaggccaatccaatttaattctcttgccaaattctactgaaaaagtctcgaaaatcatgaagtattgtaacgaaaaaaaactggcagttgtaccacaaggtggtaatactgacttagtaggtgcctcagttccagtttttgatgagattgttctttctttgaggaatatgaacaaaattagggactttgatcccgttagtggggcttttaagtgtgacgcaggtgtcgttatgcgcgacgcacatcaatttttgcacgaacacgaccatatctttccattagatttgccttcaagaaataactgtcacgtaggaggtgtagtctcaacgaatgccggtggtttaaacttgttaagatacggttccctacatggtaatgttttaggtttagaggtagtcctacccaatggtgaaattattagcaatatcaatgcattaagaaaggacaataccggttacgatttaaaacaattattcatcggtgcggaaggtactattggtgtcattactggtgtatctatccttgcggcagcaaaacctaaagctttgaatgccgtttttttcggtcttgattgttttgatactgtacaaaaattatttgtcaaggcaaagggtgaattatcggagattttatctgcttttgaattcatggatcgcggttccattgaatgcaccatagagtacttgaaggacatgccatttcctttgaagaatgaacacaacttttatgttctcattgagacctcaggttctaataagaagcacgatgacgaaaaactgagcggtttccttgaagagactctgaactcaaagctgatctcagagggagtaatggctaaagacagagctgattatgatagactttggacttggagaaaatctgttccaacagcttgtaactcctacggtggtatgtacaaatatgacatgtcccttcagttgaaggatttatattcagtatcagaagccgtgacagaaaggttgaatgcagctggtttgattggtgacgcaccaaaaccaattgttaaatcttgtgggtacggtcatgtaggtgatggaaatattcatttgaatatcgcggtaagagaattcacaaagcaaattgaaaacttacttgaaccatttgtttatgagtatatccaatcaaagaagggttccatcagtgctgagcacggtgttggcttccataaaaaaggaaaattacattattgcaggagtgacattgaaataagatttatgaaagatatcaagcatcactatgatcccaacggaattttgaatccttataaatacctctga

SEQ ID NO: 667 - DNA, 1884 bp, Saccharomyces pastorianus
atggacccaactactgtcaatagggtgctttccgaagaattcacagaggttgccgttcccgaaattctggaaaaggaagctggtgcgactactgccgttggccctgcgttgaccacatcttccccggctccctcttacattgaattgatcgacccgggtgtacgtaacattgaaatttacgcagaacagtacagccgtcctctataccgtgtcggcttgttcttctcacttttccttattgcctatgcttacgggttagatggcagtgtccgttacactttccaggcgtatgctacttcttcgtactctaagcactccctattgtcaactgtcaattgtattaaaactgttattgctgcggtaggtcaaatcttttttgcaagactatctgatatttttggcagattctccatactgattatcagtgtcatcttttatattgtggggacgatcattgaatcacaagcagtgacgatcactagattcgctgttggtggctgcttttaccaattgggtcttaccggtgtcattttgattctggaggttattgcctcagatttttccaatttgaactggagattgctagctttatttgttcccgctttgccatttatcattaacacctggatcagtggggacgtaacaagcgctataggcagtaactggaaatggggtatcggtatgtgggctttcattttgcctttaacttgtattccattgggtctctgtatgttgcacatgagatatttggcaagaaaacatgcaaaagataaattgagacccgaatttggaaccttgaataaactagactggaagtccttctgcgttgacatagttttctggaaattggacttaattggccttttgctagtgactgcattcttcggatgtgtgttggttccatttaccttagccggtggcttaaatgaagaatggaaagctgctcacattattgtacctgaagtcatcggttgggtagtggcgttaccactatatatgttatgggaaattaattattcaaggcatccattaacaccatgggatttaattaaagacagaggggttttctttgccttgtttattgctttcttcattaattttaattggtacatgcaaggtgactatatgtatactgtgctagtcgtctctgttcatgaatccgtcaagtcagccacgagaatcacctccttgtactcatttgtttctgttattgttggtacaatccttggaattatattaattaaggtgagaagaactaagcccttcatcatattcggtatttcttgttggattgtttcattcggtcttttggtccattaccgcggtgactcaggcgcacattcaggtataattggttctttatgcctattaggttttggtgcaggttcatttacctatgtgacacaggcttccattcaagcttctgctggaactcacgcgagaatggcggtagtaacttcattgtacttggctacctataatattggttctgcattcggcagttctgttagcggtgctgtctggaccaatattttaccaaaggaaatctcaaagagaattgctgatcccacgttggctgcaacagcgtacggctcgcctttcgaatttattaccacttacacatggggtacaccagaaagaattgctttggtcatgtcttatcgttatgttcaaaagatcttatgtatcataggtttggcattctgtttccccttattaggctgtggattcatgttgagaaatcacaaattaacagatactattgcgcttgaaggcaacgatttcttggagagcaaagacaataatgaaattgaggaaaaggaagagacttccctaaaaactagatttttggcccagttcacaagtaaagtgaaagaaaattag

SEQ ID NO: 668 - DNA, 1452 bp, Saccharomyces pastorianus
atgaatgaattgggcgagtacagtaaactagaaagcaaggagcttagaacggagtttgaattgacagacttcccttttcctggcataactgacaacgactcggatgacgggagtcaaggaaaggactccccaaatatcatctaccctattacttctgatacggatgatcagttagtcaatagtatgcttcgggaaaatgatagaaaatctagcatgagaatggcttttatgaatttagccaattccatcctgggcgctggaataattactcagccgtttgcgatcaaaaatgctggtataattggcgggctgatatcatacatagcactcgggtttattgtcgattggacattgaggcttattgtcattaatttaactcttgctggcaagagaacatatcagggtacagtcgaatatgttatgggtaagaaaggaaaattactaatccttttcacaaatggactatttgccttcggcgggtgtattggttattgcattatcattggggataccataccccacgttcttagagccatgtttagtcagaacgatggcgaagtacatttctggcttagaaggagcgttatcataatcatggttactatcttcatttcctttccgttatctttgaaaagaaatatagaggccctatcaaaggcatcttttttggccgtcattagtatgatcgtgattgttctcacagtcgttatcaggggtcctatgctaccatacgattggaaaggtcatacccttaaactatcagacattttcataaaaaaaaccatcttcagaagtctgtctgtcatttcctttgcgttggtttgccaccacaacacaagttttattttcttttccatgaggaatagaagcgtagcaaagtttaccaaattgacacatattagtataattatttcggtaatatgctgcggcttaatgggttattcaggatttgctgcttttaaggagaaaacaaagggcaatgttttgaatagtttcccaggaacagatgcagctatcaacatagctagactgtgctttgggtttaacatgttaaccacttttccgatggaaatctttgttttacgagatgttgttggcaatttgttacatgaatgtcaccttattaaaaattatgacgagcacactcaattatcaggcaagcagcacacaataataacttcgatactggtctttattaccatgggcatatcattaactacctgtaacttgggtgcgttatttgaactaattggagctactacggcatccacaatggcttacattttaccgccatatacaaacctattgctaacgagtaaaaagaaaaattggaaggcgaaacttccatactacttttgcatttgttttggttttatgattatgattgtcagcagcactcaaactattttagatgctgtcaatagccccaatgggcagcactgtcagatatag

SEQ ID NO: 669 - DNA, 1815 bp, Saccharomyces pastorianus
atgaagttagaaaacactctatttactctcggtgccctaggaggcatctccgctgctctggttatccccaatcttgaggataccgccgaccatcgcgagctgatgggcaaggaggaacacgatagccccagacacgctgagtttgccgacggcaacgacagacatgacgaaaaacctccacacaagaagggccgcaaggagagaaagaacgcggaatctatcgaggacagctccgacgacgaggacaagccccaccgcaagggcggctgccacggtaagaaggacaagaaggacaagaaagacaaaaaagccaaggacaagaaacaccacggcaagaaacttgcaaagggtgagaaacaccacggcaaggagcaccacagcaggctggctcccttggtgtccgctgagcagttcaacccggacgccatctccaagatcattcctaaccgctacattatcgtcttcaaaaaggacgtttcttcggaacaggccgctttccacagggaaaccgtccaccaagcgcaattgcaatccgtagagaacttggccgccgaggatgcctttttcatgtccactagagactccgccttgtccacctccgagaccggcggaatccaggactccttcaacatcgacagcctgttttccggctacatcggctacttcacccaggaaattgtcgacttgatccgccaaaaccctctagtcgactttgttgaaaaggactccgtcgtagaagccaccgacttcgacactcaaaacagcgccccttgggggctggcccgtgtttcccacagggagcgcctgaaccttggttctttcaacaagtacctctacgacgacgacgccggccgcggcgtcacctcctacgtcattgacaccggtgtcaatgtcaaccacaaggacttcgaaaagagagccatttgggggaagaccatcccactcaacgacgaagaccttgacggcaacgggcacggtacccattgtgccggtaccatcgcctccaagcactacggtgtcgccaagaacgccaacgttgtcgccgtcaaagttctgagatcaaacgggtccggtaccatgtccgatgtccttaagggtgtcgaatacgctgccaaggctcatcaaaagcaagccgaggaaaagaagaagggcttcaagggctccaccgccaacatgtcgcttggtggtggtaagtcccccgctttggacctggccgtcaacgccgcagtcgaagccggtatccacttcgccgtcgccgccggtaacgaaaaccaagacgcctgtaacacctctccagcctctgctgacaaggccatcaccgtcggtgcctccactctgagcgacgacagagcctacttctccaactggggtaagtgtgtcgacgttttcgcccccggtttgaacattttgtccacatacatcggcagtgacgaggccaccgctactttgtctggtacctccatggcctctcctcacgttgctggtctgttgacatacttcttgtcgttgcaaccaggttccgacagtgagttcttcgaatcgggccagaaatctttgacccctcaacaattgaagaagaagttgatctattacagtaccaaggacatcttgttcgacatccccgatgacactccaaacgctttgatctacaacggtggtggccaagacttgtccgccttctggaacgacaccaaaaagtctcactcgtcttccggtttcaaacaagaattgaacatggacgagttcatcggttcgaagactgatttgatctttgaccaagtaagagatgttcttgataaattgaatatcatttaa

SEQ ID NO: 670 - DNA, 225 bp, Saccharomyces pastorianus
atggcgccaccaaccacaattcgcggcagagaccaggcgctggctccactggccacacccgactcccacactcactgccacctgaaagagctcgtgcagtgggagtgccagttcaagggagcagactacatctgctcgcccttcaaacggctctttgagcattgcacggcacccggtaaagcggccaccaactacgaggtcaccgatacatacaccaacagctag

SEQ ID NO: 671 - DNA, 702 bp, Saccharomyces pastorianus
atggcaaatggcgggatccagaaaaatgacggtacaacaggttctaaaacagtacagttttggacttattcaagggaaattgacatcatcatgaaaaagatatcgtttctggaaaggaacataaccagacaactggacactctcccacatttcccaaagactttgccgccaaatcacgaaacacacataaacagaacgaggagggcgaaggggagttggagtactcagctgaaaaacttattagggatttactccagggacgaaatctccactttggacaatttagctgcaacgcttcatgaccaagttttgaaactgcaaactaagctgttcccagttgccatactaaaacaggtccatcttaataaggacaacgtagaaaaccaaaaaatcctaaaagagattacatacgagtacctttccaagaaaaactgcccacgggagagtaaatttggcgcgttcatcgtcaaaaggatttttttcggtgatctatctcttggggtttccatattggtcaaccgaacagcttttgagacagttcaatcgtccactgtagtggtgagaagttcttttattgaaaatgatttcctttacgaagactacttgatatggggttgtagaatgaaaagacgaaagaaattcaaaaggaaaatcttatttatttctactacaataaatttcaattatcaaactaaagtttaa

SEQ ID NO: 672 - DNA, 1206 bp, Saccharomyces pastorianus
atggaaactcaagaaaagccactttccgtggatgaggagtacgatttatggaaatccaatgtgccattaatgtatgattttgttagcgaaacgcgtttaacgtggccatctttaaccgtccaatggctccctacacctgtgcaagaaccagaaatgggctttatcaaacaggaattaattattggtacgcatacgtccggtgaagaggagaattatctaaaatttgcagaaatcaaccttcctgaggaaatcttgaacaatgaagatccacaagaagaagccgaagaggacgatgaggcctctgttcccgctcccagatcgaacatcaaaatcatcactaagtacaagcacgaagaagaaatcaccagagcccgatatatgccccagaaccctgacactgtggctaccataaacggacagggtacagttttcatatattctcgctcagagggccttcaatctacactgaaatttcacaaagataacgggtatgctttgtcgtttagccctctagtcaagggtcaattgttatccggttcagacgatcataccgtcgccctatgggatgtgaatggtagcagtgattcaacaagaccaatacgaacttggagtgatttgcattctgatattgttaatgacagtaaatggcataatttcaataaagatatattcggtactgtttcagaagattttcttttgaaaatcaatgacctgagggtagaaaataccactactggtactacgaagtgttcacaaccttttaatgcattagcgtttagtcatcactcttcaaatcttttggcggctgcaggtacagactcacatgtttatttatatgacttaagaaatatgaaagaaccattgcaccatatgtcaggccatgaagacgcggtgactaatttagaattttcaccccatgtggatggcgtggtcgtttctagtggttccgataataggttgatcatgtgggatctgaaacaaattggtgcagagcaaactcctgacgatgcagaggacggtgttcctgaattaatcatggtccacgcaggtcataaaagtgccgtgaatgattttgatttgaacgcacaaataccctggttggtggcaagtactgaagaagagaatattttacaagtttggaagtgctcgcatagtttaccagttgtagggggtccgccaaaagtaagcatggacatgattagttaa

SEQ ID NO: 673 - DNA, 498 bp, Saccharomyces pastorianus
atgcctccaaagtttgatcctaatgaagttaaatacttatacctaagagccgttggtggtgaagttggtgcttccgctgctttggctccaaagatcggtcctttaggtctatctccaaagaaggtcggtgaagacatcgccaaggccaccaaggaattcaaaggtatcaaggttaccgtccaattgaaaattcaaaacagacaagctgccgcctctgttgtcccatctgcttcctctttggtcatcaccgccttgaaggaaccaccaagagacagaaagaaggacaagaacgtcaagcacagtggtaacatccaattggatgacatcattgaaattgctagacaaatgaaagacaaatctttcggtagaactttggcttctgttactaaggaaatcttaggtactgctcaatccgtcggctgtcgtgttgacttcaagaatcctcatgatatcattgaaggcatcaatgctggtgaaatcgaaattccagaaaattag

SEQ ID NO: 674 - DNA, 783 bp, Saccharomyces pastorianus
atgtccggtaatagagagcaagtctttcctacacgtatgacgttgggtttgatgaagattaagttaaaaggtgctaaccaaggttattctttattaaaacgtaagtctgaagcgctaacaaagaggttcagagacatcaccaagagaattgacgatgccaaacaaaagatggggagagtcatgcaaactgctgcgttctcattagccgaagtttcctacgcaacaggtgaaaacattggatatcaagtccaagaaagtgtttctaccgcaagattcaaagtgagagcacgccaggaaaatgtgagtggtgtttacttgtcccaatttgaatcttacattgaccctgaaatcaatgatttcagattgactgggttaggtagaggtggtcaacaagtccaacgagccaaggaaatttattcaagagccgttgaaaccttagttgaattggcttctctacagactgcgttcatcattttggatgaggtgattaaagtgacgaacagaagagtcaatgctatcgaacatgttatcattccaagaactgaaaatacaattgcttacattaatagtgaattggatgaattagatagagaagaattttatagattgaagaaagttcaggaaaagaagcaaaatgagactgcaagactagatgctgagatgaaattgaaaagagagaaggcagaacaggaaggctcagaggaagctggtgaaaatcacgctgatgaagagcctcaaggtgaaacattggttgccgatcaagaagatgatgttatattctga

SEQ ID NO: 675 - DNA, 1182 bp, Saccharomyces pastorianus
atgttggtactagggtctcttaggtcggtgctgtggtccagttccacagcgtcgcttattgggaagaagagcccttgttatacatatggtattttataccgaggtttctctcaaagtgttaaaacgtggcaagaaaatgtgttgaaagacgagtccagcttgaatcttactccacggttgttgaagattgttcctaatgatacggatatcgtgacccttgagaagcaggatgaattaatcaaaagacgtcgtaaactttcgaaggaagtcactcaaatgaagaaactgaaaccggtttcacctggtttaagatggtatcgctcccccatctatccatacttgtataaaggtcgtcctgtgagagctctgactattgttcggaagaagcacggtggtaggaataattcagggaagattaccgtccgccatcaaggtggtggccataaaaatagaacgaggttggtagatttcaacagatgggaaagtgggtctcaaacagttcaacgaatcgaatacgatccaggcagatcctctcatatcgcgctactgaaacatagtgcgactggcgaattatcttatattgttgcttgtgatggtttacgtccaggcgatattgtcgaatcgtacaggaaaggtattcctcaaactttattagatgaaatgggtgggaaggtcgatcctgctatcttgagtgtcaaaactacgcagagaggtaactgtttacctatctctatgattcctatcggtactattgttcataacgtcggtataacacccgttggacctgctaaattctgccgttctgcaggtacatatgctagagttcttgcgaaactgcctgagaaaaagaaagccgttgttaggctacaaagtggtgagcatcgttatgtctctttggaagccattgctaccgttggtgtggtctccaacattgaccaccagaacaggtctctcggtaaagccggtagatcaagatggttaggaataaggcccaccgtcagaggtgttgccatgaacaagtgtgaccatcctcatggtggtggtcgtggtaaatctaagtctaacaaattgtcaatgtctccttggggacaattggcaaaaggctacaagactagaagaggtaagaatcaaaatacaatgaaagtgaaagacagaccaagaggaaaagacaagagattataa

SEQ ID NO: 676 - DNA, 459 bp, Saccharomyces pastorianus
atgagtctaattccctgcttcgtatcattgatagacgaacttgataaacctatactgatttatgttcccaatgagaccgaaaatgagttgaatgatgttctgaagtataacgtcctttctaatatatcattggactattttgagagccctctaattacctggacttccttggattccaaacctttgttaaaatcgatcttccaattggaaggcgcctctgtatttggcatgttaatcaaacagacagggttgaagatcgtcattgggtttgaacagaatgccttgaatggtggtgatgatgaattgaagcaaattggccaaatcttcgaatccgtcagaaaaatttacgtacgggttaagtgtaatccattagttaccaatggcgacgaaatctctaccgtggaaagtctggaaaggaaattcgatgaattattcatctcaactgaagttgagttatga

SEQ ID NO: 677 - DNA, 1164 bp, Saccharomyces pastorianus
atgactgaatttgaattgcctcctacctattcctccgccgccaacgacttgcggtcggacactttcaccactccaacgccagagatgatgcaggttgccctagaggcgtccatcggggacgccgtctacggtgaagacgttgacactgtcaggctcgagcagacggtcgcccgccttgccggtaaggaagcaggtctgttctgcgtctccggtacgctttccaaccaaatcggtatcagaactcacttgatgcagcccccatactccgttctgtgcgactacagggcccacgtttacacgcacgaggccgcaggtcttgccattctgtctcaagccatggtcgtccccgtgatcccttccaacggtgactacatgaccttggacgacatcaaggcccactacgtccctgacgacggtgacatccacggtgcccccactagactgatctctttggaaaacaccttgcacggtatcgtctacccattggaagagctggtccgcatcaaagcctggtgtatggagaacgggctcaagctgcactgtgacggtgccagaatctggaacgccgctgcgcaagccggcgtcccattgaaacagtacggagaaatattcgactccatctccatctgtctgtccaagtccatgggtgctcctatcgggtccgtcttggtcgggaacctcaagtttatcaaaaaggccactcacttcagaaaacaacaaggtggtggtatcagacagtctggtatgatggccagaatggccctgtacaaaatcgacggtgactggaaggcccaactgctgtactctcactcgctcgcccacgagctggcccgtttctgtagcgacaaaggcatcccgctagagtcccccgcagacaccaacttcgtcttcctagacctaaagtccgccagaatggaccctgacgtccttgtcaagaagggtctaaagtacaacgtcaagctaatgggtggcagagtatccttccactaccagatcactagagacactctagaaaaagttaagctggccatctctgaggccttcgattatgcaaaggagcatcccttcgattccaacggtcctaccaagatttaccgtagtgaatccaccgaagtcgacgtggatggcaatgccattcacgaaataaaaacttacaagtactga

SEQ ID NO: 678 - DNA, 2928 bp, Saccharomyces pastorianus
atgtcagtctctgtaattaccacggttttagcatgtctgtggctgtcttatagactctacaagtttctcaccatacccgtggccagcatcgtctccactttgaagatcaagattccgccagcgacgaaggtctctatcgacaaaattgccaccgattcgctgactattcactgggagaatgagcctgtcaaggcggagaacggcggggtcggagcccgaaacttcatctcccactacctgctgtacttgaacaatacgcagctggccatctttccgaacaacccgaactcgctctacacgtgctgctccatcacgggactcgaggcagaaacgcagtaccaactggacttcattaccatcaacaacaagggtttcatcaacaagctgccctccatctactgcatgaccaaggcgagagaggccaatgagacgctaaagacaagaaaatggagaaggaacaccgtcaccgcgtccacggctatccagcccccgaacttaaaggccgacttgtcctcgttgacatctcactgctcctccgtgtctctttccgcctttgcgtccaacaacaccggtagcagcacgagcaacagctcgcccctacccgcctacacatccttgaccacgctaaaagacttggactcgttttccatagacgacttgaaaaaaatcttgatatgtgcccaggaagatctgcacgatgtgttgtcccaacaaacttcgctcttgcaagacttccaggagtctaaggtggagctagaactagaactggataacctgaaaacccactggtcgcatgagatcgatttgaggaagtctttgaagtccaacatcaagtcgctggaaaactctaaactcttgacagatctgaaaattgaaaaactaagcaagaaaatcgataagtccagggaaaaaatatcgaaaatgcgcaacgacatgcaagattggtctcaagaagacgccgaacttttgtcgcaagacactataaaggagaagtacctcagactactaaacgaagcaaatgcttctgtggccaaggtcaaccaacaggttctttctttgcaaaaagaaatctccaacatggaggagtctaacaagaaattgaatgccactcggaaatcgctagtaacgtccatagtagtgaacgccaatgtcgaaaatgacaaacccattgccagcggagaactatctgctgtattgaaaaaactccttgattttactcaagagaaaaatggtttttcaagtacttctggtgaagaattcttatccaaattaaatgcagactcgtcattgattagactgatcaagcaagaattaagcatcgaccaagattcggaaacgaactggaaatcacaaaggtcaaatttcctaaagaaaatcagtatcttggaaaaccaattcaatgaaaggagcctcaacaacagaacactcaaaacaaaactgatggttcaaccatacaacaataacggcgattcgctcgtggcaaccaattcaaacaactccaccgaaaacaacagaagttccgcatcggccacattaccattatccaacagcatgtcaagaactgggtcaatagatttgatatccaataaaaacattataaacggaactagcaacggagacacggccccacaattgagattacacaatccggcatcctacccaccttcaaacgagcctacacaaccgccaggtagtctactgagccaattgacacaggacactggaaacagatcgatgctttcgaaccagatgtccccaaatagcgaaaatcaacaaccctcttccttttcgcatgctttacctacgacggctaccgttattgccaatgccacagcaacgaacggtaatttcgagtcaaatttatggaataacacacagttcgcccaaccgtcgcatcaacaagaatccgcggaactcgatcgagccttcgaatacgataacgcaaatcatttgatcagtggcctgcaaaatatgatctacgatgaagcagactatccagataacataagcaattattccagggggttcactaccgacgagctggacaattactggaccaaacagcaaccgcaaactcgcaacacgagggagaactcattctctacatcgggaacacccatgtcatcatacaaggccaatcctgtaatgtcgccatattcaaactcacacctaaggcaaaactccaacgctaccaactcgatgcacccacaaagtctattggctgcaacattgaatgatgcttcattgcgaagttttgtacgcggtggctctttttacaatgctcctcaaccaggaaccccattgcataacaatgtaaatggtaatgaaacgggaaacctcagtccgagagtctcgaacgaattcagtatgttagtaccaaatcttagtccacggcgctcacacgacgttcccattataccaggaaacaacaactcaacaccctctcattcgaacattttaacaatgaaccatcaaacaacgacagacagcaacacgttgttgagcagattgaatggagcagataaccagactgatctgagctcagtgtctgcagagcacactgcaggaagatcgttccatgcctcatcacccacgtttaactccatttggaacccaactacaaatcagccttcactaccactcgaacaagaacacaacttcgatgtgcctgtaactccaaaggtgccaacaaaggtgccaacaaaggactctcccaaaccttcgcacaagagaaatcaaagcaatagcagtatctcgtcagcctggtctaagttcaagcacaagtcagcatcgtcttccggtaatgccgatgcggatatcttagattcatcaactccaccaaccagtccaaccggcagaagaatgtcgaaactactgtccaaaagtggcatgaataacctgtttaaaccacacagtcatgactcatga

SEQ ID NO: 679 - DNA, 342 bp, Saccharomyces pastorianus
atggctaaagaaagtgcagaattcaaaccaggttctggaaagaaaggtgcaactctatttaaaaccagatgtcaacaatgccacacaatagaagaggggggtcccaataaagtgggtcctaatctgcatggtatctttggcagacactctggtcaagtgaagggctactcatacacggatgcaaatatcaaaaagaacgttcaatgggatgagaacaacatgtccgagtacttgactaacccaaagaaatatattcctggtaccaagatggcctttgccgggttgaaaaaggaaaaagacagaaatgatttgattacttatatgacgaaagccgccaaataa

SEQ ID NO: 680 - DNA, 1206 bp, Saccharomyces pastorianus
atggttagtttaacttttaaaaatttcaaaaaggagaaagtccctctggatttggaaccttcaaacacaattttcgaggctaagactaaactggctcaatcgagctcgtgcgaagaatctcaaataaaactgatctactcaggtaaagtacttcaagattccaaaactgtgtcagaatgtgggctaaaagatggtgatcaagtcgttttcatgatttctcaaaaaaaatcaacaaagaccaaggtaacagagcctccagtcgttccagagactaccgcccctgccagaaacgaatctacagaaccagcaaccgccagtacggacgcacccgccaccgaaaccaccaccgctgctaccgaaggctcgcaaccacaagaagagcaatcctctactacagaaccagccggatctgcttctacaccgggattcgttgtgggggcccagagaagcgaaaccatagagagaatcatggagatgggatatccaagagaagaagtcgagcgtgccctaagagctgccttcaacaacccggacagagccgtggaatacttactaatgggaattccagagaatctacgccaaccggagccacagcaacaagctgcggctgcgaccgaagaatcatcggccgcagctaccgccgccacgtcagacctaccagccgaagatgacctatttgcacaagctgctcaaggcgacaatgcttcatctggcgggcttggttcagcaggaggtgccgccggtgccgcacaaggcggcccaccgggttccatcggcttaactgtagaagatttattatcactaagacaagtcgtttcaggtaacccagaagctttggccccgttattagaaaacataagtgcaagatatccgcaattacgcgaacatatcatggcgaacccagaggtgtttgtttctatgttattggaagccgttggggataatatgcaagatgttatggagggcacaaacgacatggtggagggagaagacatcgaaagtgcaggagaaggtgatgctgtgggactaggacaaggtgaaggcgaaggctctttccaagtgaactatacccctgaagacgaccaagccatttcgcgcttatgcgaattggggtttgaaagagatctagtcattcaggtgtatttcgcatgcgataaaaatgaagaagccgcagctaacatcctattcagcgatcatgcagattga

SEQ ID NO: 681 - DNA, 1476 bp, Saccharomyces pastorianus
atgaagtacagtaaaagaaatctcagttttaaccccatcacgataagcatcgctggaacgctgcttaccgtgttcttcctcacgagactcgtgctctcgttcttctccatatcgctattccagctgctgtcctttcagggcatctttaaaccctacgtgcctgattttaaaaacactcccggcgtggagttctacgacctgcgaaattaccagggcaaccaggacggctggcagcagggcgaccgcatcctgttttgtgtgccgttgagagacgcctcggagcatctgcccatgttcttcgaccatcttaacaccatgtcatatccgcacaacctgattgatctgtccttcctagtcagcgactcgtccgacaacaccatgggcgtgctgctgtctaaactgcaggtggcccagtcgcagcaggacaagaccaagcggttcggcaacatcgagatctacgagaaggactttggccaaatcatcggccagtccttttctgaccgtcacgggttcggcgctcagggccccagaaggaaacttatggccagggctcgtaactggctcgggtccgtggctctgaagccataccactcctgggtctactggagagacgtggacgtcgaaaccattccctccaccatcatggaagatctaatgcatcacgacaaggacgtcatcgtccccaacgtttggagaccacttccagactggctggggaacatccaaccttacgatctgaactcttggaaggagtccgaaggtggcctccaactggccgacgccctcgacgaagacgccgtcatcgtggaggggtaccctgagtacgccacttggagaccacatctcgcctacatgagagacccaaacggtaatccggaagacgaaatggaactggacggtatcggaggtgtctctatcctggcaaaggccaaggtcttcagaacaggctcgcacttcccggctttctccttcgaaaagcacgcagagacagaagcattcggcagattgtctcgcagaatgaactacaacgttatcggcctgccccactatgtaatctggcatatttacgagccttccagtgatgacttaaaacacatggcctggatggccgaagaagagaagcggaaactggaagaagagagaatccgcgagttctacaacaagatctgggacattgggttcgaagacgtcagatatcaatggaccgaagaaagagacttcatcttgaaaaacatcgactctaccctaaatagcaaagttaccgtggactggtctgaagaaggcgatggctcggaactggtggactcaaagggcgaattcgtctctccaaacaaccagcaacagcaacagcaacaacagcagcaaaagaaacaacaagacagcaacccgcaggggaaacttcatgacggcaacgataagaacaagaaaatgcttcctaaagaggttccattggacttcgaccctgatagaaactag

SEQ ID NO: 682 - DNA, 474 bp, Saccharomyces pastorianus
atgtctgacgaagaacacacctttgaaaccgccgatgccggtacctccaccacctacccaatgcaatgttccgctttgagaaagagtggtttcgttgtcatcaagggtagaccatgtaagattgtcgacatgtccacctccaagaccggtaagcacggtcacgccaaggtccacatggtcgccattgatatcttcactggtaagaagttggaagatttgtctccatctactcacaacatggaagtcccagttgtcaagagaaacgaataccaattgttggacatcgatgacggtttcttgtctttgatgaacatggacggtgacaccaaggatgacgtcaaggccccagaaggtgaattgggtgacaccatgcaagccgctttcgacgaaggtaaggacttgatggtcactatcatctccgccatgggtgaagaagccgccatctccttcaaggaagctgctagatccgattaa

SEQ ID NO: 683 - DNA, 2934 bp, Saccharomyces pastorianus
atggatagctccacgggtttcaacggagatgctaccactttcttcgctccagatgctgtgtttggtgacagggtgcgtagattccaagagtttttagacaccttcacctcgtacagggattctgtgaggtccgtacagatctacaaccacaacaacgggacaaactacagcgaggaccaggatgatgctggcgaacaggatctgcccggcgatgaggacggtgacgacctggagaaggagaagaaaaccgcgtcctccactgcattgaacatactccctcacagaattaccatttcgctagacgacctgagggagttcgacaggtccttctggtctggaatcctgaccgaacccgcgtacttcatcccaccggctgagaaggcgctcaccgatctggcggattccatggacgatgtcccgcacgcaaatgcttctgcggtatcgtctcaccatccctggagactttcgttcaagggttcatttggtgcgcacgccctgtccccgcgtaccatgacggcccaacacttgaacaaactagtctctgtcgaaggtatcgtcactaagacctcgctggtcaggccaaagcttatcaggtccgtccattatgcggccaagaccggtagattccactacagagactacacggacgccaccacgaccctcaccacgcgtatccccacacccgccatctacccaacagaagacccagagggcaacaaactaaccacggaatatgggtacagcacttttatagatcaccagcgtatcaccgtgcaggaaatgcccgaaatggcgcccgcaggtcaactccccagatccatagatgtcattctcgatgacgatcttgtggacaagaccaagcccggtgacagagtcaacgtcgtgggtgtattcaagtcgctgggtgctgggggtatgaaccaatccaactctaacacgctgatcgggttcaagacgctgatcctaggtaacacggtataccccatgcatgcaagatctacaggtgtcgccgcaaggcaaactttgacagatttcgacatcagaaacattaacaaactgtccaaaaagaaagacatctttgatgttttatctcagtccctggcaccctccatttatgggcacgatcatattaagaaggctattctattgatgctcatgggtggtgtggagaaaaatttggaaaacggttcccatttgagaggtgacatcaatatcctgatggtgggtgatccctcaaccgccaaatcacaactgttgagatttgtgctgaatacggcatctttggctattgccaccaccggtagaggttcttccggtgtgggtttgaccgcggcagtgaccactgatagagaaactggtgaaagaagattggaggccggtgccatggttttggccgatcgtggtgtggtgtgtatcgatgagtttgacaagatgaccgatgtagacagagtcgccatccatgaagttatggaacaacagaccgtgacaattgccaaagcaggtatccatacaactttgaatgctcgttgtagtgtcattgctgcagccaatcctgtatttggtcaatacgacgtcaatagagatcctcaccaaaatattgcgctgccagattcgcttttgtctcgtttcgatttattgtttgttgtcacagacgatattaacgaaatcagagataggtccattagtgaacacgttctaagaacacatagatacttacccccaggttacttggaaggtgaaccaatgagggaacgtttgaatttatcattagccgttggcgatgacgccgatatcaatcctgaagaccgttccacttccggaactggtggggaaaatgaaggggaagatgaggaagaccatgtttttgaaaaattcaacccactattgcaagcgggtgctaaattagccaaaaacaagggtgattataacggtaccgaaattcctaaactagtcaccattccattcttaagaaagtacgttcaatatgccaaggaaagagtaattccacaattaacacaagaggcggtcagtgtcattgtgaaaaattacactgaattaagaaacgatgagaacaccaaaaaatcacctatcactgcaagaaccttagaaactttgattagattagctacagcacatgctaaagtcagattgtccaaaactgtcaacaagacagatgccaaagtggctgctaatttgctaagatttgccctactaggtgaagatattggtaacgatatcgatcaagaggaaagcgagtatgaagaagccttgtctaagagatcaccacacaaatcgcctaaaaagagacaaagagtcagacagccggcaagtaattcagggtcaccaatcaaagctaccccaagaagatcagcggcaccgtccgtcaacgctacaccatcatcggcgcgtagaatactacgtttccaagatgacgaagaacaaggtagcggagacgataacgatatcatgtcgccacttcccgtagatgaagaagccgaattacaaagaagactccaattggggctgagagtatctccaaggcgcaaagagcatctccacacatcagatgaaggtgccccagggcctcttactgaaatgggtaccccaaggttacctaacgtatcttctgcaggtcaggacgatgagcagcaacagtaccaacagcaacaacagtcggtgatatctttcgaaaacgtggaaccaggtactatctctactggtaggttatccctgatctcgggtataattgcgcgtttgatgcaaacagaaatattcgaagaagaatcatatcctgtggcctctttgtttgaaagaatcaatgaagaactaccggaggaagagaaattttccgctcaggaatacttagcgggactgaagatcatgtccgacagaaacaacctaatggttgctgatgataaagtttggagagtatga

SEQ ID NO: 684 - DNA, 3648 bp, Saccharomyces pastorianus
atgacggagaaagcatttgtgagcagtcctattgttagggactcgaggctgttggtgccaaagtcatcagcatttaagccatacgtattaccgtttttcccattatacgctacctttgctcaactatattttcaacaatatgatcgttacatcaagggacctgagtggacttttgtttatttggggacactggtctctttgaatatcctggtaatgttgatgcctgcttggaatgtcaagatcaaggcaagtttcaactacagtactactaaaaatgtcaatgaagctactcacataatcgtctataccaccccaaacaatggttctgacgatattgtggaaatccaaagggtcaccgaagcagggtctttgcaaactttttttcaattccaaaagaagagattcttgtggcatgaagatgagcaagtcttttcatcacctaagtttcttgtggatgaatctccaaaggttggtgatttccaaaaaagtaagggacactctggcgacttgactcatttgagaagactatatggtgaaaacagttttgatattcctattccaacttttatggaattgtttaaggaacatgcagttgcaccattgtttgtcttccaagtattctgtgtcgcattatggttattagatgagttctggtattactctttgttcaatttgttcatgattatttccatggaagctgctgcagtattccaaagattgactgcgttgaaggaattcagaactatgggtatcaagccatacactatcaacgtgtttagaaataaaaagtgggtggccttaccaagtaatgaattgttacctatggatttggtctctgtaacaagaactgctgaagatagcgcgatgccatgtgatctgatcttggttgatggttcttgtattgtcaatgaagcaatgctttcaggtgaatctactccattattgaaggagtccatcaaattgcgccctagtgaagacagtctacaattggacggtgttgataagattgccgtactacacggtggtacaaaagccttgcaagttactcctcctgaacacaaatccgatattccaccaccacctgatggaggtgctttagcaattgtcactaaaactgggtttgaaacatctcaaggttctttagttcgtgttatgatttattctgcggaacgtgtttctgttgacaataaggaagcattgatgttcatcctcttcttgttaattttcgctgttgttgcctcctggtacgtttgggttgaaggtacaaaaatgggtagaattcaatctaaattgattttagactgtattttgattattacatctgttgttcctcctgaattgccaatggaattaaccatggccgttaatagttccttagctgccctttccaaattttatgtctattgtactgaaccatttagaatcccattcgctggtagaattgatgtatgttgtttcgacaagactggtactttgacaggcgaagatcttgtttttgaaggtttagctggtatttctgaagacggtgaaaatattcgtcacttatatagtgcagccgaagcaccagaaagtacaatcctcgttattggcgctgctcatgctctagttaagctagatgatggtgatgttgttggtgatccaatggaaaaggctaccttgaaggccatcggttgggctgttgagaaaaagaataccactttcagagaaggtactggtaagttgaatgtcatccgtagattccaattttcttctgctttgaaaagatcagcttctattgcctctcacgatgacactctgttcgctgctgttaaaggtgcacctgaaactattcgtgaaaggctttccaacattcccaagaactacgatgacatttacaagtcttttacacgttctggttcaagagttttggctttggcttctaaacaattaccaaaactatctcaacctaaaattgaagaattgacccgtgatgaagttgaatcagacttaattttcaatgggttcttgattttccactgtcccttgaaagaggacgctattgaaacgattaaaatgttgaatgaatcttcccatcgttctgttatgattaccggtgataacccactgactgcagttcacgtagctaaggaagttgggattgtttttggtgaaactttgattttggatagagctggaaaatcagacgatggccaattgttgttccgtgatgttgaagaaacgatcactattccatttgatccatcaaaggatacttttgatcattctcaattatttgatagatacgatattgctgttactggttatgctttaagtgccttagacggacactctcaattaagggacttgttacgtcaagcttgggtctatgcacgtgtatcaccatctcaaaaggaattcttgttgaatacacttaaggatatgggatatcaaacccttatgtgtggtgatggtactaacgatgttggtgccttgaaacaagctcacgttggtattgcattgttaaacggtactgaagaaggcttgaataagttgggtgaacaacgtagaatggaaactatgaaaatgatgtacatcaaacaaaccgaattcatggctagatggaaccaaccacagccacctgttcctgaacttattgcccacttattccctcctggtccaaagaatcctcattatttgaaaactttagaaagtaaaggtactattattactccagaaatgagaaaactagttgaagaagcgaatgctaaacccgttgaagttatcaaaccaaacggattaaccgagaagaagccaaccgatttggcttctatgttattggattctgccggtgatgctcaaggtgatgaggctccagctctaaagttaggtgatgcatcttgtgctgctccatttacctctaaacttgctaatgtttctgctgttaccaatattatacgtcaaggtcgttgtgctttagtcaataccattcaaatgtacaaaatcttagctttgaattgtctaattagtgcctattccttgtctatcatttatatggctggtgtcaagttcggtgatggtcaagctactgtttctggtttattgttgtcagtctgtttcttgagtatttcccgtggtaagcctttacaaaaattatcaaagcaaagacctcaagctggaattttcaatgtttatatcatgggatccgttctatctcaatttgctattcacattgctactttggtttacatcacaacggaaatctacaaattggaacctagagagccacaagttgatctcgaaaagcagtttgctccatctctattaaacacaggtattttcattattcaattggtgcaacaagtctctacatttgctgttaactatcaaggtgaaccatttagagaaaacattagaagtaacaagggtatgtattacggtttaataggtgtgacaggtttggcacttgcaagtgcaacagagtttttccctgagctgaacgaggctatgaagtttgtgccaatgagcgacgactttaagataaaattgaccttgacactgctacttgatttctttggtagttggggtgctgaacaagtcttcaaattcttctttatggatgacaagccatctgacatttctattcaaaaggtcaagattgcttccaaatga

SEQ ID NO: 685 - DNA, 939 bp, Saccharomyces pastorianus
atgcctcggctcttggcaacacaatctcatgtagtgcacggctacgtgggaaacaaagctgctacgtttcctttgcaatgtctaggttgggatgtagactgttgcaatagtgtccagttttccaatcataccggatatggtttagacaaagtatttggaactataacagatgaaactgatctaaagcaactcttatcaggcctattcgataattttcctcgagactaccaagctttactttcgggttacttgcccaataaaaattcggttcgatgtatggggacgtattatgctaagttcaaggaagaaaatcctgaaataatatggcttatggatcctgtgatgggagatgaaggacaattatatgttagtgaagatgttataccagaataccggaaaatagcgttgtctcccaaacagctggtcgatataataactccaaatcaatttgagttggaaatattatatggagaagaaattaagaccaaagaacatttgaaaaaggcattagaaaagctacatcgtacgattccagtgataattgttacatcttgtgattgtaagatgtttgatgatcaagattttatctattgtgtggcttctatgaaaggcaagacacctgttgtttatagagtgccgttcattgattcgtattttactggggtcggtgatttgttctctgctttgctattagaccgagtctataaaatcttgtcaaacccaacaacaactttagaatttgaagatcaggttaataatgtgctaaatgttattcaaaaagtattgaatgtcactcgaagttatacttcagggaaaatcaatgctaaaatgggctccgctctggaaatgaaagaaatggaattgcgaattattgaatcaagagacatatacgaaactatcaacatcaatgaaaaggattatgtttataccagactgtga

SEQ ID NO: 686 - DNA, 483 bp, Saccharomyces pastorianus
atgactgaattgtgtcctgtctacgcccctttctttggtgccattggttgtgcctctgccattatcttcacttccttaggtgctgcttatggtactgctaaatctggtgttggtatctgtgccacttgtgtgttgagaccagacttgcttttcaagaacattgttcctgttattatggctggtatcattgccatttatgggctggttgtttccgtcttggtctgttattcattgggccaaaagcaagctttgtacactggtttcatccaattgggtgccggtttatctgtcggtttgagtggtctagctgcaggtttcgctattggtatcgtcggtgatgcaggtgttagaggttcctctcaacaaccaagattgttcgtcggtatgattttgattttgatttttgctgaagttttaggtttgtacggtttgattgttgctttgttgttgaactccagagctactcaagacgttgtttgttaa

SEQ ID NO: 687 - DNA, 381 bp, Saccharomyces pastorianus
atgtccgctccaaacccaaaggctttcccattagctgatgctgcattaacccaacaaatcttggatgttgtccaacaagctgccaatttgagacaattgaagaagggtgccaacgaagctaccaagactttaaaccgtggtatctctgaattcatcatcatggctgctgactgtgaacctattgaaatcttattgcatttgccattactatgtgaagataaaaacgttccatacgtctttgtcccatctagagtcgctttaggtagagcttgtggtgtttctagaccagttattgctgcttctattaccactaacgatgcttctgctatcaagacccaaatctacgccgttaaggacaaaattgaaaccttgttaatttaa

SEQ ID NO: 688 - DNA, 648 bp, Saccharomyces pastorianus
atgttaggaataagatcgtctgtcaaatcctgcttcaagccaatgtctttgacttctaaaagattgatctctcaatctttggtggctaacaaatctacatatagaacgcccaactttgatgacgttctgaaagagaacaacgaccctgataagggccgttcttacgcttatttcatggtcggtgctatgggtctcttgtcttctgctggtgccaagtcgactgttgaaacatttatttcatccatgactgccacagccgatgttctagctatggccaaagttgaagtcaacttggcagccattccattaggtaaaaatgtcgtcgtcaaatggcaaggtaagcccgtgttcattagacacagaactcctcatgaaatccaagaggctaacagtgtggaaatgtccgctttgaaggacccacagactgatgctgacagagtcaaagaccctcaatggttgatcatgctgggtatctgtactcatttgggttgtgttccaattggtgaagctggtgatttcggtggttggttctgtccttgtcacggttcacattatgatatttctggtagaatcagaaagggtcctgctcctttgaatctggaaattccttcctacgaatttgaaggtgaaaaggtaattgttggttaa

SEQ ID NO: 689 - DNA, 804 bp, Saccharomyces pastorianus
atgtctaacgctacttataaagaacgtgctgctgctcatcctagcccagttgctgccaaattattaaacattatgcacgaaaagcaaacaaacttgtgtgcttctttggatgttcacaccacaaaggagctgctcgaattagtagaagctttaggtcccaagatatgtctactgaagacacatgtcgacatcttgactgacttttccatggagggcactgtcaaaccgctaaaacagctatccgctaagcataattttctgctatttgaagacagaaagttcgcagatatcggtaacacagtgaagctgcagtactcatcaggtgtatataggatagctgagtgggcagacatcaccaatgcgcacggtgtggtgggtcctggcattgtcagcgggttgaaagaagccgcagaggaggccaccaaagagcctagagctcttctgatgctagcagaattatcatgcaagggatctctagctactggggagtacaccaagggcactgtgaacattgccaagagtgacaaagactttgttattgggtttatcgctcaaaaagacatgggcggtagagacgaagggtacgactggttgattatgacgcccggtgtagggctagacgacaagggagacgcattgggccaacagtatagaactgtggatgacgtagtctctactggatccgacatcattatcgtgggaagagggctatttgccaagggcagagatgtcaacgtggaaggtgagcgttacagaaaggcaggctgggaagcttacttgaagagatgcggcagccaaaattga

SEQ ID NO: 690 - DNA, 264 bp, Saccharomyces pastorianus
atggacgcattgaattctaaagaacaacaagagttccagaaagtggtggaacaaaagcaaatgaaggatttcatgcgtttatactccaacttagtagaaaggtgtttcacggactgtgtcaacgacttcacaacttccaagcttaccaacaaggaacaaacgtgcatcatgaagtgttcagagaagttcctaaagcacagcgagcgtgtaggacaacgtttccaagagcagaacgccgctttgggtcaaggcctggggcgttag

SEQ ID NO: 691 - DNA, 1683 bp, Saccharomyces pastorianus
atggctacaaaagtcacgcaacatttcgctcagcttctacaaaaatacggtatcgacacggtatttggtatcgtgggtatccccattgtccagttggcggatacgatggtcgccaacgacatcaaattcataccatgcaggaatgaacaggccgcgtcatacgctgcgtctgcgtatgggtatatcaacgataagccgggggtactgcttattgttgggggccccggtctaattcactcgttggccggaatatacaactcaatgaacaataggtggtctcttttggtaattgcggggagctcctctcagagtgacgtccataagggaggattccaagaactggaccagataagtctgttgtctccctttttaaagttcactggcaagctaacccctgataacatcgacatggtaacccgaaaggctttgaatcattgtatacagggcacgatgggcgtctcgtacattgacttccctgcggacttgattgaaaacgaaaaatcattggcaggaaacgaccacctgaataatgaattacccatgattttaagtccaaacaagtgtggcccggacccatcaaagatcagagaaattgtacagctcattttacaacacagggacaagaacatcctcgttgtcattgggaagggcgcagtgaaaaattcacacgaacttcgcaggttggtaaacagttttaatcttccattcctgcccacaccgatggcgaagggaatcgtcccggactcatcacccctaaacgtgtcgtctgcgaggtcccaggctttgaaaaccgcagatatcgttctcgtttttggcgcgagactaaattggatactgcattttggttcttcgcccagatggaacactgagtccgtcttcattcagttcgactcccatcccgaaacactgggcgataacaatacgtcacctggcgccggactctccgtttggggggatataggcttgagcgtaactgccttgatggaagagctgccacaacaaagaccaggttggaagtacagaggcgtcaacaactacctgagggagaaaatccacgtgaaccagacccgcttgcaggagaaggagaaggtggggggcgcgcaactgaactaccatcaggtttatgggaccctaaggccgcttatcgaggactataggacaatacttgtcacggagggtgcgaacaccatggacagtgcacgggtctcgttccccaccgacgctccaagacaccgtctggacgcagggactaatgcgaccatggggattgggctcgggtatgctctggcgtgcaaggcatcccgtccggagctcgacgtggtgctaatccagggcgattccgcattcgggttctcggccatggaaattgaaacggcggtgcggtgccagctggcgctagtcatcgtcgtcatgaacaacagcggtatataccacggggtgaaggatggcaaggccgaactaccgcccaccgcgctaagcaagaattgccgctacgacctcgtgggtgaaggcctgggcgcccacgggttcttcgtaaacacgctggaagaactaggcaagagcttccgggaagccgtgcagttggcccgcaccagaagggaaacaagcgtcatcaacgtcatcatcgaacccggcgaacagaagcccatcgcatttgcatggcagaacaaaccgcgtctataa

SEQ ID NO: 692 - DNA, 804 bp, Saccharomyces pastorianus
atggcccaagacgacaatcctatacctaagtcggtacctttgcaccaacaggcaggtaaatatttccacactttacatacgcaagacttatcaaacctctaccagcaatgctacaaacagtttgacgaaactataaaccagctagtagattccccgtcgccttccacttccaaaatcgacaagccaatagcggatctcacaaacatatacaagcttctttcaacgcatgaatcggaatctaattcattccacaacgacatccaagacttgaagaatactttcaaaattcaatcagactcatgccctcaaattgacctttccacctgggacaaatatcgcaccggtgaaattaccgctccccaactttctgaattatatctaaacatgtctcgatcggagccatccgctgccgtcgatagcacggctactttaaaaatacttaaggtcttaccgtacatctggaatgatccaacgtgcgtgataccggatttgcaaaatcccgcagacgaagatgatttacaaatagaaggtgggaaaattgagttgacttgccccatcacttgcaaggcctatgaaacgccattgatatccaaaaaatgcaatcacgttttcgataaagatggtattcagaattacttacaaggatacacgacaagagactgtccacaagctgcatgctcacaagtcgtttccatgagggatttcgtaagagaccccatcatggaactgaggtgcagaatcgccaagatcaaagattctcaggaacaagacaaaagaaacaaccaagccatcgatgtcctatga

SEQ ID NO: 693 - DNA, 828 bp, Saccharomyces pastorianus
atggatacggaggtgagtgagctggtggtgttgcagctgatacatacgctgatctcgaacaaaaatgaagaactggtcaagaacggtggaggaattaacatgatcgggaacaatcttcgaatatcgctggtaaagctgacgaacgaaatacaaaataacgtgctgatcaacgagctaacgaacctgaggaggcaaggcggtgttgtgaacgggaacggaaaactgggcatcaacgatatcctgacgattgtgaagagtctgttccccggctacaggacaacgctgaacgatgggcagttaagcctgcacggcctagagatgcatgatattgagaaactcctagtgggcaagtacgatgaattcaagagagcacaaactgaacagataagggcgatggaggacgagatccagaagaacggtataaagagcggtacaacgcaatcgcaatcgcaatcgcacacaggcaagagtggaggtgccgtgataggcacgactacaacccatggaggacatgctatggaccccaaaagagaaaagctgttgaaactgtacagggacaccgtgctgaataagctagagagcaagacaggaaacttccaaaaactgttcaagagccccaacaacacgatcatcaaggatgaggtcaactacgaagacataaagaacgagacgcccggcagcgttcacgagctgcaactgatcctgcaaaagtgcataacggacggcgtaatgcgaggggtcataggcacggacgactggaaactagcaagacaggttcagctggaactagacgacacagtacagttcatgaggagagcactagaatag

SEQ ID NO: 694 - DNA, 132 bp, Saccharomyces pastorianus
atgttgatgaacatgttgccaggtggtgttatcttagttttcattctagtcggtttggcttgtatcattatcatttctaccattatctacaacaaatggaaggccagacaacaagggttgcaaagattttaa

SEQ ID NO: 695 - DNA, 978 bp, Saccharomyces pastorianus
atgtcgagcacgtctactttcgctcgctggaagaaggcggacctgattgacctggccaacaagctggaaatcgacggcttccccaactacgcaaagaagagcgacatgatcgagttcctggaaacgcacctgaaccgtctcgagagtcccgtggatttcaaagacgactacccggaactgaagtcgttctacgaatcgatcatcgcggaccagtccaaggacgagaaggacatgtccgggtcacgatccgggtcctccgacaccgcagcaaacgactctgacctggaaaaggcgtatatcaaggacgacgacggatctcaatccactgacgaggccagcgcgaagcccgacgcagaggccagcgcgaagaagaacttcaatctgctcgatttcagcgctgaccacgactcgtccgtctctgcgttgaccaagttcaagttcgacttccaggacagcctctccgacatcaagtggcatgtgcagaaactgaacgagaatgtgcaggactgtctgtccacgatctcttccgtcgacgccatcttttctctcgtggagtgctctcttttggtgagacaagtattagccgccgggcggtccaccgcctccccctcttcgctcgcctcgtcgttcgaagccgctgccgccggccacacggaaccgcagcgcatgctcgatttctgcctgcccatactcacatggctgctctttttcagaggcatcccgacgctggtttcgtactacatcaacttcatccggtacgacctggacatcgagttggatccgatgacgttcaacctttcgaaattcttgatctctctggcaatcttcaaaacctgtaataataaaaacatagatttccactctcttcaatacgtcgaccaagtgtggacccagctctgtgtcgtgaaccactccctgggcacggtgcccctggtgttatctatggccagctgcctactgactctatacgtcctatag

SEQ ID NO: 696 - DNA, 1689 bp, Saccharomyces pastorianus
atgtctcaatttattggctttggtgtacaagtggagctaaaagacgggaagctcattcaggggaaaatcgccaaagcaacttcgaaaggattgactttgaatgacgtacaattcggtgacggcggtaaatcccaagcttttaaagtcagggcctctagactaaaggatttaaaagttctaactactgcccctcaatcgggtaaaaggaaacaaccaagacaacagcaacaacaacaacaacagcaacagcaacaaaatgactataatcaaaatcgcggtgaacaaattgattggcaagacgacgatgtaagtaagataaaattacaagacgattttgattttcaaggaaatttgggcatgtttaacaaaaaagacgtattcgctcaattaaagcaaagtgacgatatattaccggaaaacagattacaaggacataatagaaagcaaccccaatcccaaccgaataactaccaaatcgatgaattggttatccctgatgcaaagaaagattcatggaacaaaatctcctctaaaaatgaacaaagcgcgccacagcctcagccgcagcaggaagaagatgatatagaggtggaggatgacgagcatgagtatgacgagcatgagtatgacgttgatgatattgatgaccccaggtatttaccgatcactcaatcgttaaacatcactcacttaatccactctgccacaagttctccatccatggacgataaaaccaaaaacgccatcataagtgacaaagatcaagttctagctaaattaggtcaaatgattattagccagtcaaggtcaaactcgacatctttaccacctgcgaacaaacaaacgaccattaaatccaagaacactaagcaaaccatcccgatggccactccagtacaattactcgaaatggagagtatcacatctgaattttttagtatcaattcatctgtactgttagaaaattttgctgtaaacgcgtcattctttctgaagcagaagcttggtggccgtgcacgtttgcgtttacagaatactaatccagaacctctggtggtaatattaacctcagattccaacaggtctggtgccaaagcattagcattaggtaggcacctatgtcaaacgggtcatatccgtgttataacattattcacatgttcccaaaatgagctacaagatcctatggtcaaacaacaaacagaaatctacaaaaagtgcggcggtaaggtcgtaaacagtatatcgtcactggaatccgccatggaaacattgaacagtcctgtagaaatggtcattgatgccatgcaagggtacgactgcacattaagcgatctagcaggcacgtcggagacaattgaagctaggatcaaaagtatgatatcgtggtgtaacaaacagcgaggctctactaaagtatggtctctggacattccaaatgggttcgatgcaggctctggtttgccagatatcttcttcccggacagaatcgaagcaacggggattatttgttcaggctggcccttaattgccatcaataacttaatcacacacctacctaaattagaagatgctgttttgatcgatatgggtatcccacaaagtgtttattcacagagaacctctttgcgtaagtttcaaaactgtgatctatttgtcaccgatgggtctttgctcctagacttgtaa

SEQ ID NO: 697 - DNA, 1737 bp, Saccharomyces pastorianus
atggggtcatgttgtagttgcttgaaagattcttcagacgaggccagtgtctcaccaattgccgagaatgaaagagaagcggtgactttattactaggatacttggaagataaagaccagttggatttctactcaggcggtccgttgaaagcattgacaactttggtttattcagataatttgaatttgcaaaggagtgctgctttggcgtttgcagaaattactgaaaaatatgttcgccaagtctctcgagaagtgttagaacctatcttaatactgttacaaagtcaagacccacagattcaagtagccgcctgtgcagccctgggtaatttggccgtaaataatgaaaacaaattgttgatagtggaaatgggtggcttggaaccattaataaatcaaatgatgggtgataatgtagaggttcaatgcaatgccgttggatgcattaccaatttggccacaagagatgacaataaacacaagattgccacttccggtgctttaatcccattgactaaattggctaaatctaaacacattagagttcaaagaaatgctacaggtgcattactgaatatgacacattctgaggaaaacagaaaagaattagttaatgctggtgccgtacctgtgttagtatctttactttcatctactgatcctgatgttcagtattattgtacaactgctttatcgaatatagcagtagacgagtccaatcgcaagaaactggctcaaactgagccaagattagtttcgaggttggtgggtctgatggattccccatcttctagagtaaaatgtcaagctactttggcattaagaaacctagcatcagatacaagttatcaattagaaattgtaagggctggtggtctacctcatttggtgaaattgattcagagtgattctataccactagttttagctagtgtagcatgcatcagaaatatctctattcacccattgaatgaaggtttgattgtagatgccggtttcttgaaaccattagtgaaattactagattacaaagactcggaagaaatccaatgtcatgccgtatctacgttgagaaatttggcagcatcatctgaaaaaaatagaaaagagtttttcgaaagtggggccgtagaaaaatgcaaagaattagctttagattcgcctgttagtgtccaaagtgaaatttccgcatgttttgcaattttggctttagcagacgtctccaaattggacctattagaagcaaacattctagatgctttgattccaatgaccttttctcaaaatcaagaggtgtccggtaatgcagcagctgctttggcaaatctgtgctcgagggtaaacaattatacaaaaatcattgaagcatgggaccgtccgaatgaaggtattcgcggatttttgattagatttttgaaaagtgattatgctacgtttgaacacattgcgctatggacaattttacagttactagagagtcataacgataaagttgaagatttggtcaagaatgatggtgatattattaatggagtaagaaaaatggcagatgcgacttttgaacgtctacaaagatcaggtatcgatgttaagaatccagggaataatatgaacacaaattcaaatgacaacagcagtaacaacaacgacacaggttcggagcatcaacctgcagaggacgcaagcttagaactgtacaatattactcaacaaattttacaatttttacattga

SEQ ID NO: 698 - DNA, 2115 bp, Saccharomyces pastorianus
atgtacaacgttcctgataatgtcaaaggtgcagtcgaattcgatccgtggctgaaaccctttgcggatgtgctatccgagagaagatacctggccgacaagtggtcttacgatatcactcatgccacgcccgatggttcgtaccagtcgctgagtaaattctctagagattcatataagtcgtatgggttgcatgccaacccagatactaaggatattacctacaaagaatgggcacccaatgctcaacgtgcatatttagtgggggagtttaacaactggaatactacatctcatgagctcaaggacaaggacgagttcggaaatttcaccatcactatccctcccctatcgaatggtgactttgccattcctcatgactctaagattaaggtgatgtttgttttgccggatggttctgagatcttccgtttacctgcatggattacaagagccactcaaccttctaaggaaacttccaaacaattcggacctgtttatgaaggaagattttggaacccacaaacctcttacaattttgttaatccaaggccaaagtttaacggatctgtagactctttaagaatctacgaagcgcatgtaggtatttcaagtcctgagccaaaggtcactacatataaggaatttactgaaaaggttttgcccaggattaaatacctcggttatgatgccattcaattgatggctattatggaacatgcctactatgcatcatttggttaccaagtgactaatttctttgcggcaagctctcgttttggtacccctgaagagttgaaagagctggtcgataccgcacatggaatgggtatcatagtcttattggacgttgttcatagtcacgcttctaaaaatgtagaagatgggctgaatatgttcgatggctccgatcatcaatatttccattctgtaagttccggtagaggtgaacatccattatgggattctcgtctttttaactacggtaaatttgaagtacaacgatttctattggcaaatctggctttttatgtcgacgtttatcagtttgatggttttagattcgacggtgtcacttccatgctatatgttcatcatggtgttggtgaaggcggttcctttagtggtgactacaacgaatacctttctcgtgatagatcttctgtcgaccatgaggctttagcttatttgatgttagccaacgatttagttcacgaattactgcctcagtcggctgtcactattgcggaagatgtgtctggttacccaactctctgtctaccccgttccattggtggtagtggtttcgactacagattggccatggctttacccgatatgtggattaaattaatcaaggagaaagcagacgatgaatgggaaatgggcggtatcgtttacactttgactaatagacgtcatggtgaaaaagtcgttgcctattgtgaatctcacgatcaagctttggttggtgacaagaccttagcattttggttgatggatgcctcaatgtataccgatatgactgtattgaaggaacctaccattatcattgatcgtggtattgccctacacaagatgattaggttaattactcattcattgggtggtgaagcttatttgaacttcgaaggtaacgagtttggccacccagaatggttggatttccccaatgctaacaatggcgacagttataagtacgctcggagacaatttaatttggcagatgatcctttgttacgctaccagaatttgaatgaatttgatagatcaatgcagttatgtgagaaaaaacataagtggttgaacacagaacaagcatatgtctcattaaagaatgaaaaagacaaaatgattgtgtttgaaagaaataatttactatttattttcaactttcatcccacagacagctacagtgattatagagttggtgttgaaaaagctggtacttatcacatcgtattaaactcggatcgtgctgaatttggcggacataacagaatcaacgaaacttccgaattctttaccactgacttagaatggaataacaggagaaattttattcaggtatacattcctagcagagtttgtttggttcttgctttgaaagaatga

SEQ ID NO: 699 - DNA, 849 bp, Saccharomyces pastorianus
atggtagcagatttagctaaaggtatgctaaaatggaaatcgagaacagagtttgacaccgccgcaaactgttccttttacgagaatttaaaggccttacctcccctcgcatcacataaaaaattaacacgaggtgctattttcaatagtacgaaatacgaactactacaagttaaagaagatattctgtccatttacgatgttgtaaacaaggatatcaatgaggagcgtaatcagatgcaacaaatcgaatttcaactaaaaaaatctttgaaaaaagtagaacacaattacaagaaggtcttaaagcaaagggcttctaccagtgggatcaacggaaatgactgtctactgagtaatgcagaaaaaaagcttgtagtgttggatggagaacttgcccgtgtcgatgctatggttgaagatataattaatatttttattgctttaaatgacaagctcccgaagaaggcacaattactgagaaatgactctataaatgaagctcattatcctctgctctttgattttttgcgtaaggcatgcccagaagctatcgtttctgctacagaaactattgttcaagaagataacttgaactcttccccctcagaagagggtgaactattaatagaaagcacagataatattgacggtggaagggagctgcgaaacaatactccggattctcattcaaaagatgacggcgatatacccaaatatcaaaagtttctaccccctacattcagcaagagaagcggtccttcaatcgtaactaactttgagaatgttagtgcagatggcctcacatataccaaacactgcttgaaagatacggcgcctttgacttga

SEQ ID NO: 700 - DNA, 1029 bp, Saccharomyces pastorianus
atgtggagtttattaggagcattttcgcttgtgtttggaggttgctgttccaatgttgttactttcgaagggttaatgggtgataaaacaagtaatataagtaaccttatcaccttctgccaatttttgttcgttgcatgccaaggcctccccagatttgtggatgttcatggaagttttccttatctcaagccactgaaaaccccccttcacgtgtacgttatttctgtggttttgttttatatttcctccacaacgaataataatgtgttcaagtacaatatatccattccaattcacattgttttcagatgttttggaaccgtcataaccatgattacatgctggttactaaatggtagaaaatatacgaggactcaagtttcatcgacattttttttaaccgttggtgctattattgcatcactgtataaagacaatgaacttcgctatcaagatttcaaattgcaagatttacgaaatagaagcaatgaacctatagatcgcacgttcgttttaggtgtttgcatactgatactttcttcggttacatcctctttgctttcagcatacaatgagcgcacgtatcaaaaatatggtaagcattggaaagagaatatcttttatagtcacttcttggcactacccctcttttcattgaacgcaaaacagctagtccatgaatatcaagcaatgaaaaactcaaagaggatgatatgtttaaatcttggacaaaagaccagaatcccgcacgcagaaacttttctattttttaatgttctgacccagtatttttgcgttaagggtgtaaacatgcttgccagccagacgaatgccttgacactctccataacattacttgtaagaaagtttgtaagcctcttactaagtgttcatctttttggaaatagcctttcatatacaggctactttggggttttactggtattttttggtgctttcttatactcactcggatcaattcgtcctaaaattaaaagaaaagaagtattagggaaggaacaatag

SEQ ID NO: 701 - DNA, 1293 bp, Saccharomyces pastorianus
atgcggatcagttggagttttttctgttgtgtccttctccaggccattctcgccgtgagcactcaaggtttaaagacgcttgttctttacgaccaatccgccgaaccgttagaggattattcgttttatttaaaagatttggaagaaagggattacaaactggaatatctagacgttaacagtacttccactgctgtagatttgtatgataaagaactaagattatatgataatatcatcatattgcctaccaaaggaggcaagaatttagctagacaagttcctgttaatcaattaatcaagttttttgaaaacgaaggtaatatattgtgtatgagctcccctgatgccgttccgaacactattcgtttatttttgaatcaattgggtatatatccaagtccaaagggacacgttgttcgcgactatttctcatcttctactgacgagttggctatttcttctgattacctcttaaataagcacgtttacaacactgaaaatgacgagcaatttgtttttggagagagctctgctgccttattggaaaaccgtgaacaaattgtgccaattttaaacgcaccacggacatcatttactgagtccaaaggcaaaatcaactcttggacaagcggatcgcaaggcttccttgttgttggtttccaaaacttaaacaacgctcgtttggtgtggatcggaagtagtgatttcttgaagaacaaaaatcaaaattctaatcaggaattcgcaaaagagttactaaagtggacatttaatgaaaaatcagtaattaaaagtgtacaggctgttcactcacatgcagatggtaccagttatgatgaagttccttacaaagttaaggacgatgttgtttattccattggattctcggaatggaatggtcaaaaatgggtaccacatgttgcagatgatattcaatttgaattaagacaagtggacccatactaccgcatcacaatgacgccaagtgagaacgactccgaaacgcagtactatagcaccggtaaatttatgcttccggatcgtcacggtgtgtttacattcattaccgactaccgtaagataggcctttcgtttattactgatagagatgttaaacccatccgtcatcttgctaatgatgaatacccaagaagttgggaaatcagtaactcttgggtttatattagcaccatttgtggtgttattgccgcctggatcttttttgttgtgtcttttgctacaacttcctctgttagcaagaaacttgaaacattcaaaaaaactaactaa

SEQ ID NO: 702 - DNA, 678 bp, Saccharomyces pastorianus
atgaagttttcaaaattaattgggttcactctattaaatgttttgggtggtctatctgccgctacatctattattgacggtgagagtatcgagaaaaggcaggaagtggaagataatgtggcgccaccttctatcaatttagaagtgaagtgcgatatcgtgggaaaggaatctgaaagtcctaatacggtttttgaattttacgctgaggataccgcgtcattggtctataatattactaattgggaagataccaacatcacaattgtaggtgttaccggaacaattgttacatacccaaatggttatccaattgcgaatattacagccgctaatgtagggccctttgaaatggaagttaatgggactacaaagtttggacaagacgttactttgagtataccagaaggacaatatgttctgattccgtttttattagctgctagatctgatgaaatggtgagagttgcagcccctccaaccctatttgaaattgccagcccacctatctccttcttcaacccccagtttttatccgtccagatcatcgttttggccattgttgggggtattagttactactacatgaagtttaaaacacaacaaaaacccatcaagaagaacgtcgcccctaagaaagttgacgaatcatggttaccagaaacatataagaaataa

SEQ ID NO: 703 - DNA, 378 bp, Saccharomyces pastorianus
atgtccgtcgacttcaacactttggctcaaaactttactcaattttactataaccaatttgataccgatagaagtcaattgggtaacttatacagaaatgaatctatgttgactttcgaaacaagtcaattacaaggtgccaaagacattgttgaaaaattggtttctctgccattccaaaaagttcaacatcgcatcaccactttagatgctcaaccggcctctcccaacggtgatgtcttggttatgatcactggtgatctactgatcgacgatgaacaaaacgcacaacgtttttctcaagttttccatttgattcctgacggaaactcttactatgtgttcaatgatatcttccgtttgaactactccgcttaa

SEQ ID NO: 704 - DNA, 762 bp, Saccharomyces pastorianus
atgtcctacgctaaaatcgctttattcgctgctgtcgctgctttggcttccgcccaaactcaagaagaaattgatgaattgaacgttatcttgaacgatgtcaagtctcatttgcaagaatacatgagtttggctcaagacccatcttctggtttctctttggccaatatgccagccggtgttttggacattggtgtggctttggcttccgccactgacgattcctacaccactttgtactctgccgttgactttgctggtgttaacaagatgttgaccatggttccatggtactcttccagattggaaccagctttgaagtccatgatgggtgaagcatccacttcctccgctgctccaacttccaccgaagctaagagttcctccgctgctgcctcctcatccgccgcttcttcttctgctgctgcctcctcatccgccgcttcttcttctgctgctgcctcctcatccgccgcttcttcttctgctgccacttcttccactgaagctaagtcttcttctgctgctgcctcttcttctgctgctgcttcctcttccgccaagcaatccgccagcgtatctagctccgccaaggcttctgccactgcttctggttctgccaaggcttctgccatctctcaaatcactgatggtcaaatccaagccaccaagaccgtttctcaacaaactgaaaatggtgctgctaaggcctttgttggtatgggtgctggtgttatggctgctgccgctatgttgttataa

SEQ ID NO: 705 - DNA, 597 bp, Saccharomyces pastorianus
atggatattattttaggtattcgtgtaaaagattctgtcattctagcgtcttccaaggctgtcacaagaggtatttccgtcttgaaggattcagacgacaagacaagacaactatcgccacacgcattgatgagttttgctggtgaagctggtgacactgtccaattcgccgaatacattcaagcaaatatccaattatactctattagagaagattatgaactatctccacaagccgtgtctagtttcgtcagacaggaattggccaaatcaatcagatcgagaaagccttatcaggtcaatgtgttgattgctgggtatgacaaaaagaagaacagaccagagctgtaccaaatagactatttgggtaccaaagtagaattaccttacggtgctcatggttattcagggttttatacattttcaatactagatcgccattatagacctgatatgacaactgaagagggcctaactctactaaaactttgcgtacaagagctagaaaagagaatgccaatggatttcaaaggcgtcatcgtcaaggttgtagataaagacggtataagacaaatagacgacttccaaacaaaatga

SEQ ID NO: 706 - DNA, 1620 bp, Saccharomyces pastorianus
atgataacaccattgaccaagttgaaaccaaatgccaaagtcgccgtagttggaggaggtgtttctggactatgttttacatacttcttaagtaaattaagaccggatgttcaagttacattattcgaatcacagaaaagaacagggggttggataaactcatgtgctacaaaggatgagagcgggaaaccgattatggtagagaagggacccaggacgttgaggggtgtatctgacgggactgttgtaattatggatacccttagagatctaggtaaagaagcaatggtgcagagtattgaaaagggctgcactgcggacaagaagttcctactagaccccagtgataaactggtgcaagttcctgactcaatatcgacaactttaaaattccttttcaatccgttggggaaaggacttattccaggcatgttgggagaatggttcaggaaaaaatcaccacatcccggacaagacgaaagcgttgaatcagtactaaacagaaggtttggtaatgactacatatcgaaaaacatgattagcgctttattaaggggcatttatggggatgatgttgctttgttaagtgctaagaggacattcaagaaaatttactacaacgaacttaagcacggatctaacacgcaagcaatgtttgataatatgcgagagaagtctaaaaataaaaaaaaagacggtcatagtcaggccttaactggatgtcttaatgattatgtaatggcatttggaaaagataaatcgaacttattggatctagcaaacactttgaagaaatatcccatgctcggtttagtcggtgggttagaaacttttcccaaaatagtcagaaatgccttaaatgagttcagtaatgtcgaaatagttaccaacgagccagtgacgcaagtcatcaaatccagctctaatgcaaaaaccattgggttgaaagtgcagtcaggtgacaaatacgaaggattcgaccatttaaggcttactataacaccatccaaaatcgccgagttactaccgaaggatgaagattctctgtccaagctgttaaatgagatccaatcaaatacaattcttttggttaattattatttaccaaacaaggatgtgttgaatgccgatcaacatgggtttggttacttggtacctaaatctaataagaatccagggaaattgcttggtgtgatttttgattctgtcattgaaaggaatttcaaaccacttttcaataagaactttcaaaactctaaagctctcaaggaatacacaaaactgactgccatgataggaggtgatatgctgaatgaacacggtgtgcctgttattccatccaaggaagtgactattagtgccgtaaaagatgcactaaaccgtcacctaggcatcaacaacgacgacctagaagccggccactgggaattcactattgcagataaatgtctcccaagattccatgtgggctacgacgcatggcaagacaaggccgaaaacaggtttcaagatgcttacggccagactgtttcactgggcggaatggggttctccagaagtccaggtgtccccgatgttattgtagatggcttcaacgatgccctccaactcggccaataa

SEQ ID NO: 707 - DNA, 2235 bp, Saccharomyces pastorianus
atgtccactcgagactatgctcttaccgatttgattgaatcagatcctcgtttcgagagcctgaaaataaaattagctaattacagaaagggttctgatgaatatattcaggaactttattcccaattgccactggctagctggccaaactataagaggtatctgaagaaacaagccgctgcaactccgaattctgataataaagctgggtttagccccatttataggagttctctttcttcgaaacatttgatcagttgcgttgacaaaaacctaaaaactgcctacgaccatttcatgttttcagtgaggaactggcctcaacgagactgcttaggttcaagaccatttgacaaggctacaggtacctgggaggaaacttaccatttcgaatcattctctacagtatctaagaaatgccattatattggaagtggtatattgtccttggttaacacaaagaggaaacgccaattggatgctaatgactttactgttgctatattgtcccacaataaccctgaatgggttttgacagatttggcttgtcaagcttattctttaaccaatactgcgttgtacgaaactctaggtcctcaaacttcggaatacatattaaacttaactgaagctcccattcttatttttgccaaatcgaatatgtatcatgttctgaaaatgctacctggtatgaagttcatcaatactttagtttgtatggacaaattaagtgacaatgaactgaaaatgctaaacgattcacttatacccatcgagaccaattctttaaatgaaagaataacacttttttcattggaccaagtagagcggattggcagtctcaatgaaattcctgcaattccaccaactccggattccttgtatacaatttcattcacttctggtacgacaggcttacctaaaggtgtagagatgacccagagaaatattgcgtctgggatagcattcgctttctctacttttagaattccaccagataaaagaaaccaacaattatacgatatgtgttttctgccattagcccatatttttgagagaatggttgttttgtatgatttggccatcggctttggaataggattcttgcataaaccagatccgaccgtattagtagatgatttgaaagtgttaaaaccctatgcagtcgccctagttccaagaatattaacgcgttttgaagcaggtataaagaacgctttggataaatctgctgtccaaagaaacgtggcaaatactattttggattccaaatcagccagatttactacaaaaggtggcccggataagtcggttatgaactctctagtttatcatcgtgtattgatcgataaaataagagaatctctgggtttgtctaacaactccttcataataactggatcagccccaatttctaaagatactttactattcttaagaagcgccttagatattggtataagacaaggttacggtttaaccgagacatttgctggtgtctgcttgagcgaaccgtttgagaaagatgttggatcttgcggtgccattggtgtttccgccgaatgtagattaaaatctgttccagaaatgggatatcatgccgataaagatttaaaaggtgaattacagctccgtgggccacaagtcttcgaaagatattataaaaatcccgacgagaccgcaaaggccattgatcaagatggttggttttctaccggagatgttgcatttattgatgtaaagggccgtataaatgtcattgatcgggtcaagaactttttcaaattagcacacggtgaatacatcgcaccagaaaagattgaaaacatctacttatcatcatgtccctatatcactcaaatatttgtcttcggggactctttaaagacatttttgattggtattgtgggcatcgacgttgatgcggttcgatcgacattagctgcaaaacatcctaaagtaagaaaatggactggcgaacaattggtagagaatttaaatgaagataaaaagttgagaaaggagtttttaaacaaaatcaacaagtgcatcaacgggctacaaggctttgaaaaattacataatatcaaagtcggaattgagcctttaactctcgaagatgatgttgtaactccgactttgaaaattaagcgtgccaaggcctcaaaatttttcaaagagacactgtaccagttatacgaagaaggttcattaatcaaagaagaaaggctgtag

SEQ ID NO: 708 - DNA, 1026 bp, Saccharomyces pastorianus
atgagtgcaggtattggcgaatcacgtacagaactgctcacttggctgaatgggcttcttaacctgaactataaaaaagttgaagaatgtgggactggagcagcatattgccaaataatggactcaatttatggagatttgccgatgaacagagtgaaatttaatgctgcggcagaatatgagttccaaacaaactacaaaatcctacagagctgttttagcaaacacggaattgagaaaaccgtttacgtcgataagttgatcaggtgtaaattccaagataatttagaatttttacaatggttgaagaagcattggattcgatataaagacgaaagtgcgtatgatccggattcccgacgcaagtaccgtcctattatgacgaacaatagcgccaccaagactcgcacgccatccaaccctatcagtacaagaaggtcattaagcacaggaacaagcaactctataccaggaggcccaccaataagacactcttcactaggggtgacgactggtaggaaaaccagtgctacccaaggtcagttaaatgcgatgcaagctgaattatccaatgcacaggaaacaattggttcattgaatgaagagatagaacagtacaagggaacagtgagcactttggagattgagagagagttttatttcaacaagctgcgcgatattgagatcctggtccataccacgcaagacttaattaatgaaggcgtttataaatttgatgatgagactatcacgggccgtggcgctgggaatggcggtgctttattacggtttgttaagaaagtggagagcatattgtatgccacggcggaaggatttgaaatgaatggtggcgaaggtgaacaacaggaggaagatgggggaaaaagtggtgctgtacagaacggaaatatgttcgaaaacggcaatggcaatgtccaggaagataacgatgacgtgataatgcagaatgacggaagtcaggttggtgtgaacagtaatttgattattgacgaggagactttttga

SEQ ID NO: 709 - DNA, 2295 bp, Saccharomyces pastorianus
atgatgatgtggcaacgatgcgcaaggggtgcgccacgctcgtggacttcactcccgctcgccagagctggtgccgtatcaactgcaaggccgattctgctgcgctcattcgtacgcttgcccgctggtcgcagtggctgtcgcagtctaacaaccaccaatacggtgtaccgtgccgcctccgtacgttcattccatctctctgcagcaagatccaatgaaaacaagccaaacgataccaaggacaaggacaaggacaaggacaacaacaaaaacaagaatgaagaagacgatgccgaccccaacaagaagaaggagttcaactcgccatccgagtacttcaggtccaaggaattcaaaaacacaatgtttttgaccatcgggttcaccatcatattcaccctactgacgccctccaataacaactccgcagacgattccaaccgcatcctcacatttcaggacttcaaaacaaaatacctggaaaagggcctcgtttccaagatctacgtcgtcaacaagttcctcgtggaggccgagctggtcaacacgaagcaggtcgtctcgtttaccatcggctccgtagatatctttgaagaacaaatggaccagatccaggaccttttgaatatcccgccccgcgatcgaatccccgtcaagtacatcgagagatcctcccccttcgccgttctgttccccttcctgcccaccgtaatcttgcttggtgggctctacttcataacaaggaaaatcaatagctcgccccccaatgccaacggtggcgccggtggtggaggtcttggcggcatgttcaatgtcggcaagtccagagcaaaacttttcaacaaggaaaccgacataaagatatccttcaagaacgttgctggctgcgacgaggccaaacaggaaatcatggagttcgtccatttcttgaagaacccggccaagtacaccaaactgggcgccaaaatcccccgaggcgccattctttccgggcctccaggtaccggtaagaccctcttggccaaggccaccgcgggcgaggccaacgtgcccttcttttccgtgtctggttccgagttcgtggaaatgtttgttggggtgggtgcttcccgtgtaagagacttgttcacccaggccagatccatgtccccctccatcatcttcatagacgaaatcgacgctatcggtaaagaaagaggcaaaggtggcgctcttggtggcgccaacgacgaaagggaagccactttgaaccagttgctggtggaaatggacgggttcaccacttccgaccaagtcgttgttcttgccggtacaaatagacccgacgtgctggataacgccctgatgaggccggggagattcgacagacatattcaaatcgactcacccgacgttaatggcagacaacaaatctatttggttcacttgagaaaactgaatctggatcctcttctcaaagacgatatggacaatctttccgggaaactggctacattgaccccaggtttcaccggtgcagacatcgctaatgcttgcaacgaggcggctttaattgctgccagacacaacgatcaatacattaccatttaccattttgaacaagccattgaaagagtcattgctgggctcgaaaaaaagacaagagttctttccaaagaggaaaaaagatccgtggcttatcacgaagccggccatgctgtttgtggttggtttttgaaatacgctgatccacttttgaaagtaagcatcatcccacgtggccaaggtgctctgggttacgctcaatacttgccggcagaccaatatttgatatccaaggaccaattcaaacacaggatgatcatggcccttggtggtcgtgtctctgaagaattgcacttcccctccgtgactagcggtgctcatgatgattttaaaaaagtaactcaaatggcaaatgcaatggtcacgtctttaggcatgtcgtccaagatcggctatctatcattcgaccaaaatgacgggaatttcaaagtcaacaaacccttcagcaataaaacggcaagaaccatcgatttggaagttaagtccattgtggatgatgctcatcaagcttgtaaagaattgctaaccaagaacctggacaaagtcgaccttgtcgccaaagagctgctgcgtaaagaagccatcaccagagaagatatgattagattattaggtccaagaccattcaaagagagaaatgaagcttttgaaaaatacctggatccaaagaaaactgaacctccagtggcacctgcaccaacgaactaa

SEQ ID NO: 710 - DNA, 663 bp, Saccharomyces pastorianus
atgacaagcatagacgcgttcggcaacctcgagcaccgaatggatgcgttccagcaagacgtggcccaggtgctgtcccgccaacaagaccacgcgcgccagcaactgcagcgtttccaagaggaaatgcgccacttgcacggccagcatcagaacctcgttgacgaactgcaacggcttgccgcccagcgcacagctctgcagcagcagattcgcgcggccgagcaggccaccagcaccaccagagagcagtggcgaggataccacgagcgcaagggcgagctgtctagacggcagttgacactggcggctcagtcgcgcgagctggactcgctgctgcaacagcgcggcgcggagtgtgcgcggttgcggcagcgctgggccgcccaggtgggtaacgacgctgcggaggtcgcgttgtacgagcggctgctgcagctgcgcgtggtgcccggcgcgcgcgacgcgcgcgacgtgcggttcgtgtttggtgacggcggctgctgggtggaggtagcgatgcacggagaccacgtgctcggcgcatgtcacccggagctggacgcatccagccggggaacgcttgagcacgtgctgaccgtcgagggcgacctcggggcgtttctggtcgtggcacgcgatatgcttctgcgttctttataa

SEQ ID NO: 711 - DNA, 267 bp, Saccharomyces pastorianus
atggcaagttcggttccaccagggggtcagcgtattctacaaaagagaagacaggcgcaatctgtcaaggagaagcaagcgaagcaaactcctacttccgccagacaggctggtcacggcgggtcgtcgagctcggtattgaagttgtacacggacgaggccaacgggttcagggtcgactcgcttgtcgtgttgtttctatccgccgggttcattttctccgtcataggcctgcatctgttgtcgaagtttacacatattatataa

SEQ ID NO: 712 - DNA, 1365 bp, Saccharomyces pastorianus
atgggtctctgcgcatcctcggaaaagaatggtagcccttctgcctcgcagaccaccagcactgccggtggcagtgctggtggggccaaggcatcgtcacagcagcagccgcaagggcatcgacagaaaattacaaagactgcaggcaggtccggtcagcagcagcagcaacaacaacaacaacaacagccggagccggcagcgcctgcacacagtgtaaaggacaacaacattaccgccatcaacgcgatatctcccacggtcaccgccaataccaacggatcgcaacagatcaacatcgactccgctttgagggaccgggcgaccaacggcccggcgcagcaaacggtttccgatgcctccagtggcagcaacaacaaggagctcaaggtgctattgttgggggccggtgaaagtgggaaatccaccgtcctgcagcagttgaagattctacaccagaacgggttcaccgaccaggaaattacagagttcattccgctgatctaccagaatctgttggagatcggcaagaacatcatccaggcgagaaccaggttcaacgttaacctggagccggactgcgtcctgacacagcaagacctgtccgagatcatgtcctttgaaatgcccaataactacacagaccagttcccaccagacctggcgaccatgattgccgaactatgggcactgccctccacacagcgcctaatcagcggccccaatgcatcgaagttctacttgatggattctaccccttacttcatggagaatttcaccagaatcacctcgcccaattacagacccacccagcaagacatactgagatcaagacagatgacctcggggatcttcgacaccgtcatcgatgtgggctcggacatcaagatgcacatctacgacgtgggtggccagcgctcggaaagaaaaaaatggatccactgcttcgacaacgtcactttggtcatcttctgcgtctctctgtcggagtacgaccagtcgctgatggaggacaagaaccagaacaggttccaggagtccctggtgctcttcgacaacatcgtcaacagcagatggttcgcccgcacatctgtggtgctcttcctaaacaaaattgatttgttcgccgaaaaactaaacagagtacccatggaaaactacttcccggactacacaggtggtgcggacatcaataaggctgccaagtatatcctttggagattcgtccagttgaacaggtcgaacctaagcatataccctcacgtcacccaagctacagacacctccaacattaaattagtgtttgcggccatcaaggaaaccatcttggaaaacacattgaaagactctggggtgctgcagtaa

SEQ ID NO: 713 - DNA, 1572 bp, Saccharomyces pastorianus
atggctagtgctgcagtgatgatggacgtggactcctccggtgtcaatgatttgcaccattccgaaaagaaatacgcggaacaagaccaaattcaagagcttttgaacgtcttgaacgagatctccaagaccaccaccacactagaccccagatacatatggaggagcttgaaagacttgagctctcttagaaaccaagagcttttaaacgcagaaattctatctttcacagtgaatgtcctgtaccctgattcctcgtcatttaaaaaaaatctactgaaattcattaattccaaccacaagtcatcagtatccgactcagacgagcttagaaactcgtacccggcttcattttacacggtgaacactgaaaaaaagaccattgaagtgacacctgaaattaactgtttcatccatctcttggttcaattatttttatgggacagcaagaaattggaagagctggtggcattcaatagaaaggtcgttatcccacaattgttgtgtttttacaacctgcgttccttaaatctgatcaacgctaagttatggttttacatatatttaagtcatgaaacattatcacgtggctgcatggaaaacgataacgataatcaaaatataattttgaggtccaccatgatgaagttcttgaaaatcgcctctttaaaacacgacaatgaaactaaagccatgttgatcaacttaattctaagagatttcttaaataacggtgaagtcgatagcgcgtccgatttcgtctccaagttagaatttcctcacatagacgtttccagttcattggaggcaaggtacttcttctacctatccaaaatcaatgctattcaattggactattccaccgcaaatgaatacattattgcagccataagaaaggctccacacaactctaagagtttggggttttcacagcaatcaaacaaattacactgttgtattcaattactaatgggtgatattccagaattatcatttttccaccaatcgaatatgcaaaaatctcttctgccttactatcatttaaccaagaccgtcaaactaggtgatttgaaaaaatttacatccacaatcacaaagtataaacagcttttattgaaagatgacacttaccaactttgtgtcagattaagatctaatgttattaagacaggtataagaatcatctctttaacttataaaaaaatctccttaagggatatttgtttgaaactaaatttggattcggagcaaactgtagaatacatggtttcaagagctatcagagacggtgtcattgaagctaagatcaaccatgaagacgggttcatcgagaccacagaattattgaacatttacgacagtgaagatccccaacaagtatttgatgagagaattaaattttccaatcaactacatgatgaataccttgtatccatgaggtaccctgaggataaaaagactcaacaaaaagaaaagaatgaaaacggtgacgacgatgatgatatgcttgatggcgatctattggatgacatgtcagatatctcggatcttgacgatttggggttcttataa

SEQ ID NO: 714 - DNA, 2067 bp, Saccharomyces pastorianus
atgacgacagaagaaccagcgccaaaacactctgattctgaaataggaattaaattggcattggatccgaacttaataacattggcactaagctctaactcaaactccaatcttcattcaccagcatctgacgaatcagtgcctagatccggagaaaaggtggatgacaatgctcacttagaaggtgatgaagtggagaacaagacaaagaaggataatgacaagagactgaaatttctgaagaataaaaattcattggtcagcaatccacatgaaatttacggttccatgccattagaacaattgatcccaatcattttaagacagcgtggtccaggatttaagtttgttgatttgaatgaaaaggaattacaaaatgaggctaatcaacgcgataacgatgatgccgatgacagcaacaacaacgagaagaaagacggcaatgctgaggatgaaaacgtacaagtgggagaggatttcatggatgttgattatgaagacaaaaatgatacatcaaatctaatcaacgaagcggagcacaagacaaatgaaaccggtgaggcagatgatagcgtagggacgatgatgacacaagaacaatttgtcaagagaagaaaagacatggtagaacatatcaatttagctatgaacgaatcgtctctagctctagaattcgtttctttgttactatcaagcgttaaagaatctacgggcatgtcttcaatgtcaccgtttttgagaaaagttgtaaagccttccagtttaaacagtgataaaataccatatgaaccgcctacaaaggaggaatttattgagttagatatattaaacaaaggctggaagttacaaagcttaaacgattctaaagatttattacgcaggagcttcaataaattaagttttatcttgcaaaatgagcatgattattggaacaagataatgcaaaatatcagcaacaaagatgttattttcaaaattaaagatagatctaccggtcagaagctattagcaatcaaatatgggtatgaggattccggatctacgtatagacacgatagaggtattgccaacataaggaataacattgaatctcaaaatctggatttgataccccatagtagttctgcagttaaaagtacggatttcctacattcggtgaagaaatttttaagagtccgcattttcacaaagattgaatctgaagatgattacatattgagtggggagagtttaatggatggcgatggcgataatgatgagactgagacaaaagacattagaaaacagatacaaatattgaaaaagattatttttgaaaaggaactaatgcatcaattgaagaaagaatgcgctttattgatttcatatggtgtcagtattgaaaacgaaaataaagttataattgaattgcctaacgaaaagtttgaaattgagttattgacccttgatgatgactccatagtcaatcatgaacaagatttacctaaaatcaacgacaagagggccgatttgatgcttgttatgctgaggttattattggtagtcatgttcaagaaaacactgagatcgagaataagttcacctcaaagagtcaccaacttgaaggaagacaatgatgtgctattaattcgtcccatcctgggtaaagttagatttgccaattacaaactgttactgaaaaaaatcataaaggattatgtgctggatattctccccgggtcgagcataacagagactgaaattaagagagaagaatcccaagaaaatgaaaatattgatgacgaaaacataacgaggttgaacaaagaaatccgtgcctttgacaaactgttaactgtacccaagcgtgaactcgagataaacctaccgccatccgagcacaagagccccagattaagcctaatactagaaagtcctaactattgtaacgcattgattcacatcaagtttgaagatacctctgaagccaacgcggtcacctttgacacgacattctctgacttcaaagaagtcgaggacttcctacatttcatcgtttctgaattcattcaacaaaagaagatgtaa

SEQ ID NO: 715 - DNA, 861 bp, Saccharomyces pastorianus
atgacgtacacattggctatcttaggttgtggtgttatgggccaagcgctcctttcagccatttacaacgctccaaaggctgctgacgcagccatcgctgcattctatccttccaagatcatcacatgtaaccacgatgagcccagtgcacaacaagttactgatcttgtcgaaacattcgacgagtcacctaacggtatcactgtggacagcacctacggcaacaacgtcagcgctgtggaagaggccactgtggttcttcttggtacaaagccatttttggctgaagaagtattgaacggcgttaagaaggtcattaagggaaaactgcttatttccttggctgccggttggacaattgaccaattaacccagtacactagcactgtatgtcgtgtaatgactaacacacctgccaaatacgggtacggctgtgctgtggtatcttattctgccgatgtttccaacgagcaaaaaccattggttaacgagttgattagtcaagttggcaagtacgtcgaattgccagaaaagaatatggacgcagctactgcattggttggttcaggccctgcctttgttttgttgatgctggaatccttgatggaaagtgggttgaagttgggaatcccattgcaagaaagtaaggagtgtgcaatgaaggtgttagaaggcacagtcaagatggttgagaagagtggtgcgcacccatccgtcttgaagcaccaagtgtgcacaccaggtggtacaaccattgcaggattgtgtgtcatggaagagaagggtgtcaagagtggtattatcagtggtgtggaggaagcagcccgtgttgcttcccaactaggacaaaagaagaaatag

SEQ ID NO: 716 - DNA, 2763 bp, Saccharomyces pastorianus
atgtcaagcggtagtactattgtttcgcccgacaagtcggaacgaacattcagacatgaggcagaactacccaaattaccattacccagattgagtgacacgttgctacacttgaagcaaagtttagagccactgtactacgcggatggctattatcaacatcccctagatccagagcaaattgaggatctgtcttccatcatcaacaattttgaaaaaaatccagtgagtgagaaactgcaatccaaattacaaaactatcacgattctagagattgctatcttgacgaattgcacctagacatcaacaatcatacatctacaagagaaatccaggacgacgtgttgcccagaaacccgttcttggtcctcgcggacgatgctttaccaaatatctctcaagccgacaggtctgccgtcttggtacattctgcagcaagatttgtttcggctttgaagcaagatttgttgcccccagacattaatgctaccagcggtaagccattgtcgatggcaccgtttttgaacttgttcggtactactcgtagtcctgtcttccagcacggtgaagttgaaaattttaatttgaataatccttacactgcatctgacctggaagacccagattattcagatgatgaggacaggtttagtgaagctactgaaaaggaattggcagaccggaagcaaaaacgcaaagaagacatatttactggtaatggtataaccattaaaaagcacccggatagcaaacacatattgatcatctccaggggccaatattatactttggaggtgttggactctatgaataggatcatatataccacggctgaattaaccacaattttccagcatattataaatgattcatcagacagtggtaaatcaaccgcactaggcagtttaacttctcattcctttaggaactggaaatacgcaaggaaaaggttgcaaaaaagatacccaaacgaattatatcgcatagactctgcgttattcgttcttgtgctggacgagtcccaggaggaaactattaatagtgacgacgacgccgccgacattagccagaaatttaataggactatcactgaacgagacaagaaatgcacttctgcaaattgtaaaagagtatattatggtacttctataataaacaacaaaggccatcaagtgggctcatgtgtctctcgttggtacgacaaattacaattggttgtcactgcagatgccaaagccacggtgatttgggattcattcacctgtgatgggtcagtcgtgcttagattcacgtccgaaatttacacggaatctgttttgagattagccagagacgttaatgccggcgatccgcaattctcgctatggccaaacgtcacccaaacagatcctgaaactaaaaaattaatgacggcgactataaatgcaaatagcgagggcccaaccgaaattgatcctaaatcagttgtggaaaaaatcgattggtcctttagcaacatcctgaatacacatgtacatttgtcagagacaaaactagctgatttgatttccaaatatgacattgttcgctcttctattcccttgggtagaaggtcagcccagagattaggcatcaagcctgactcaatggtgcaagttgctttacaaattgcccattatgcattatacggtagaatggtctttggatttgagccgatatccactcgtggtttcaaaaattcaaggtcgtcatttattaatattcaaaatcaggaactcctagaactatgtcagttatttatttctagctccatcgatgggacggggaaactggacaaatttattcaaacctgtgaaacgcaccatgaaatggtgaaaaatgccaaatcaggtgtcggttatgaaaagcatttcaatgctttgaagtatcttttcaagtttcatgaccattttggtatctccctaaatggtgatgaatcatctgttgcaaaagacctttttgaaaacccattggttttgcctttctcacaacctgaattgattgtcgccaattgtggtaatgctgccactacaacattcggtataacgcctgctgtacctcaaggatttggcataggttacattatcaaagatgatcaaatggatttaaccgtgacatcgcaattcagacagggcgacagattgatgttcatgttaaactgggtcttaggtgaaattcgttcgtattggaggatgtctcgcggtacttcccataacaaaactggtgtaaagattagccctgtggtagataaattgtatgaaatggacaatgcaatcaacaacccctcaaaacacaatggctacacggtttctggacctcgccaaacatcttcatcatcacaagtaaatttgaacagatatggtggattttttgatttggaaagtcacatagacagtagaaatatctccaaatcaccatctttgaagaacttgcagaaaaacttcaatgggttgatggtgaatgcagagaatgatcattcaagctcagcagtatccgtcccaacagaaaaggaaaaattgaacacaggccatgaaattttacaaattcaaccacgagagttggccagtaacagattggaagcaggagaagagacggatattgatgctggcaataccgatagcatatcatcgtcttcttccgctacgtctttgagttccaagaaacgtaacgtcatcaactcgagattcgacatcgattttgatcgtagtcgcgtgggcagaaaagtcgctactttggatcaataa

SEQ ID NO: 717 - DNA, 1584 bp, Saccharomyces pastorianus
atgagcgacttacaagatcaagaaccgaccattattatcaacggtaatttggacccagtcggtgaaccagatttcattgaagaaactgaagttgtagctcaagaggcagaagaaaatgaagaagccgacaaaccaaagaagaaagttgcattcactggcttggaagaagatggggaatctgaagaggaaagaagaaaaagagaattcgaagaaggtggtggtttacccgaacaaccactaaaccctgatttttcagaattaaacccactatctgcagaaattatcaacagacaagccacgataaatatcggtaccattggacatgttgcccatggtaagtccacagtcgttagagctatttctggtgtccaaacagttcgtttcaaggatgaactagaacgtaacattactattaaattaggttatgccaatgctaaaatttacaaatgtcaagaacctacatgtcctgaacccgattgttatagatctttcaaatccgataaagaaatcaatcctaaatgtcaaagaccaggttgtcctgggcgctacaagttgatccgtcacgtttcgtttgtcgactgtcccggtcacgatatcttaatgagtactatgttgtcaggtgccgctgttatggacgcagccttacttttaatcgcaggtaatgaatcctgtccacaaccccaaacctcagaacatttagctgccattgaaattatgaaattgaagcatgttatcatcttacaaaacaaggttgatttgatgcgtgaagaaagtgccttggaacatcaaaaatctatcttgaaatttattagaggtaccattgccgacggcgctccaattgtaccaatctccgctcaattgaagtataacatcgatgctgtcaatgaatttattgttaaaactattcctgtaccaccaagagacttcatggtttctccaaggttaatcgtcattcgttcatttgatgtcaataagccaggtgctgagattgaagatttgaaaggtggtgttgccggtggatctatcctaaacggtgtcttcaaactaggcgatgaaatcgaaattagaccaggtatcgttaccaaggatgacaaaggtaaaatccaatgtaaaccaattttttccaacatcgtttccttattcgctgaacaaaacgatttgaaattcgctgttcctggtggtttaattggtgtgggtacaaaagttgaccctactttatgtagagccgatcgtcttgttggccaagtcgttggtgctactggtcatttaccaaacatttacaccgatattgaaatcaactatttcttattacgtcgtctactaggtgttaaaacagatggtcaaaagcaagctaaagtcagaaagttggaaccaaatgaagttcttatggtcaatatcggttctaccgctacaggtgctcgtgttgttgccgttaaagctgatatggcaagattacaattgacatcacctgcttgtactgaagttaacgagaagattgctttatcgagacgtattgaaaagcattggcgtttgattggttgggctactattaagaagggtactactttggaaccaattgcttaa

SEQ ID NO: 718 - DNA, 825 bp, Saccharomyces pastorianus
atggttgagtcggacgaagattttgcacctcaagaattcccacacacagaaacagatgtcatcatagatgaacgtgacaatgaggggtattcctccgacgagtttagcggcacattaagcagaagggcttcgagtatattttctataaacacagctccgttggctccgccaaatgctaccgacatacaaaaatttacaagcgacgaacatcattttagcatgatgaggaatttacatatggcagattatattactatgttaaacgggttctctgggttttactcgattgtgagttgtttgagattcacacttacaggcaaacctcattacgttcagcgtgcccatttttttattttattaggtatgtgtttcgacttccttgacgggagggtggcacgtctcagaaatagatcgtctctgatgggtcaagaactggactcattggccgatttagtctcctttggtgtggctccagcctctattgcgtttgccattggtttccaaaccacacttgatgtcatgattctgtcattcttcgttctatgtggtttggcgagactagcaagatttaacgtcaccgtcgcccagttgcctaaggattcttccaccggtaagtccaaatactttgaagggttaccaatgccaaccaccttggctttggttttgggtatggcgtattttgttagaaacgggtggatttttgacagcatcccattcggtattttcagagaagaccaattattggaatttcacccaataattctggtattctttattcatgggtgtggtatgatttcaaagagcttaaagattcctaagccatag

SEQ ID NO: 719 - DNA, 1272 bp, Saccharomyces pastorianus
atggctggcgacaactctgaaaataaggatgcctctatgttagatgtaagcgacgcagccagcaactccaataagaacgatggaagtaactcaagcgcaaaccaaaacaacgaggccgccctggcgtacacattttctcaaatgaatgttgacaatccaaacgaattagagcctcaacctcctcttagacataaatcgagtttaatttttaatgatgacgatgacgacgaaataccaccgtattcaaaccacgcagaaaacgggtttggagaaactttcgattccgatgacgacaacatcggcggtagcagctcgagtagtatcgacagcaacgaagccgatggtcatgatgcagatatgacagcaaataccctacaaaatacggattatcaatcaactcagcaagcagacgtgtcccataatcaatcacctcaacagcagcaagatgaacagcagggtagtgtggcgaacaaaaaaataagagctatgatgcttccaattgatatcacttggcaacaggggggtagtaaggtgtatgttaccggttcattcactggatggaggaaaatgatcgggctggtaccagtgcctggacagccggggatcatgcacgtcaaattgcaattacctccaggtactcatcgtttcagatttattgttgacaatgaactaagatttagtgattatttgcccaccgcaactgaccaaatgggtaattttgttaattatatggaagtaactgcaccacctgactggagcagtgaacctcagcaacaagcatccgataacaaaacaaatcatgcagatgatagtcagtctgcgaagagaccaatgagcgctcggtcaaggatcgcattggagatagaaaaggaaccggatgacatgggcgacggttacactcgtttccacgatgaaaccccatcaaaacctgatttagaatacacccaagatatacctgcagtgtttactgaaccgaacgtaatggagcaatattacttgacacttgatcagcagcaaaataaccatcagaatatggcttggttgactcctccacagttgccacctcacctggaaaacgttattctgaacaattattcaaatgcgcaaactgataataacgaaaacacctctggcgcccttcctatccctaaccacgttatattgaaccatctggcgactagcagtattaagcacaatacattgtgcgtcgcgtcaattgttcgatacaagcaaaaatatgtgacccaaatactgtatacaccgctacagtag

SEQ ID NO: 720 - DNA, 600 bp, Saccharomyces pastorianus
atgagtaaaatacaggtggcacacggtagtcgactagccaacctgatcgattataagctgagggttcttacccaagatggccgagtatatatcgggcaattgttggcgtttgataaacacatgaatttggtgctgagtgattgtatagaggaacgagtacccaggactcagctggacaagttgagaccgaagaaggactctaaagacggtgcgtccttgaatatcaaagtagaaaaaagagtattgggtctgaccattttaagaggggaacagattctgtctacggtggtagaggataagccactgctatctaaaaaggaaagattggtgagagatcaaaaggaaaacaagcaagcgcaaaagcagaccaaacagagcaaggataaagaaaagaagccagggaagatcaccaaatcgaatgcggcgaatgccaagcatagcaataacaccgatagagaaatagcacaaccttcctcgagcaggtacagcaatagcggtggtcccggcgatagcattagtacaaatagatcgaggttcaacaatgaagcgcctccccaaacaagaaagtttcagcctccgccaggcttcaaaagaagataa

SEQ ID NO: 721 - DNA, 672 bp, Saccharomyces pastorianus
atgagcagcgaggactatgggtatgattacgacttgttatttaaaattgtgctgattggcgattccggagtagggaaatccaatctattgtcaagatttacgaagaacgaattcaacatggattccaagtccactattggggtcgagtttgccaccaggactctggagatcgatggcaagaggatcaaggcgcagatctgggatactgcgggccaggaacgttacagagccattacttctgcttattatagaggggctgtcggtgccttgatcgtatacgatatcagtaaatcaagctcatacgagaactgtaaccactggttatcggagcttagggaaaacgcagatgacaacgttgcggttggtcttattgggaacaagtctgatttggcccatttacgtgctgtacccacagaagagtctaagacatttgctcaagaaaaccagttattatttacagaaacaagtgctttgaacagtgagaatgtggataaggcctttgaagagctgattaatactatttaccaaaaggtcagtaagcaccaaatggatctcgcagattctggtgttaccggaaatgccaatggcgcatctgctccaaatggtccaacaattagtttgacaccaactccaaacgaaaacaaaaaaaacagcgggaataactgctgttaa

SEQ ID NO: 722 - DNA, 3240 bp, Saccharomyces pastorianus
atgcggtcctttatcaaatctcacaagaagtctacctcgtttgacgatagtcctaaacgacatagcaacttcagcactaatactaataatagccctcaaaggtcgagcaatgattcattggagtttctaccatccacgccatcacaaatgaactatgataatattcccacaacagcaaaacactccccgggtttcgagtccttccaccgtttggcgaacaaaacctcgaagttgttcaaaaaaacatcaaactcaaatttgaactcttatctagcttccaatccagctcccaattcaaatgcacccccttcaaactcattcatagttcagaatccaccttctaaacaggctgcaccaccgccaccgctgccacttccactcttacctgcctcgtccacttcttcttcttcccaatacgacaatgacgttgaatctgctgggttaagaaattcttcccctaccaacggtctcaataaggccacggactctttgcccgccattaagggaaccatcacacattcgtggggggtctcctccaagattgaaccgcatgttattatactgaacgaccctgctttccccgcatcgaatacatctgacgcgacctccacgaagcaatttagacattcattactcgtgaatgaagcatcgtcttcttcgtcttctaacttagaacctgctataaggatactgaataaatgcaagaccagtgatagtggtaataatggggaagataatgatgaggatgaatttgatgacgagttcccaaagaaggaaaagcatatctacaaagcgctagcgttggctaaaaaccgaaacagacaagcaagaatccattcacatgacgatataataaatctggggaagacatcacaaatggatatgagtttactagctgctgcgttttccggaaactctactaataatgaccagtcttctaatgagcagaacgacgagaaaattttggacatagagagagttgctaccacgtccactttgacttcatctgaaaactcttcactaataaataaatctcccgaattttataatcaaccgctccccatttcccccaagatacgacatggtgatttattatcaccgcatttagacgtcaataacaataaacatcaaatcgaaatgtcacacaagaaaaaggtaagaatcaacttagacaagaaagaaagaaagaacatttattttttcaggaataattctgacgaatacactaacaatgaaaatgtaacctcagaaatgtacgaaatccatgaccttaatgaagaatcgcctggcgaagaagcgggagaagaagacgacgacgatgacgatgatgacgatgacaacgaatcagaattttcttttgaatatgcgggaataaacgtaaggacatcgtcagtcaaatattactccaaaccagaaccaacggccaacgtatacattgacgatctttatgaagacgagatttttgatgacgatatgaattgcatagaggatggcgaaagcgagatggaggagaatgaaatgggccatttatcacccgggtttgaagaaacagccctaaacaacaacaaagttaaaaaatataatgacctttttgcattgaccgatgacgatgacgatgacgatgacgatgatggtggtgatgatggtggcgatgatggtggcgatgacaatgatgatgattgcgaccaagaagaacttggaagtagaaaggaaagcaacggcaatgagtatgatgattactttgtagaaggtgtagctgatgacaaagaatcctttgatgaattgaccatattgccgagaactgaaattgtcaaaaaacccattcagaaatatagtgatctctttgacttgtctgatgaagacgaggaggaggtggctcgatctgatttagagtccaaaagtttttctgatgaagctcccagtatggacagtgataatactgcattgcatgggaagccaacatcgacaatctacagccaatctaataaaaatataatgacacctgggataacatcaaagaataacctgggatcaaaaggtacttcaagcgaccgtaatgagcagatgtctcctatgaatacacctctcgaatctactatttctaagcctaaagtcgaatcattttcagatatttttaatatagatgatagcgaaagtgatagtgaaagtgaggatagaaccatgctcaacaatcctgatgatctgatatccaataatttgaaaaacgaatcttccttagagactgctttacatgaaaacaacttagaaccattttcttccaataatcaacttttacaattgcctcaaacacccgctaaaatatttattgcgccaagtaattccgctatgtattcacaaactagtacaactagcgattttggtgacgatgatgacgacacagatagtatttcgcgaactccattccaacttatagaaccaagcttttcaaacccactcccctatgagagctcacattatcccttgccattcaatacccctccacttccaccacctgcaagatcgcaatcactaaaataccatgatttaaactgtgacctggattcggaactccccagaccaacgagcaacctcttcttcattaatgaggctgaagaagatgaatacaatcagaaaaataaaatccaagattatgaccattatgatattgatgaaattaatggtgttcccgaagatttcaatttttcagattctgaaagagatgatcctaaccgtggtacattgaaatcgcctttgcgacgtggttccagaaataaagatgtatctccattttcatctttgtcctcgtccttcagaagtacacatagttttaatgggaaattgacaatcaaccagggtgccaaagagctggctccaatgaaaaataagatagaattgaccaacaagactgtcacctttttcaataacaatagcaattggaacacctacgataacaactcgctctcacggaagtcttcattgcaaatgagggacaacaaatatcaaatgcatacctctcaccaaaacctggaacttccaaatgttctttcacaacaaccgaaaaatcaaaccgaactggacgaaaaagataatgataactatgtaatctcacccactttaccgaaaactgtaacgcctaccaattcattcagcaaacctacatcagaattcttgaacgattattcattaagtcccatccaggagacaccatcttctgttcagagctcgccaaggaaagcgtag

SEQ ID NO: 723 - DNA, 555 bp, Saccharomyces pastorianus
atggacgcgttcagcttgaagaaggacaatcggaagaagttccaagacaaacagaaactgaaacggaagcatgccacgcccagcgacaggaagtaccggttattgaaccgccagaaggaggagactgcaaccgaggagcaggagcaagaacaagaacagcctgaattggacacgaacgaagaccgataccatgaggacccggagctggcgttcgaggacccgaacaccgcagcgaccagcgtagaggtgaatagagtgctgaaagacgtgctgagaagtcggcagctgcaggattacggcaacacggacaccaaccaagcggctagtgccgatgcactgaagaccaaggatctcaaacagatgggtgccgccgagcttaatcgctggttgcaccaacagaacacaacaacaacaaaaacaacggcagcagtaggagccacttcgccgtccgtgcaaagcgagcagccggcagctcgccagcaaggcgctacgccgcccgccgatcttccggaagagttagagacggaccaggactttctcgacgggctgctctaa

SEQ ID NO: 724 - DNA, 1833 bp, Saccharomyces pastorianus
atgccaccagtatctgcatcaaaggctaagagagacgctaagaaagctgaaagagacgctaagaaaactgctgaaggtaaaaccatcagaaagctaggaagaaagaaggatgctacggttgaagaatctgaagcagatgctgccgccagagaaatcaaaatgatgaagttgcaacaagataaggacggtctttccgaccgtgttgtcaccggtgttttgagttcattggagacttcccgtgatatcaaattatcttctgtgtccttgttgttccatggtaaagttttgattcaagattctggtttagaattaaattacggtcgtagatacggtcttttgggtgaaaatggttgtggtaaatccacattcttaaaggctcttgccactagagaataccctatccctgagcctattgatatttatttattggatgaacctgctgaaccaagtgaattgtctgccttggactacgttgtcactgaggctcaaaacgaattgaagagaattgaagatttagttgaaaaaaccattttggaagacggtcctgaatccgagctattggaacctttgtacgaaagaatggattctttggatcctgatacttttgaatccagagccgctattatcttgattggtttgggtttcaacaagacaaccatcttgaagaaaaccaaggatatgtctggtggttggaaaatgcgtgttgcgttggcaaaggctctttttgtcaagccaactcttctattattggatgacccaaccgcacatttggatttggaagcctgtgtctggttagaagaatatctaaaaagatttgacagaactttggttttggtgtctcactctcaagatttcttgaacggtgtttgtaccaatatgattgacatgagggctcaaaaattgaccgcatatggtggtaactacgactcttaccataagacaagatccgaattggaaaccaaccaaatgaaacaatacagtaaacaacaagaagaaattcaacatatcaaaaaattcatcgcatctgctggtacttatgctaatttggtgaagcaagctaaatccagacaaaagatcttggataagatggaagccgacggtttagtgcaagccgttgttccagacaagattttttcgttcagatttccacaagtggaaagactacctccaccagttctagcattcgacgacatttctttccactacgaaagtaacccaagtgaaaacctgtacgaaaacttgaattttggtgtggatatggactcgcgtattgccctggtcggacccaacggtgttggtaaatccaccctattgaagatcatgaccggtgaattgactccacaatccggccgtgtttccagacatacacacgtcaagttaggtgtctactcacaacattcgcaagatcaattggacttgaccaagtctgccttagaattcgttcgtgacaagtaccctagcatttcacaagatttccaatactggagaggccaactaggtcgttacgggttgaccggtgaaggacaaaccgtccaaatggccaccctatcagaaggtcaacgttctcgtgttgtctttgccctgttggctttggaacaaccaaacgtcctattgctggatgaacctaccaatggtttagatatcccaaccatcgactccttagccgacgccatcaacgagttcaacggtggtgttgtcgtcgtctcgcatgatttcagactactagacaagattgcccaagatattttcgttgttgaagacaagaccgctaccagatgggacggctctatcttgcaatataagaacaaattggccaaaaacgttgttttgtaa

SEQ ID NO: 725 - DNA, 966 bp, Saccharomyces pastorianus
atgacatgttctaaagactacagagcgttatatagagatgaaatcaaaaagcagatacgactaaaccaagaacatctgcaaagtttgaagcatccaggcacacaactcaattttgaggtggatccttcagaattaccggatcccgaccaggctcgaaaagtgtttttcttcgacattgacaatactttgtataggaaatctacaaaagtgcaattgctcatgcaacgatcgctgtcgaatttttttaagtacgagttgggtttcgaggaagatgaggcagaacgtctgattgaatcatattatgaagaatacgggctgtctgtgaagggtctgatagaaaataaacaaatagatgatgtgttacagtataatacgttcatagatgattccttacccttgcaagactacttaaagcctgattggaaactaagggagttattgataaatttaaagaagaagagatttggtaaattcgataaactatggctgtgtacaaactcatacaagaaccatgccattagatgtgttaagattttaggcattgctgatttgtttgacggcatcacatattgccattatgatagacctattgatgaagaattcatctgtaagccagatccaagattcttcgagactgccaaattacaaagtgggttggcgacttttgccaacgcttggtttatcgatgataacgaaagtaatgtggaggccgccttaactgtgggcatgggtcatgttatccatttgatagaggattatcaatacgactcagaaaatattgttacgaaggaccattcaaacaagcaacagttctccatactgaaggatatccttgagatccccttggtaatgagaagaaacactttctatccatcttccttcgcaataaaggaaagagaagatgctgaggaagagagtgaagctgtaaattggtcaaagcaccagatcaatgttcagtcgtcataa

SEQ ID NO: 726 - DNA, 1398 bp, Saccharomyces pastorianus
atgggaaccgttgactcatccccggataaggagtttgaggctgtccaagattcgcagatatccgagtttgattctcccttggtaccgactagtgcaaggaacgtcttccgcgatgacgatgatgatgacgacgacgatgacaaggtacggcccaactttatcgttgatacagagaacgatagtctcaacagtgacgatgatttgtcagacttggacggtggtttacttctgccttgtgacaaaccaaagctttccgatgacgttgacccgattttgaagagaagtatgctttccaaaagaaaggctcctagtaatgacgaagacgaagatatctccagaacacccaagaaatctgtcaattacattcctttgaagaattataacctcggaaagagtttcgataccacgattattaccaaaattattaagctacaagacttgaacgacgaaatctctaaatcgcccaggaaaagcactagtttagtggttactagtaatacagtagccaaaagggagttgcaaaaaagcttaaagttttctgggactgttccagagatttacctggatttggttactaaagaaactatatcagataaatataaagactggtattttatctctgaaaactgtcactacgaagagttaacggatttggagatgaaagatatggaccattcattcctgtttgataacggtgcattccaaggcaacgtacctgaattcatgcgctcgaaatgccccaatattgcaaacttgttagttttatttggtatcagcgaaaaaaaatctcaatcattaaaaattcaatataaggagaatgagaactgtaaatatgataaactgtgcaccatttttcccactgaaaaaatgcttaaattcctgatgtactattataagggcgacggtgaggaaagagaagtgtttttgaaaagttttatatgtctgattctggataaaaatgttttcaattccatggaattcgagttcaggctgtgttataaaattttgaaactatttgacgagactcattttataaattcgtatttagaaattgtatgcaaagacgatttcttcttacattataggctattacaaattttccccattttacaaaatgtactactgagaaaattgtttaacgaagaggaagccacaagcgacacaacacgccaaaatctgatcgataagttcaatgaattgtttgactataaaaagtataaaaatcttttgtattttatcttaatgatgtatggttcgaaattcattccttttggtcccaaatcacaagtaacagaatatttcagagactgtatactggatgtttctaatgagacaacaaatgacgttgaaatttccattttgaagggaatattaaatttattttccaagatcagatga

SEQ ID NO: 727 - DNA, 2190 bp, Saccharomyces pastorianus
atgcaagacgaccccgaaaattcgaagttgtacgacctgctgaacagtcatctggatgtgcacggtcgaagtagcgaagaggcgagacaaatgggtggcagcagaagccagaccagcagcagtggtggtgagaacgaagaggatgtgacatttggcggtggattccacagcggtacgttcgactcgatgctggaggcgctgcccgatgatttgtacttcacagacttcgtgtctcccttcgcagcggctgccacgaccagcgtcaccaccaggacaatagaggagagcgttccggctaccaaccacatggaggacgacatcgccatgttcgattcgctggccacgagcaagcccatcgatatagccgcttccaaccagcaaaatggtgaaattgcacagctctgggacttcaacgtggaccagttcaacatgacaccgagcaactcgagcggttctgccaccatcagtgctcccaacagcttcaactctgacattccgcagtacaatcacggtacgctcagcaatagcgtctccaaatcttctttgttcccaccgaatgctaccggaaccaccggaaataataacctttataacagcaacaacagtaacacgaatgccagccagcagtctcaccattctttcaacatctataaactacaaaacaataactcttcttcatccgccatgaacattgccagcagcactagtaccaataatatccaacatccgtttctaaagaaaagcgattccatggggttatcgtcatccaacacaacgaactctgtaagaaaaaactcactcatcaagccaatgtcgtctacgtcattggccaatttcaaaagagctgcttcagtgtcttccagcatgtctaatatagaaccctccggtcaaaataagaaaccgctgatacaatgctttaactgtaagacattcaagacaccactttggaggagaagccctgagggaaacaccctctgtaatgcatgcggtcttttccaaaaattgcatggtaccatgaggccattatctttaaaatccgacgttatcaaaaagaggatctcgaagaaaagagcaaagcaaacagacctgaacattcctcaaaataccacaagtgcaccccccacatcgtcaacaccagtgtccactttaactgcgaagcccgtacgatctaggaagaaatctttacaacaaaattgtatatccagagtaattcccgaagaaatcaacaatgacaatataaataaaaataacaatatccttaccatgaatagaggaggctataactttaattccgttccttcgccaatccacatgagcaaccagcagtacaacagcagtggcccaaacttcaatggaggaagcaatgtaaacttgaattcaaataatttgatgcatcacaattcaaccactatcacccccaatttcagaaggtcttcaagacgaagtagtacttcatcaaatacctcgagttccagtaaatcttcatctagatcagtggtcccgattttaccaaaaccttctccaaatagcgctaattcacagcaattcaacatgaacatgaacctagtgaacacgacaaataacataagcgcaggaaatagtgtggcatcgtcaccaagaattatatcatcgtcgaacgtcaattcaaatagccctttacaacaaaacctgctatccaactctttccaacgtcaaggaatgaatataccgagaagaaaaatgtcacgtaatgcatctcattcctcatcgttcatggctgcatctttacaacaactgcatgaacaacagcaagtggacttgaatccaaactcaagtgcaaattcaaacagaccaaattggaatacaagcaatagtgtctctacgaattcaagatcgtcgaattttgttacccaaaagccaaatttcgatatcttcaacgctccgtcagattcaccgggtatttcaagaccgtcttcaagaaaatctcacacttcgctgttgtcacaacaattgcaaaattcagaatcaaattcattcacttcgaatcataaatacaacaataaattgttcggtagttctacatcacccatgaaatatgacgcgaattcgagtgctggcgaaaaaagtaatgaagatggttccataaagggatcctctaaagaaagttcagcgattgcagatgagttagattggttaaaatttggtatatga

SEQ ID NO: 728 - DNA, 2286 bp, Saccharomyces pastorianus
atgggtgttcctcaaatatgggagtttttaaagccatttcttcaagactctagaattccactacgaaagtttatcgttgattttaatatatcgcaaaaaagacccccgaagattgcaatcgacgcatatgggtggctgtttgaatgcggattcattcaaaatttagatacgaaatcaagatcaagatcaagatcaggaagtcctatccgttcacctcgaagaaatgatatcgaaatcaaccaagattataatggtggccgaggctatacatcgacaggaaaagctgtcataaatttggtatctagattaaaggaattactaagcttaaatgtggaattcttgcttgtatttgacggaattatgaaaccctcttttaagagaaaattcaatcaggaaccaaccgctacttgttatgatgacgagaaagagtactatttaaattgggaacaacacgtcaaaaaccacaaactttatgacaattgccaagggtcggcaacgtcactcgaacctgagtttattaaacttgtacggaaattattggacttgatgaacatttcctacgtaatggcatgtggagaaggagaagcccaatgtgtttggttacaggtttctggagcagtagatttcattttgagtaatgattcagacactttgatttttggaggagaaaaaatactaaaaaattattcgaaattttatgatgattttggtccaacgtcagtagcctctcacagtcctaataggcattatgatagtacggaaccctttgtaactgttgtagatctgcctaggattaaccaagtagctcaagggatttttgatcgattgtctctcttactttttagcgttttattaggcgctgattataatcatggaatcaaaggcttaggtaaaaacaagtcattgaaattggcacaatgtaaagatccaaattttactgtagagttttataacattttcaaggatttcaagacaaaagattcgaaattagaaagtttaagagattttcagtataaggcgtttcaagataggatatactcatattgtaaagaccattccgtcaagatttttgggagaaattattctgtattattaaaccatggttcctttgaaggttggccatcaactgttgccattatgcattattttcaccccattgtccggccatattttgatgaagcagtcctcagcaataaatatataaatatgatgggaaataagaattacaagaatctgaactttaaggaattgtcattttttttgcaaagtttaaatttgcctcaaatttctaatttcgatagatggttccatgattctatgcacgaaatgtttcttttaagagaacttttatcatacaacgagcctggtagtataggtgaaggtaacatgagaatcaccgaagaaaaaacgttgaacaccaatggtaacaaatttcagatgcaatgtttcaaaataaggtacacaacatttttgccaaacattcccatttcttctcaatctccttctaaaaggagtaattctccaagtagaagtaagagccctacacggcgtcaaatggatataatggaacatcctaatagtctctggctgcccaagcgcttgatacctgaatcccatccactggtactccaatattacgaagaacagcgcatagcattagagcagaagaataagaaggggagaaatgtaggaaaaaagagtcagaaattacaaaagaacaatttagacgattttcttagaaagcatgcatcaccgattaaaaatatccaaaaagtagatgaatcgatgaagcaaaccttgaagcccgtgaagaagcgccttttcgtggacacagacgaggacacaagcttggaagaaatatcccccatcatagaattgcccaccaggcataatgatagcgatgatggcgatgattctttgattttcgttcaagaggttacaaacaaccaatcagtgcttgataactcgcctggcaagaggttccgggatcttgctcaaaataaaatgattgacaccaaggacgatgaaacagaagaatcacctttgaagaaatcaagagctggcattggtgagataaaactgccatcacctgacccaaagccatacctgacttctactggcaatattcatttgcaaagaacaaagatacaacctccaaagttggccaatctacgactagagagagagcatttctcagtgcttgaccagcttgtcacagacgcacaagatactgtcgaccggttccttgtagcctatgacagcgccagtagcagtagcgtagaataa

SEQ ID NO: 729 - DNA, 555 bp, Saccharomyces pastorianus
atgtcatcgctcatctctaaaacaattaagtacgatccaaaaaaggataagctaatcacattagcatgtgggtgtttttggggtacggagcatatgttcaggaagtacttaaatgatcgcatagtggattgcaaagtaggctacgcaaatggtgcagaatccaaaaaggattctgctcacggtgtatcttacaagatggtttgcgggggtgacaccgattttgccgaagttctacaagtatcctataatccaaaaatcgtaactttgaaagagctaacagatttctttttcagaattcatgaccccaccacatcgaattcacaaggacctgatcaaggaacgcagtatcgcagcggattatttgctcattcagatgctgatttgaaagagctaactcaaatcaaagcagaatggcaaccaaaatggggtaataagattgctaccctggtcgaacccatcaaaaatttttatgacgctgaagagtaccaccagttatacttggataagaatcctcaaggttatgcgtgccctactcactatttgagagatatttag

SEQ ID NO: 730 - DNA, 1350 bp, Saccharomyces pastorianus
atgtctgctccagctcaaaactacaaaatcgctgatatctctctagctgccttcggtagaaaggaaatcgaattggctgaacatgaaatgccaggtttgatggccatcagaaaggcctacggtagcgtccaacctttgaagggtgcccgtgttgccggttgtttgcacatgaccattcaaactgctgttttgatcgaaactttagttgctctaggtgctgaagttacctggtcttcttgtaacatctactctactcaagaccatgctgctgctgccattgccgcttccggtgttccagtcttcgcatggaagggtgaaaccgaagaagaatacttgtggtgtattgaacaacaattatttgccttcaaggacaacaagaaattgaacttgatcttggatgacggtggtgatttgaccactttagtccatgaaaaatacccagacatgttggatgactgtttcggtctttccgaagaaaccactactggtgttcaccacttatacagaatggtcaaggaaggtaagttaaaggtcccagccattaatgtcaacgactccgtcaccaagtccaagttcgacaacttgtacggctgtagagaatctttgatcgatggtatcaagagagccaccgatgtcatgttggctggtaaggttgccgtcgttgccggttacggtgatgttggtaagggttgtgctgctgctttgagaggaatgggtgcccgtgttttggttactgaaatcgatccaatcaatgctttacaagccgctatggaaggttaccaagtcatcaccatggaagatgcttctcatattggtcaagtctttgtcaccaccactggttgcagagacattatcaatggtgaacacttcatcaacatgccagaagatgctattgtctgtaacatcggtcatttcgatatcgaaattgatgtcgcttggttgaaggctaacgctaaggaatgtatcaacattaaaccacaagtcgaccgttacttgttggcctctggtagacacgtcatcttgttggctaacggtagattggttaacttgggttgtgctactggtcactcctctttcgtcatgtcttgttctttctctaaccaagttttggctcaaattgctttgttcaagtctaacgacaagtccttcagagaaaagcacattgaattccaaaagaccggtccattcggagttggtgttcatgtcctaccaaagattttggatgaagccgttgctaaattccacttgggtaacttgggtgtcaaattgaccaagttgagtgatgtccaatcagaatacttaggtatcccagaagaaggtccattcaaggccgaccactacagatactga

SEQ ID NO: 731 - DNA, 447 bp, Saccharomyces pastorianus
atgttcaacctccaagacgtaataaccacaacaaagaccaccttggcatcaatgccaaacggttacttaccaaaatggttactgttcatttccatcgtatccgtctttaattcagtccagacttacatttctgggttagaattgacacgtagagtctacgagagaaagcctaccgaaacaacacacttaagtgcaagaacattcggtacttggaccttcgtcgcctgtattatcagattctatggtgctttgtacttgaatgaaccacacattttcgagctggtcttcatgtcttatgtcgttgctcttttccatttcggttccgaactgttgattttcagaacctgtaagttaggaaagggattcatgggcccattgattgtttcaaccacatctttggtatggatgtacaagcaaagacaattctacaccggtgttgcatggtaa

SEQ ID NO: 732 - DNA, 432 bp, Saccharomyces pastorianus
atgtccaagaataatttcttgaaagacgtttccgccttaccagacgacgtacttatagaaaatgaaagaggcataacgttgcttggctacccagtgttttcccccaagatcctggtgccaccgtttgacccgcctcagtttcaaagactaaacacggaaaacggctcgctaattcccctgtcaaaaaacaccatatctaatttcaccgaactgtaccctattgatctggccaccgagcgcgttgcaggcaatggcaattcacagcagacaaaatggtttgttctgatggatttcgatgaaagatatgacagcgatgatcaaggttggtgctacagctggaactttaacaattccaggtggaaatctaaaaatgggttggttagaagaagagtctgggtgagaatatccgctgccagtcattcactagactaa

SEQ ID NO: 733 - DNA, 2706 bp, Saccharomyces pastorianus
atggagtcacaaagaggccaccacattctaacgcgactaacgaaaatacgcaaaagacctcagcaacctttaactgacttcaccgaactttatagtagaatcgctaatgaaacaatatattttttgaacttagaagagaaaaagcgatataaagacgcactacaaggctggaaggccttgacaactgacgtgcttttcaaactgacattgatagaacataactatccgagtatccaaacgtacacgaaggatgagctcagtctacaaaatgggattagagaattgtatcataagagtgttatgcatctagaaagagtccaaaagttggttcgggaagaacctgtcaggaaagacgtaccgtcttccaaaacacagaacacacatcgtagttcctccttcacaagaaccacagaaccaccctctgcctttcatatggttcctggaagaatgatgaagacattgcgagataggagtgcatacggctacaaaaaggcatactctaacccatcattaccagcccataataacaatatatctccgaaacccgtagaagaaacggagagtgttagagtaaattttgtgccttccaagcccttatcgaataccgctaccaaacaatataaaaaagccgtcgagcaccacgatcgcccactcaagaaagaaacgggagtatactcagagaaatatgcatcagagccaatactaatagatttaaccaatgacgaggatgacgaggatgactatgaggctggaatagaggagcacagcgtatttgatgaagaagagagcgaagagtttgaattcgatgtctcggattattatgacaattactccgagattgatgaagaagaacaacgacaacgcatagaaaccctaaggagtttggatggaatccaacaaccaatgtccgacttatctgtcacctcttccctatctagtaacaagagtacggaatcgtcaggtcatgttcccgaatcctccttacggtctttaccaaatacggctcccgcactgcctttgttgcccccacctcctccatcaagcactaacagggcatctagcacgggtacgataaaggagtataatttagaatcttatggcactatgaatccgtcaaagactaagcattcccaaatctcaaaattgatgaaaactagtaatgcaacatctctgaagagtactaaatcaaccccaactcttatcgctaaatcaacgccaacttgtgtcgcaaaatccaaaaataactcaacgtccaccgcaaaatccgccacatcatctcccacttcttctttgacagcttcgaaaccaacacttcaaaaacccagaacggcagcaatggctgccaagaaagtattaggcaacagaaaagttgtgaataatttgacaaacaacaccgtgaaaaagactcgtcccgttctgaaatcaaagaccactaagtcttcggtttccagtttgaagaaaaccagcattcatccatctagacccgcgattaatccgaaagcgtcttcgcagagcacgtcttcaaataagaagctaatgaaaacttcaaacgcatccgtcaataaagtgaatcgacaagtatcagcaccaaaaaagacagaatcatctaaagtagatcccgctaaagcagattccactaagtcagaattgaccactggaaacgcaactcccttgaccgaggggaacgaagattcagaagtagacaaaaaggctcttagagaaattctggaagatgaaattattgacagcttgcaaggtgtagataaacaagccgcgaagcaaatttttgctgaaattgtggtccatggagatgaagtccattgggacgatattgcgggattagaaagcgccaagtactctctaaaagaagcggttgtctatccatttttgagacccgatttgttcagagggctacgtgaaccagtcagggggatgcttttatttggtccacccggtacaggtaaaacgatgctggcaagagctgtagccacggaatctcgctccacctttttttcaattagcgcttccagtttgacatccaagtatttaggtgaaagtgaaaaactagtaagagcattgtttgctattgctaagaaactatcgccctctattgtatttgtggacgaaatcgattctatcatgggtagcagaaataacgaaaacgaaaatgagtcgagtcgtaggatcaaaaacgagtttcttgttcagtggtcatcattatcgagtgcagcagctggttcaaacaagaatgagggcactggctccaataacaataacgacgaagatgatacaagggtcctggtacttgccgcgacaaacttgccatggtcaattgacgaagcagcaagaagaagatttgtaagaagacaatatattccgttgccagaggaccagacgagatacgtccaattgaagaagctgctgtcatatcaaaagcacacgcttactgacttagattttgacgaattggtaaagatcactgaggggttttcaggaagcgatataacatctttagctaaggatgcagctatgggcccactgcgagatcttggggataaattattggagacagatagagatatgataagacctataggtctggtggacttcaagagcagtttgcagtatatcaagccgtccgtgtcccaggatgggttggtgaagtatgaagaatgggcttcacagtttgggtcgtctggatcgtga

SEQ ID NO: 734 - DNA, 1176 bp, Saccharomyces pastorianus
atggtaaaggaaacagagtattatgatattttaggtatcaaacctgaggctacagctacagaaattaaaaaggcctaccgtaggaaggccatggaaacgcatccggataagcatccagacgatccggatgctcaggcgaagttccaagcggtgggtgaagcataccaagtcttgagtgatcaagggctccgctccaagtacgacgaattcggtaaggaggatgcagttccacagcaagggtttgaggatgcttctgaatacttcactgcgatattcgggggtgatggttttaaagattggattggggaattctctttatttaaggagctgggcgaggccacagaaatgtttgagaaggaaggcgaggagggcactgctgctactgataccgacaagggaggtgagacctccgatagtggtatgattagacacgatggcaatagggctgaacacctaaggaaggatagactatccagagagcaaagaaagaaacttttggaaatggaaaagaaaagacgtgaagatatgatgaagcaagtcgatgaattagctgagaaactgaacgaaaaaattaccaggtatttaatcgccgtcaaggctaacaacttggaggaatttacaaggaaactggatcaagaaattgaggagttgaaactagaaagttttggtttagagttgttgtacttgttggccagggtttacaagaccaaggcaaataattttatcatgtccaagaagacttacgggttttccaagcttttcacaggtactcgagacaatgctagatctgtcaaatcagcatacaatttgttatcaacaggactggaagcccaaaaagccatggaaaagatgaacgaagttaatccggatgagcttgaccaatacgaacgtgccaaatttgaatccacactggccggtaaggctctaggtgtcatgtgggccatgtccaaattcgaacttgaaagaaaactaaaagacgtttgtaatcaaatcctaaatgatagaagagtgtcttctaaggagcgtctcgcaaaggcaaaggcaatgctattcatcgctaacaagtttgccggcgccagaagatcaccagaggaagccgaggaagccagggtgtttgaagagttgattcttggtgaacaagagaaggaacacaagaaacacagtgtgatcagatga

SEQ ID NO: 735 - DNA, 285 bp, Saccharomyces pastorianus
atgcctggcgttacagctccaacaagaggacaagtgttgtcgttatacaaacaatttatcaagaattccaaccagttcaataattacaactttagacagtactttcttagaagaacaagggacactttcagggaaaatgtgaaccaaaaagatccgaaagtgctaatgaatctattcaaggacgcgaagaacgaattgggtgtcttgaaaagacagtcagtcatttcccaaatgtataccttcgatagactggttgtggaaccgttgaaaggaaggaaacactaa

SEQ ID NO: 736 - DNA, 1932 bp, Saccharomyces pastorianus
atgaagagaaagaacgctgaaggtaaaggatcgaacgagaaggataacaagcaaatttcacttgaagaagataaaattaagggtttgtttaattcaaaaatctgggacaaatccttccaagatggcttaaaaaaggaaattgaagacgcccaaccatacaactggggtaccatccatgagttagtcaacgatgaccttctacgtgcggtccgtaaagagatcgaaactgagattcatttcactaagaaggaaactgacatttatagagtcaaccagagtggtgacttggctaacttgtccggtttggactggaacgacttgtcacgtttgccaaatttgtttaagctacgtcaaatcttatactccaagcaatatagagattttttcggttacgttaccaaagctggtaagttatctggttctaagaccgacatgagtgttaacacttacacaaagggttgtcacctgttaacccacgacgatgtcattggttctagaagaatcagtttcattttgtatttaccagatcctgatagaaaatggaaatctcactatggaggtggcttaagacttttccccagtattttaccaaacgttcctcattctgatccatctgccaagctagtcccacaattcaaccaaattgctttcttcaaggtcttgccaggtttctccttccacgatgtcgaagaagtcagagtcgacaagcacagattgtctatccaaggttggtaccatattccacaagtcggtgaagaagggcacatcccgggtgaagaagaagcatgggtacgtaataacacctccactttggcacaaatcgaatccaatgtcttggaagattttgagtttccaaaggatgaaagagatatcttgccattccatgaagttaagcattttgaaaaaatgttgaagagcgatgctgcaaacgaaaacaatactcctaaggaagctatgaccagtataatttctgattctctccagttatctgaaactgaattcacctatctatcccagtatatttctcctgaacacttgaacccagaaggcattgaaaaactacaaaagaagtttgttgagaattcttctttacaaatcgaggcttttctgaacgatagcaaatctgaattattgaagaaagttatcaaacaaaaggaaatggagcaagaatgcccttaccattcaaaggacgtgaagacgccgtggaagacggctattcctccacacaaagcccgttatctgtacattgatggtaaggaataccgtaatttccaaacagaagcagacatttttaaggcgttaaacaacgatgatttggcaaacttccaattcaccaaggataccatcaaggtaattgccgatgcttctggtaacagtaaggaaagcaactttgatgctgagctagcgttgattgacttggccatcttccacaagagcaccattttcaagaagtatttagccttgctgacttctttgtgcccagtcagtgaacaagtcctcatcagaagattcagacctggtatggatttcacattagccaccaagtgccgtttcaatgaacttttgaagggtaatccagatatcttggatgctgttttggaaggtactttatgtttgaccccttctcctggttgggaatcaggagaacttggcggttatgaattgtacatgatggatgatgatgaagataataagcaatacctaaaggaggacgttgaagatgcttcagtgtatcgtgcagatgacagtggtgactctgttctgattaacgatccacctgcttggaacactttcaacttggtcctgagagatgaaagtgttttggaatttgttaagtacgttagctggagtgccaaatctagtagatgggatgtgaaaatgaaatgggatgtcaaagcctgtgatgaagatgaagaaaatgaagaagcctaa

SEQ ID NO: 737 - DNA, 903 bp, Saccharomyces pastorianus
atggagtctcctaaacaaccacgtaaaatcgaattatatacaaaagagttttattccacatgtactttaggtggtataattgcatgtggtccaacacattcttcgatcaccccactagatcttgtaaaatgtagattgcaggtcaaccctaagctgtatacctctaatttggatgggtttcgtaaaatcgttgccactgaaggctggaaaaaagtgtacactggggtcggtgccacatttatcggttattccttacaaggtgcaggtaagtacggtggttatgagtacttcaagcatttatattccggctggttaactccaggcgttactgtgtacttaatggcctcagcgaccgctgagttccttgctgacataatgctgtgtccatttgaagctataaaggtcaaacagcaaacctcaatgccccccttctgcaacaatgtaattgatggttggaagaaaatgtatgcggaaagtgggggtatgaaatcgttctacaagggtattgttcctctatggtgcagacagatcccatacacgatgtgtaagtttacttcttttgaaaaaatagtccaaaaaatatacagtgttttaccaaaaaagaaagaagaaatgagcccattggagcagatatctgtcagttttgtaggtggctatttggccggtatattatgtgctgccatttcgcatccagcagatgttatggtttctaaaataaatagcgaaagaaagggtaatgaatccatgtctgtcgcctcaaagagaatatatcaaaagattggatttgccggactatggaacgggttgatggtgagaattgtaatgatcggtaccttgacaagtttccaatggctaatttacgattccttcaaggcttacgtgggcttaccaactaccggttag

SEQ ID NO: 738 - DNA, 114 bp, Saccharomyces pastorianus
atgcaagatctagaagtattcttaagtatttttgccttcaccttcgtcttctactttggtgctcatagaacagtcatgaagagaaataagagcgatgtgccatacttgcaatga

SEQ ID NO: 739 - DNA, 894 bp, Saccharomyces pastorianus
atggatttggtaaatcatctgaacgatagactgctgtttgcaatcccaaagaagggtcgtttatactctaaatgtgtttcaattttaaatggtgcagacattaacttccaccgttcccaaagattagacattgcattgtgcacaagtctacctatagcgttaatctttttgcctgccgcagatattccaactttcgttggtgaaggtaaatgtgatctcggtataaccggtgtcgatcaagtacgtgaatctgatgtcgacgtggacctaccgatcgatttgcagttcggtaaatgcaaattacaagtacaagtcccagtaaacggtgagtacaaaaagccagaacaactgattggtaagaccattgttaccagttttgtcagacttgctgaaaaatacttcgcagaattggaaggaaccagcgtagaaaaaatgtcgacgaaaataaaatacgttggtggttctgtagaggcatcatgcgcgctgggaatcggtgacgctattgtggatcttgtagaaagtggggaaacaatgagagctgctggtttgatcgacatcgctactgtattgggcacaagcgcctacctaatagaatcaaaaaacccaaagagtgacaaaagtttgatcgccaccatcaagtcaagaatcgaaggtgttatgaccgctcaaaagtttgtttcgtgtatctacaacgctcccgagacgaagctcggagaactcttaaaagttacgcccggccgtagagcaccaaccatctccaaaattggtgacgaaggttgggtcgctgtcagttctatgatcgagagatcaacaaagggtgttgttttagacgaactgaaaagaatcggcgccacagatattatggtcttcgagatttctaattgtcgtgtataa

SEQ ID NO: 740 - DNA, 390 bp, Saccharomyces pastorianus
atgaccaccaagttaactccagtcttttgtgaatccgctccagctgctgctgcttcatactcccatgctatgaaggcaaacaacttgatttacacttctggccaaatcccaatgacttccgacaacaagctggttgaaggatccatagctgataaagcagaacaggttattcaaaacatcaaagacgttttggaagcaagcaattcttctttagatagaatcatcaaggttaacattttcttggctgacattaaaaactttgctgaatttaacactgtttacgcaaagtatttcaccacccataagcctgctagatcatgtgtcgctgttgctgctttgccattaggcgttgatatggaagtcgaagtcgttgctgctgaaagagattaa

SEQ ID NO: 741 - DNA, 1278 bp, Saccharomyces pastorianus
atgtctgtcacaggtgattcttcgtcgtcaactaacgcaagcaacagtccgaagtctacatactcaatacagtcagatgataaagcaagtctcgtaggcaccagaaatgatgaaacgcgttcagacgatccacaacaagacaataataggcgtgatattgtggtcataacaagggtagcctctgatgaaactctagaatcgcaatcatctacttcatcgatgggaattagaccagacccgtcttttagctcagaagatattcctccccaggccagagctgaactgaataaccgagtgcgtgccttaagtatgaacaacattaataaataccatccagtacgattctcaaagagtagcgaaaggcgatgcaaaaacgacgaagcaagtgaagcgagcagtttgaatgataaagcacaaagtggacctacggttcaattatcgacccaagaagacagagtgcttgagggcgacaagagcaatccacaagcaactccctctctgaatatagcagaattccctactgataagcttcttaaaatgctgaccgcattgctgactaaaataatcaagtccaatgatagaactgcagccgctaatccaagtttaacacaagagattgaaaatgggaagtctcctactctaactgataacgagaagaaatatttgagtcctgttttggggttccgaggaaagcacgtgccacagattggccttgatcagtactttcagagaattcagaagtattgtcccactacaaatgatgtatttttatcactgcttgtctatttcgatagaatctccaagagatgcaatagtgctactacaacgcccaaaaccgatgccgtaaaatatggaccaagttcagacaaaaactccttaagtaaggctaataaggacgatgacaaaatgtccgcatgtaacagtaacgaaaataatgaaaataatgagtcagatgatgaaaatatggatgttgaaaaaaactccaagccacatccccagatgttcgttatggattcccataatatccatcgactaatcatagctggtattaccgtcagtacgaaattcctgagcgattttttctacagtaattcaagatattctagggtcggaggcatatcgttacaagagctcaaccatttagagctgcagtttctggttttatgcgattttgaactgttgatttcagtcaatgaattgcagaggtacgcggatttactatacagattttggaacaacgcgaagacccaatcacaagcgctagtaacgagtgtctag

SEQ ID NO: 742 - DNA, 1632 bp, Saccharomyces pastorianus
atgcctcaaacatcagacgtgtccgtgattgaaacacaagatgtgggacgcgagctcaaagatctagaatctggagctcgtgattccaagacatctttatttaatgtatactatgagcatacagaatcgcggggaaccgatgagttggtcacggctgaactaaaatcgcccggaacacacgaactagtcaagagtaaaccgtcttttttcaatagaatggcctctgctttaaacgccgagacaaagggtattgaaccaattacggaagatgagaaaaccgatgattccatacttaatgcagcaactatatggttttcaagtaatatggttattgtagcatactccgtaggtgccttgggtcctatggtgtttggtctaaatttcggtcagagtgttttggttattgtttttttcaatattttaggtttgatgcctgttgcattattttctctatttggtgtagaactaggactaaggcagatgattttgtccaggtatctcgtcggtaatatcacggcaagatttttttcttttgttaatgttattgcttgtgttggttggtgtgttttgaacatttctgtttccgctcaactgttaaacatggtgaatgaaggctctggtcatgtctgtcctctttgggccggttgtttgatcgttgctggtggtactgttcttgtgacattcttcggttacagtgtcatccatgcttatgaaaaatggtcatggatacctaattttgcagcctttttagtcattattgcacaactatccaggtctggaaactttacaggtggtaaatgggtaggaggtgcaactactgcaggtggtgttctatcttttggttcatccgttttcgggtctgcagcgggttgggcaacttatgcagcagattatactgtgtacatgccaaagaacacaagtaaatacaagattttcttttccgtagttgcgggtcttgcgtttcctctatttttcactatgatacttggtgctgcctccggtatggcggcccttaatgacccaacctggaaggcatactatgaaaaaaacgccatgggtggtgtgatctatgccatcttggttcccaactctctacacgggtttggtcagttctgttgtgttctattggcactttccaccattgctaataatgttcctggcatgtatactgttgctttatctgcccaagctttgtgggcacctttggctaaaataccgagagttgtctggaccatggctggtaatgccgcaacgttgggtatctctatacctgccacctattactttgatgggttcatggaaaacttcatggactccatcggttattacttggctatctacatcgccattgcctgctccgagcatttcatttacaggcgttcgtttagcgcttacaatgtcgatgactgggacaactgggctgctctacctattggtattgcaggcactgctgccttaatcgtcggtgccttcggtgttgccttgggtatgtctcaaacctactgggttggtgagattggccgtttgattggtgagcatggtggtgatattggtttcgaattaggtgcaagttgggcatttattatttacaacatcgcaagacctctagaaatcaaatacttcggccgttaa

SEQ ID NO: 743 - DNA, 753 bp, Saccharomyces pastorianus
atgggattgactactaaaccgctatctttgaacgttaacgccgctttgttcgatgtcgacggtaccataattatctcccaaccagctattgctgctttctggagagattttggtaaagataagccttacttcgatgccgagcacgtcatcgaagtctcacatggttggagaacttatgacgctatcgccaagtttgctcctgattttgccaacgaagattacgttaacaagctggaaggtgaaattccagtaaaatatggtgaaaaatccattgaagttccaggtgctgtgaagttgtgcaatgccttgaacgctttaccaaaagaaaaatgggctgtggccacttctggtacccgtgatatggcccaaaagtggttcgaacatttggggattaagagaccaaaatacttcatcacagctaatgacgttaaacaaggtaaacctttccctgaaccatatttgaaaggtagaaatggtctagggtacccaatcaacgaacgcgatccttccaaatccaaggtagttgtctttgaagacgccccagctggtattgctgccggtaaggctgctggttgtaagatcatcggtattgctactactttcgatttggatttcttaaaggaaaagggctgtgatatcattgtcaagaaccacgaatctattagggttggcggttataacgccgaaacggatgaagttgaattcatctttgatgactacctatatgctaaggacgatttattaaagtggtaa

SEQ ID NO: 744 - DNA, 639 bp, Saccharomyces pastorianus
atggcagactattcttctctaactgttgttcaattaaaggatttactgactaaaagaaacctgtctgtgggtgggttgaaaaatgaattggtccaaagactaataaaggacgatgaagaatcaaagggggataatggcgaacctaaccaagagaaagaacaacaattagagtctgtggctaaagaagaaccagcccctaaagatgctattgaaacagaagctccggccgaaactaaagacgttgctactaaagatgaaactaaggaagcccagataacctccgatgatgtttcccctactgctcaaaaacccaaagaaccagctgccgccccggttctatcaccagaagaaattaaggccaacgccttagatctactgaataagaaaatgcatcgtgctaacaaattcggtcaagaccaggcagacatcgactctataaagagacagataaaccgggtagaaaaattcggtgttgatttgaatagtaagttggctgaggaattaggccttgtcactaggaaaaaaaatcctggaagtagcgacagcagtagacccaaaaatagaagcaaaggttcgaacaaccgttctagagtcagtaagagcagaaaaggtaacaaccgctctaatttcagaaggtaa

SEQ ID NO: 745 - DNA, 1671 bp, Saccharomyces pastorianus
atgcctatcccagttggaaataagaatgattttgcagctttacaagcaaagttagatgcagacgctgccgaaattgaagaatggtggtctgactcacgttggagtaagacaaagagaggttactcaggtaaagacattgctgccagacgtggtacattcccaccagtcgaatatccatcttcggttatgtctagaaagttattcaaggtattggaacaacaccacagtaaaggcacagtttccaagacttttggagcccttgaccctgtccagattactcaaatggctaagtatttagacactatctacatttctggttggcaatgttcttcgactgcatccacttcaaacgaacctggtccggatttagccgattatccaatggacaccgttccaaataaagtggagcatttgttcaaagctcaattgtttcacgacagaaaacaactagaagctcgtgccaaagcaaaatctcaacaagaactagacgaaatgggagcaccaactgattacttgacaccaattgtagccgacgctgatgccggtcatggcggtttgactgcagtttttaagctaactaagatgtttattgaacgtggtgctgcaggaattcatatggaagatcagacctccacgaacaagaaatgtggtcacatggcaggaaggtgtgttattccagtccaagaacacgtcaacagattggtgactatcagaatgtgtgctgatatcatgcgttcagatttagtcattgttgccaggactgactcagaggccgctactttgatcagctcaacaatcgatacaagagaccattactttattgtcggttccaccaatcccaacatagaaccatttgctgaagtgttgaatggtgcaattatgaatggtgcttctgggaaggaattagccgacattgaacaaaaatggtgcagagacgctggtctaaaattgtttcatgaagccgttatcgatgaaatcgaaagatcaggattgtcaaataagcaagaatcaatcaaaaaattcacttctaaagtgggcccactaaccgaaacatcccacagagaagccagaaagctcgccaaggaaattttaggtcgtgacattttctttgattgggaactaccacgtgtaagggaaggtttataccgttacagaggtggtactcaatgttctgtcatgagagctcgtgcatttgctccatacgcggacttggtatggatggaatctaactacccagacttccaacaggctaaggaattctctgaaggtgttaaagaaaagtttcctgaccaatggctcgcttacaacttatctccttcgttcaactggccaaaggccatgtctgttgacgagcaacacactttcattcagagactaggagatttgggctacatctggcaatttatcactctagccggtttacataccaatgcgttagcaatccacaacttcgctcgtgattttgccaaggacggtatgaaagcgtatgcccagaacgttcaacaaaaggaaatggatgatggtgtcgacgtgttgatgcaccaaaagtggtcgggagcagaatacatcgatggcttgttgaaattggcacaaggcggtgttagtgcgacagccgcaatgggcactggtgtcactgaagaccaatttaaagaaaacggagtaaagaagtag

SEQ ID NO: 746 - DNA, 486 bp, Saccharomyces pastorianus
atgacgaaaaaggataaaaagacagtaaaggtacagaccgttactactgaggacggtgaatctgtgaagctatttgaagacttgcaaggcttcgagaatttcattgccaacgaaaccgaagatgacgattttgaccacttacattgtaagctgaattactatccaccatttgttctacacgagtcacatgaagatcctgaaaagatcagcgactctgcaaactctcattccaaaaagtttgtgcgtcacttgcatcagcatatcgaaaagcatcttttaaaagatatcaaagaggctgttaggaagccagaactgaaattccatgagaaatcaaaggacgaaacttttgataaaatcgtgtggcactatggtgaggaaaccgagtatcatggtaggccattcaagatagacgttcaagtagtgtgtacacatgacgatgccatggtgtttgtcgactacaaaacacaccctgtggctacacattaa

SEQ ID NO: 747 - DNA, 2667 bp, Saccharomyces pastorianus
atgtacgtttataaaagagacggtcacaaagaacctgtccaattcgataagatcactgcccgtatatcacgcttatgttatggtctagatccgaaacatgttgacgccgttaaggttacacaacgtattatttctggtgtctatgaaggtgttacaacgatcgagctagacaatttggccgctgagacatgtgcttacatgaccactgttcacccagattacgctactttggctgctagaatcgccatttctaatttacataaacaaaccacgaaacagttttctaaagttgttgaggatctttatagatacgtcaaccctgctactggcaaagccgctcctatgatttccgacgatgtttacaatattgtcatggaaaacaaggataaactaaactcagctattgtctatgacagagactttcagtatagttacttcggtttcaaaactttggaacgttcttacttattgagaatcaacggtcaagttgctgaacgtccacagcacttaatcatgagagtcgccctaggtattcacggtgaaaacattgaggccgctttagaaacctataacttaatgtctctaaaatactttactcatgcctctccaactttattcaacgctggtactccaaagcctcaaatgtcctcctgtttcttagttgcaatgaaggatgattccattgaaggtatttacgatactttgaaggaatgtgctttgatttctaaaactgctggaggtattggtctacatatccacaacattcgtgcaaccggctcttacattgctggtacaaacgggacttctaacgggttaattcctatgatccgtgtcttcaacaatactgcccgttatgttgaccaaggtggtaacaagagacctggtgcctttgctctatatttggagccatggcacgctgatatcttcgacttcatcgacattagaaagaatcacggtaaggaagaaatccgtgcgagagatttattccctgctctatgggttccagatcttttcatgaagcgtgtcgaagaaaacggcacttggactttattctctcctacatctgccccaggcttgagtgactgttacggtgatgaattcgaagccctatatacccgttacgaaaaagaaggtcgtggtaagactatcaaggcccaaaaattatggtactctatcttggaagcacaaacggaaactggtacaccatttgttgtttacaaggatgcttgtaacaggaaatccaaccaaaagaacttgggtgttatcaagtcatctaatttgtgctgtgaaattgttgaatactctgctccagatgagactgctgtttgtaacttggcttctgttgctttgccagcatttattgaaacatctgaagacggcaaaacttctacatacaacttcaaaaagctacatgaaatttctaaagttattactcgtaacttaaacaacgttattgaccgtaactattatcctgtcgaggaagcaagaagatctaatatgagacataggccgattgctttgggtgtccaaggtttggctgacactttcatgttgttgcgtttgccattcgactcagaagaagcacgcttactaaatattcaaatcttcgaaactatctaccatgcctccatggaagcttcttgtgaattagctcaaagagatggcccatacgaaacctttaaaggctccccggcttctcaaggtatacttcaattcgacatgtgggaccaaaaaccatacggtatgtgggattgggacactctgagaaataacatcatggagcatggtattagaaactctttgaccatggcacctatgcctactgcatccacatctcagatcttaggttacaacgagtgtttcgaaccagttacttccaacatgtattctcgtcgtgtcctatctggtgaatttcaagtcgtcaatccatacttgttgcgtgatttggtcgatttgggtatttgggatgatggtatgaagcaatatctaatcacacaaaatggttccattcaaggtttaccaaatgtgccacaagaattgaaagatttgtataaaactgtttgggaaatttcacaaaagacaatcattaacatggcagccgaccgtgccatttacatcgaccaatctcactctttgaatttattcttgcgtgccccaactatgggtaagctaacaagtatgcatttctacggctggaagaagggtctaaagaccggtatgtattatttgagaacacaagccgcttctgctgctattcaattcaccatcgaccaaaaggttgctgatcaagctaccgagaatatcgccgatatctctaacttgaagcgtccaatatacatggcttcaagtgcaagttacgctgccagcgattttgtgcctgcagccgccgctgcaaacgttaccattccatctctagatagctcttcagaagtttcaagagatgcatctccagctccagtaggcaatgactcgttggctaaaggcatctctgaattgaaggttcaagaacctagagtggaagttcccgagatacccacaccagtaaagaatgaggaaaaagctgctcccgttgcgggcgaaaaagaaagtgaatttgacatttacaactctaaagttatagcatgtgccattgataacccagaagcttgtgaaatgtgttcaggttaa

SEQ ID NO: 748 - DNA, 381 bp, Saccharomyces pastorianus
atgaacaccgaaattgagatccatgatggaaggagtgataactctcctctgccccaagaaaagctaatttcgttcattcaagaaagtcatgatagcataagggatgataatgagaccgatctttcgaccaagtcattttcgaaccctttgataaaatcggtcctggagaaattggaaaagcattcttccttatacaagtacatagtctcagtaactacgttggacttaaaagaacccactgaggggggctctaatttttcattcaagaatgatataggcgcatcatggcagtcaaagaaagatgggatatttaattataaattagaggatgtagacagcaagaagtgttacttgattacgattctctggctacacaaatag

SEQ ID NO: 749 - DNA, 390 bp, Saccharomyces pastorianus
atgtcttcagcaccattattgcagagaacacctggaaagaagattgctttacccacaagagtggaacctaaagtcttctttgccaatgaacgtacctttttgtcatggttaaacttcacagtgatgctgggtgggcttggtgtaggtttactgaatttcggtgataaaataggtagggtcagtgctggattatttacatttgttgccatgggcacaatgatatacgcacttgtgacataccattggagagccgccgcaatcagacgtagaggttcaggtccttacgacgacagattggggcctactttgttatgctttttcctactagtcgctgtcattattaactttatattaagattgaagtacaatgatgccaaagttaaattatga

SEQ ID NO: 750 - DNA, 1563 bp, Saccharomyces pastorianus
atgttttcccgtacaagaaccacagctttgaaatccaactcatttgcaagaaatttgttgcgtctttattcgcaggcgccattgcgtgttccaatcaccttaccaaatggtcttacgtatgaacaaccaactggtttattcatcaatggtgaatttgttgcttctaagcaaaagaagacgtttgatgtgattaacccatctaccgaagagaaaatcaccaccgtctgcaaggctatggaggacgacgtcgacactgccgtcgcagctgccaagaaggcttttgagaccaagtggtctattgccgaacctgaggaccgtgccagggccttattcaatctggctgacttggttgaaaaaaaccaagagacattggctgcgattgaatcaatggataatggtaagtcactattctgctctcgtggtgacgttgctttagtgtcgaagtatttgcgttcctgtggtggctgggctgacaagctaaatggtaacgttatcgatacaggtaaagaccatttcacttactcaattaaagaaccattgggtgtttgtgggcaaattatcccttggaatttcccattgttgatgtggtcatggaaaatcggccctgctttggctactggtaatactgtcgtattgaaacctgccgaaacaactccattatcagccctttttgcttcgcagctttgtcaggaagctggtatccccgcaggtgtggtgaatatactgccaggctccggtagagttgttggtgaaaggttgagtgcacacccagatgtgaagaagattgccttcactggctccactgccaccggtcgccatataatgaaggtggccgctgatactgtcaaaaaagtcactttggaactaggaggtaaatcaccaaatatcgtgtttgctgacgccgatttggataaagctgttaagaatattgcatttggtatatttttcaactccggtgaagtctgctgtgcaggttctagaatttacattcaagatacagtgtacgaggaagtcttaaaaaaattgaaagaatacaccgagacattaaaagttggtgatccattcaatgagaaagttttccaaggtgcccaaacatctgacaaacaactacacaagattctggattacgtcaatgtggcaaaatcagagggagctcgtcttgttactgggggagaaaggtatggcgataagggctactttgtcaagccaacgatttttgctgacgtcaaagaggatatgagaattgttaaggaggaagtatttggccctatcgtaaccgtttccaagttctctactgttgatgaagtcattgctatggcaaatgattctcaatacgggctagctgccggtattcacacaaacgatattaacaaggctatcaatgtatctaatagagtaaaggctggtacagtttgggtaaatacttataacaacttccaccaaaatgttccatttggtggatttggccagtcaggtattgggcgtgaaatgggtgacgctgctttgagtaattacactcaagtgaaatctgtcagaattgccattgacaagccaattcgttga

SEQ ID NO: 751 - DNA, 1533 bp, Saccharomyces pastorianus
atgctacaaagaatttatttatcacggtatacagtaccttcttgcaggaggcacttttcgaagttgatgtcctcgttggaacaacaaaagagtaaaacatttaccgacagggttagaaaccctatagaggcgggccaatcattgcacgaaacaagaccattcctcatcaagccaggcgagttgacacctggtatttcagcattggaatactatgaaagaagaatcaggctagcggaaatattgccatccaaaagttgcgtcattctagccggtaacgatgtccagtttgcatcgggggctgttttttatccttttcaacaaaataatgacctgttctatcttagtgggtggaacgaacctaattcagttatgattttggaaaaaccaacagacaatttgagtgatactgttttccacatgttggtcccatcaaaggatgcgtttgctgaaaagtgggaaggatttagatctggggttaatggtgttcaggaaatctttaatgcggatgaatctgccgcaattgatgatctgtctaaatacctgcccaaaataattaataggaacgactttatctattttgatatgctgtcagctcctaattcaagttcttcgagttttaagcacattcaaagtttactgaatggtgggaatggtaaccgatcaattaactccatagcaaacaagactatcaaacccattagtaaaaaaattgcagaattccgtaagattaaatcccctcaagaattgaggatcatgagaagagccggccaaatatcaggaagatcgtttaatcaagcctttgcaaaaagatttaggaacgaaaggactttagactccttccttcattacaagtttatatccggtggttgtgataaagacgcttacattccggtggttgccacaggttcaaactcactatgcatccattacaccaggaataatgatgtgatgtatgatgatgaaatggttcttgttgacgcagctggttccttgggtggttattgtgctgatatttcgagaacgtggcccaataatggaaagtttactggcgcacaaagagacctttatgaagccgtattgaacgttcaacggggttgcattaacctttgtaaagctagcaataattattctctccatgacgttcatgaggaaagtatttcgttgatgaaaaaggaattaaaaaacttgggtatagacaaagttaccggatggaacgtcgaaaaattataccctcactatatcggccataatttaggtctagacgttcacgatgtgcccaaagcttccaggtacgaaccattgaaacctggtcaagtgattactattgaaccgggcttgtacattcctgatagtgaatcattcccatcttattttagaaacgttggaataagaattgaagatgacatagccattggggaagatagttacactaatttgacaatcgaagcagttaaagagatcgacgacctggaaaatgtcatgcaaaatggcgtctctacgagattcgaagaagatgaagtagcaccattgtaa

SEQ ID NO: 752 - DNA, 639 bp, Saccharomyces pastorianus
atggccgactcttctcattcaataagttcaaaggacattgcctcggctatctctctctacgaccaatccatatataccaataatagatccaccaatctggacctagaccagaggtcaatgagcccttccaatatcgcttcgggtgaggacaggataacaagaaccaactctggtggctctatcacttcaggagcttctatgattgccactaaggatgggattcaagggtgtaacgttaaaagagatgggattccgaaatactctttaaatctgctgaactctatggttcgcaagcaatatgagcatagtaatggtaacaagtcccctactccaagtagcaacaataaactcgatccgaagaacgaaaagaagaataaaaagaaaagtaaaggtaaagatgggacaaatacggtcgcccatgaccagaacgaaaaattttacaaactgaaccccgcttccacttcaaattcgaatgtgatttctaactcttctacttcattatctgaccagttttatttccagaaaagtaacgccgaatcagcgccattaagtaatgcgaactacccacaatccaatcattccccttctttgaactcaatggataatagtacaaagcatagcagtaacgtacatacttga

SEQ ID NO: 753 - DNA, 1884 bp, Saccharomyces pastorianus
atgattagatcaaccgttattggctcctccagtaggtgtgtagcaaggatttccaaaagagtaggtacgatcaaatgtatcactaatacccccattaccactaaaagattcatttccggtaaaccaaatgaagtgtttacaaaactaacagacgataacgatccaaagagggatgctttctttaagtacacttggggttcctggctgaagaatgacaaacaacagaaggagaaaagatttactaagttttccattgaaggtttgaaccgtattcttaatgatatgtatattcaatccagcgaaatggccaaagttccttcggataagatcttaccgccaacgtttaacaagaatctaaccgtctctttggttaataacgttatacctaaaaacataggaaagatcaacccaaacgaaaaagttcaagtaaccacaatgtccagtattcacgaaggtaaacatcacagaatatacaaggtcgacactaatttgaacaaagcgtttgttttgagaattccgtatccgttggaaaatgaaaacactctagcttacagaattagaagtgaagtggctaccatggatttcgctggtttgaagctgggcatcaaagtgcccaagattttttgctatggtgtcaattccttaaatcctgtaagacagccctttgttctacaagaattcattgaaggtgatctattgatgaaagattgggatccattgatggaagatgactctccaaaccaaggaaaattcgagaacgttatcaaacaggtttctgatttccagtcaaagttgatatccttaaaattaaatgcattcggctccatatattttggtattgatctgaaaaatacggacgataatgaatttgcaaacgtatacgatggcgaaactaatccggatttacaaaatagatggaaaattggcccatctgtggaaagatgtctttggagactaaaatcccatttagattttcagaagcaaatcaaaccgttcttaggaccatggtctaacaagtcgccaatggacattatcaaaaacaccggtctattggaagctgagaacgcaaaaatcagattggcgctaaaagaagcaggtagctcgcccgaggtagtggaacctcaaactttaaaagaacaagtgactacttttgaaaatttggctaagattgcgcccagcttattcaatgcgaagaccaagtctatcccaaacatacaagagttattgtcaccacgtttattccatcctgatctagacccaatgaatattattattactaaagaatcacaagaagcttatttattagattttgaaggtgcgtgcaccaagccattcattttacaaaactcaccacaatttattgcttatgaagggcccaaaatttatgacataaaagaagatataaaggactttgacaagctatccgaaccagagaaggtgcaatatcaattcatgtataaacggacccgtaaccaacaccaatgggaaaagaaattgaacgaaaacaattctcagctgattagtgcagtggccccgcccgttaagttactaaggagtccatatattgcagctgttgagaggaaaacggaggaagaatatttgctagtggacgaatcgctgttgcagttgaaagaagtctgggacatatttgcccaaaacgatttagtcaagcaaaagaaattcccattggactacacaaaggaagacattgaaaaacatgttaaggatttgcaaaaattacatgaaaagctaatctctacgccatttgccgccactcaaggctgggttcctcaagacatgtttgaccaattactaaaatctggtattatcgttaaacaggaaaacggggattatactgtgaaacagcctcagcctactaagtaa

SEQ ID NO: 754 - DNA, 1731 bp, Saccharomyces pastorianus
atgtctgctactctactaagacagcccttaagtgcggtttctcggcaaagtagaagttcgagagtctctggacttaaccttttgaaactaaaggctcaattacatagacaccatttatcaccttctttaataaaactacactccgagttgaaactggatgagctgcaaaccgataacactccggactatgtccgcttggtattgagatcgtccgtgtacgacgtaattaatgaatcaccaatctctcaaggtgtaggcttgtcttcccgtttgaacacgaatgtcattttgaaaagagaggatcttttgcctgtgttctctttcaagcttcgtggtgcttataacatgattgccaagctagacgattctcaaagaaaccaaggtgttattgcctgttcagcaggaaaccacgcccaaggtgtggcttttgcagccaaacacttgaagatcccggctaccatcgtcatgcctgtctgtacaccatctatcaagtatcaaaacgtctccagattggggtctcaagttgttctttttggtaatgattttgacgaagccaaagcagaatgtgccaaattggcagaagaacgtggcctaacaaacattcctcctttcgatcatccttacgtcattgcaggtcaaggtactgtagccatggaaatcttgagacaagtacgtaccgttaacaagatcggtgctgtcttcgtccctgttggtggtggtggtctaattgctggtatcggtgcgtatttgaaaagaatcgctcctcatatcaaagttatcggtgtcgaaacttatgacgcagccactctacacaactctttgcaacgcaaccaaagaactcccttacaaactgtgggtacttttgctgatggtacctctgtccgtatgatcggtgaagaaacttttagagtcgcccaacaagtagtagatgaagtcgtcctcgttaacactgatgagatttgtgccgcagtgaaagacgtttttgaagatacaagaagcattgtggaaccatctggtgctttatcagtggctggtatgaagaaatacatctctaccgtacaccctgaaatcgaccatactaaaaatacctatgtccctatcctttcaggcgctaacatgaactttgatagattaagattcgtttctgaacgtgctgtccttggtgaaggtaaagaagtcttcatgttaattactatacctgacgtcccaggtgcattcaagaaattgcaaaagatcattcacccaagatctgtcactgaattctcctaccgttacaacgaacatcgtcatgaatcctctagcgaagtccccaaggcttacatctacacctcctttagtgttgttgacagagaaaaggaaatcaaacaagtgatgcaacaactaagtgcccttggtttcgaagctgtggatatctccgacaacgaattggccaaatctcatggtagatacttggtcggtggtgcttctaaagtgccaaatgaaagaatcatctcttttgaatttcctgaaagaccaggtgctttaactaagttcctaggtggtttaagcgactcttggaatttaactctgttccattatagaaaccacggtgccgatattggtaaggtattggcagggatttctgttccaccaagagaaaacttgaccttccaaaaattcttggaagatttgggttactcttaccatgacgaaactgataacaccgtttatcagaaattcttgaaatattga

SEQ ID NO: 755 - DNA, 1728 bp, Saccharomyces pastorianus
atgttgaagtatcgtgtattatctcgatcatgtcatatattccacccaaagtctctctcgaataatacccttaaatcagaatccacccaagaactacttcagacactggggtttataagacgctcgcaagctggactcttccaatggctaccgcttggcctgcgatcactaaataaattgacaggtatcatacgaaaccggatggacaacgactgtggggctgtggaagtttcgctgagtgctgtctcctccaaatcactatggcaaacgacgggccggtggactaatagcgagctgtttaaatttaaggattccaaagggaagcagtattgtttgacagcgacatgtgaagaagatattacggatttgatgaaaaattacgttactagttacaaagatatgcctatcacggtgtatcaaataacaagaaaatatagagacgaaattaggcccagaggtggtcttttacgtggacgagaatttttaatgaaggacgcgtattcatttgccagtaccaaagaagaggcatttgccagtttccaagaattagacgaaacctacaataaaatatttaaagatttgaagataccttttgttagtgcatgggcagacagtggtgatataggtggtgaatttagtaaagaatttcatttgattcatgaatctggtgaagacactctgatgagttgcaaagattgtggcgacatttcaaccctagatatgtctcaatcatttcctgaaaaagatgggcaatatcttggcgatgtcgattgtaagtatgccttgaccaaagatcactctactttaatatgcttttattatccaaaaaacaggcaattgaattggaacttggcattaaacgtaatggacaaggatatcgatttggcattaagggacaagccaaatgatcttgttctggaagcttatcaaaacgataatgaagacattatgttcagtaaaatattgagagttatggactgtagactgaactcaaaatcaaatttccctgatttcccactgaaggaatatttgaagaataattttggccaaattgatgatgtttctatagtggatgcacaagcagatgaaatatgtggtaaatgtgaaaacggaaatctacaatcgttcaaaagcatcgaagttggccacatatttttactgggcaacaagtattcgaagccactgaacgtcaagtttgtagataaagagaataaaaatgatacgtttgttcatatggggtgctacggcatcggagtaagcaggctaactggatcagtggcggaactgggccgtgatgcaaatgggtttagatggccagccataatagcaccatacaaggtgtctatatgtaccgggcccagtaatgaagagaacctacagcggataaaagatattcggtccaaattattggataattcctctatagatgtccaaaatgatatgctggaccaattcaacgaaaaattggggataggcgctaggataaagttatctcatgccatgggcataccattatgtgtcatcgtaggcccaaagaactggcccaatgtggaaattgaagttcgtggcatcaggtggggcaaaagggatcaatggaaaacggagttcgagaagaagactcaagagtggaattggaagtgcactgaaaatgaaaacggaattgaaaaacacgttgtcccgattgagcacttggcagaagtcgtcgacattctgctaagagatatgtag

SEQ ID NO: 756 - DNA, 249 bp, Saccharomyces pastorianus
atgtcaagcccaactcctccaggtggccaacgtactttgcaaaagagaaaccagggcagttcacaaaaagttgcagcttccgctcaaactaagaacacgaagagcaacaactcgatcttgaagattttttccgatgaagccacggggctaagagtcgatcctttagtagtgttattcctagcggtcggttttattttctctgttgttgcattgcatgttatttctaaagtcgcaggtaagctattctag

SEQ ID NO: 757 - DNA, 2304 bp, Saccharomyces pastorianus
atggttcaatctgctgtcttagggttcccaagaatcggtccaaacagagaattaaagaaggccactgaaggttactggaacggtaagattaccgtcgatgaattattcaaggtcggtaaggatttgagaagtcaaaactggaagttgcaaaaggaagctggtgtcgacatcatcccatccaatgacttctcattctacgaccaagtcttggatttgtctttgttgttcaatgtcatcccagaccgttacactaaatacgatttgtctccaattgacactttattcgccatgggtagaggtttacaaagaaaggccaccgaaaccgaaaaggctgtcgatgtcaccgctttggaaatggttaagtggtttgactccaactaccactacgtcagaccaactttctctaagaccactcaattcaaattgaacggtcaaaagccagtcgacgaatatttggaagctaaggaattgggtattcaaaccagacctgttctattgggtccagtttcttacttgttcttaggtaaggctgacaaggactctttggacctggaaccattatctctactagaacaattgttgcctatatacgctgaagttctatccaaattagctgctgctggtgccactgaagttcaaattgacgaacctgtcttagtcttggacttgcctgctaccgctcaagccgccatcaagaaggcttacacctactttggtaagcaaagcaatctaccaaagatcactttggctacttacttcggtaccgttgttccaaacttagacgttatcaagggcttgccagtctctgctctacacgtcgactttgtcagagctcctcaacaattcgatgatgtcgttgccgctattggtgacaagcaaacattgtctgttggtattgtcgatggtagaaacatctggaagaacgactttaagaagtcttctgctttcgttaacaaggccatcgagaagttgggcgccgacagagttgttgttgccacttcttcctctttgttgcacactccagtcgatttgactaacgaaaccaaattggacgctgaaattaagggcttcttctcttttgccacccaaaagttggatgaagttgttgtcattaccaagaatgtttctggtcaaaatgttgctgccgctctagaagctaatgccaagtctgtcgaatctagaggtaaatccaagttgatccacgactcttctgtcaaagccagagttgcctctatcgaccaaaagatgtctaccagagcttctccattcgaacaaagattgcctgaacaaaagaaaatcttcaacttgccattgttcccaactaccactatcggttctttcccacaaaccaaggacattagaattaacagaaacaaattcaacaagggtaccatcactgctgaagaatacgaaaagttcatcaactctgaaattgaaaccgtcatcagattccaagaagaaattggtctagatgtcttggtccacggtgaacctgaaagaaacgatatggttcaatactttggtgaacaaatcaacggttacgccttcactgtcaacggttgggttcaatcttacggttccagatacgttagaccacctatcattgttggtgacttatctagaccaaaggctatgtctgtcaaggaatctgtctacgcccaatccatcacttccaagccagtcaaaggtatgttaactggtccaatcacctgtttgagatggtctttcccaagagacgatgtcgaccaaagaacccaagccatgcaattggctttggctttgagagatgaagtcaacgatttggaagctgctggcattaaggtcattcaagttgatgaaccagctttgagagaaggtttgccattgagagaaggtgctgaaagatccgcttactacagctgggctgccgaagctttcagagttgccacttctggtgttgctaacaagactcaaattcactcccatttctgttactctgacttggatccaaaccatatcaaggctttggatgctgacgttgtttccatcgaattctccaagaaggacgatgccaactacattgctgaattcaagaactatccaaaccatatcggtttaggtttgtttgatatccattctccaagagttccatcaaaggacgaattcattaccaagatttctgccatcttgaaaacttatcctgctgaaaaattctgggttaacccagattgtggtttgaagactagaggctgggaagaaactagattgtctttgactcatatggttgaagccgctcaatacttccgtgaacaatacaagaattaa

SEQ ID NO: 758 - DNA, 375 bp, Saccharomyces pastorianus
atgccaagcaaagacgcagagagtcatatcgataaggacatacgaaagatatcgtcgaggaacgatgagttgatcaaacaggacgctacactgaaaagagaatataccactttgttgagaaaagtgtcgagtgtgataacggtgctgaatagcatagataccgaaggcggggttggcagtacagaaatcccacgtttgatatcagaaacgacggttaagaaggtgcccgaattgaaatggtacaatgaacaaatatcgctactgacggccaaactggagaataacgaagatactgacgttcccgaagagttgatggacgcttatactttatacaaggaaacaccattgttatataatgatacccacatgccatga

SEQ ID NO: 759 - DNA, 618 bp, Saccharomyces pastorianus
atgtccgatccaagttctataaacggtggtattgtcgtcgcaatggcgggtaaagactgtgtggccattgcctgcgatttgcgtctcgggagccagtcgctgggtgtgtcgaataagtttgagaagatcttccattacggccatgtgtttttgggaattaccggcctagcttccgacgtaaccacgctgaacgaaacattccgttacaagaccaacctatataagctgaaggaggaaagggctatagagccggaaacgttcacgcaattggtgtctagttcgctttacgaaaagagatttggcccttactttgtgggccccgtggtagccggtattaattccaagtccggaaaacccttcattgccgggttcgacctaatcggctgtatcgacgaggccaaggacttcatcgtcagcggtactgcgtccgaccaactgtttggtatgtgtgagtccttgtacgagccaaatctggagtctgaagatctgttcgaaaccataagtcaggccctactaaatgctgccgaccgtgacgccttgtcgggctggggtgccgtagtatacatcattaagaaagaccaggtggtgaagaagtacttgaggatgagacaggattga

SEQ ID NO: 760 - DNA, 1194 bp, Saccharomyces pastorianus
atgtcgcaagttcaagaacaacacatatcagagtcgcagctgcagtacggcaacgcttcgttgatgtctactgtaccagcagacccttctcagtccataggtaatggaaacggcagcgatggcatcgctgccaccgatgcctccgccgatggaggcggctcgcaagagcaagagcaagtgcagggcgaagtggaggaggaagaggacgatgagtctgccttgggttcgtttgtgcctatagaaaagttacaggtgaatgggatcaccgcagcagatgtgaaaaaactaagagagagcgggctacataccgctgaagcggtggcatatgctcccagaaaggctttgctggagatcaaaggtatatccgaggcaaaagctgacaagttgctgaacgaagccgctaggctggtgcccatggggtttgtcacagcagcggatttccacctgagaagatcggagttgatttgcttgacgtccggttctaagaatctggacaccctcttgggcggtggtgtagaaacgggttctatcactgagctgtttggtgaattcagaacaggtaagtcacaactatgtcacactttagcagtcacctgccaaattccactggacattggtggcggtgagggcaagtgtttgtatatcgacacagaaggcactttcagacctgtgaggttggtgtccattgctcaaaggttcgggttggatccggacgatgccctaaacaacgtcgcctatgcaagagcgtacaacgctgaccatcagttgaggctcctggacgctgcagctcaaatgatgagcgagtcccggttctccttgattgtggtggactccgtcatggccctttacagaacagacttttcaggccgtggtgagttgagtgcaagacaaatgcatctggctaaattcatgcgtgccttgcaaagactagctgaccaattcggtgttgctgtcgtcatcaccaaccaagttgtcgcccaagttgatggtggcatgtctttcaacccagacccgaaaaagccgatcggtggtaacatcatggcccattcatccactacgcgactaggcttcaagaagggtaaaggccctcaaagaatatgtaaagtcgtggactcgccttgtttacccgaagctgagtgtgtctttgccatctacgaagacggtgttggtgaccccagagaagaagacgagtag

SEQ ID NO: 761 - DNA, 1599 bp, Saccharomyces pastorianus
atgttcacaggtgtttatccaaacaccccaggcacataccctgaagtcacagctcgtaaatatatggacagacagtcggaactgaacatgttctccaccgcttcttccttggcattgaatgaattggacgcgcgccaatattggtctgtttcctctcatatttcaggttcaagtagcatgtactcagctggtggagaggaaaatttacgctccgcaagtaccgatccaatcgtttgtttaccagggtttccaacagatgacagggatagcgaattgatatcctctgccgttggtgaagattcagtggatagtaatccttcatttgccgagaaattcaatactttccccaccaaaggttttctttctgaagacaatgggtttgctgaggttatcccttcctcgccagaggagaaatcacgagtatcttttgaaagcgaaatatcgtctgaaatttcaaagaccactcctccaaacgggacttcggtttacgaagctttggtagagccacctccctctcaaaatgagtctgttgctctgtctttcggacattcaaacgatttggactttttgaacaacccaagtggatcgggctcttcaaatgacgttaatagaagctcgggttccatatcccttcccaaaaatgtgtctttagattttaacgttgacaataatcttttttttacaaacgagctggtagcatctgaatcacataagatggccaaattccaccttggtaagagaaatgcaaaaagcttgctaacaagatggaaaaccattgaaatgtatggagaatctgtcaaaaggactgatgacacatattccaatttccaatttgcgcaatatattttgaaggttggtttgaatttggaaaacttacaagaattggttgaagagcaagaattggctgaagaacaagagggcaagagtggttcctttactgttgacagcttgaaagaatcgttactgatggacgcaaaaataattttgaagaaattaagtgctgtcggatatccggatgcgcagtacctgttaggcgacgcttactcttctggagtttttggaaaggtaaagaatagaagggcatttctcctgttcttagcggcagccaaaaggttacacattgaaagtatattcagaacagctatctgttatgagtgcggattaggtgtgacaagaaatgcatcaaaggcagttaactttttaacctttgcagcaactaaaaatcaccctgctgcaatgtataaattgggtgtatattcttttcacggtttgatgggtcttcccgaagatattttaacaaaactggatggttatagatggttacgaagggctacatccatggccaatagtttaatttgcggtgccccttatgaattggctaatatctatatgacaggattcaaagaccttattatttcagatccagattatgcaatggtactttataagaaggcagcaattctggggcacactgaatctgcaagaatattggcagaagcttgtggaaatagaggtatttcttctcgtagaaatcatcgactatcacataaattacccaaagcttccgacaatgttctcgtgtccaggaaattgatttaa

SEQ ID NO: 762 - DNA, 2271 bp, Saccharomyces pastorianus
atgataaaaagatggctatctgtgaccaagaagaagtctgatccagaaaagggtacacatagtaatgatgaaatcagccgaaaagcaattaatatgaagaaggccggagcttttcgagatccgactatagggaaaccaacgagcactaagagtagctcctcaagtgcaccttctaacccagcaagccatgaaaagaagaacagatccagcagtcaagcggataacatcattgatgaaaaacatcatcaccatcatcaccaccaccatgatatgacgaacaatttaaatgaagtagagagttattttcctagcacatatgaggatggtgcattagaagcagagtcccaaattcttttcactagcatgacagatctaatgccttatggggacggttcaaacaaggtgtttggctacgaaaattttgggaatacctgctattgtaattccgttttgcaatgtctttacaatatacccgagttcaggtgcaatgtcctgcgatatcctgaaagaatacctgtaacaaacagaattcgaaaaagcgacttaactggctcaaaggtgagagtatttactaatgaaagttttgagacgtctgccaacggaggaaattcgaattcagggagccaaatctgtgataatgaagacgtacacaaccacaaccaccatcataatcagcgcagtgatctggataactcttcttcatctactcaagaaaaacagaacaacaatgaaagaaaaaggaattcctttatgggctttggaaaaagcaaatcgagtagcaaagactccgcaaagaaagatgatagcagtgaggttgaacggcctcggcctgtgcatacagtggttatggcatcagaccagctaacggaaaagcttcacgaagggtgcaggagaataattgttggaagatctcttccaattcagggtggctcctccttgataactgcacatgcagaccaccaagtcaattcacaacctcaatcgaaagtgtctgccggtagtaacgaaccaatggatgacgataaccacttcaactcggagggtatccgtcataccgtgaacgtgcccaaccttaacaaagaaaccacttttccgacaagcgagcaaagaaaaaaggcagcattaattaggggccctgttctcaatatcgatcacttgctctatccttctgagaaggcaacgctttacaatggtctaaaggatatatttgagtctataactgaaaatttggcactgacagggatcgtttcacctactgaatttgttaagatcctaaaaaaagaaaatattttgttcaacactatgatgcaacaagatgctcatgaatttttaaactttttactaaatgactccagtgaatacattgaatgccatacctccagtgtaaatagtatgcctcaagagaacatgaatgacaccagcgataatttcataaccgatctgttcaagggtacgctgacaaacagaattaagtgcttaacttgcgacaatatcacctcaagagatgaaccgttcttagatttccctatagaggtacagggcgatgatgagactgatattcaaaaagttttgaaaagctatcatcaacgcgaaatgttgaatggcgttaacaaattttactgcaacaaatgctacggtttacaagaggcagaacgcatagttggtttgaagcaggtgccttatattctgtcgctacacttaaaaagattcaagtactcagaagaacagaaatcaaatatcaaactgttcaataagatacgctatccattgtacctagacgtttcttctacatttgatacgtcagtatccaaaagatacgaattgagtggcgtcgtaatgcatatgggaagtggtccccagcatggccattatgtatgcatttgcaagaatgaaaaatttgggtggctgttatatgacgacgaaaccgtagagtctgttagcgaagaaacggtattgcagtttacaggccattcgggtgatcaaacaacagcttacgttctgttttataaagaaattaatgcaaattacgccaacaaccaaatgagagacactgtgacttcagatcaaaaccgaaaccaaattgagaacaatattgaacaattgatgaagtgtgatgactggttaagaaatcgcgcattgaaagcgatggccaatgtggaacgtaaaaaaattctaaaagatataccagaagttaaggcacctgtaagaactgttgatagaaaacgcaataaacaaaagagaagatccagaatactgagttttatcaaataa

SEQ ID NO: 763 - DNA, 753 bp, Saccharomyces pastorianus
atggctacgaagcaagcccataaaagactaactaaagaatataagttgatggtggagaatcctccaccttatattcttgcccgtcccaatgaagacaatattttggaatggcactacatcatcacaggtccggcggatactccctataaagctggccaatatcatggtaccttgactttcccatcggattacccatacaagccacccgccatcagaatgattacaccaaacggacgtttcaaacccaatacacgattatgtctttccatgagtgattaccaccctgatacctggaatcccggttggtccgtatcgaccattttgaacgggttgttgagtttcatgactagtgatgaagctacaactggatccattactacgtcggatcatcaaaagaagctcttggcaaagaactccgtgagttataatacttttcaaaatgtgagattcaagctgatttttcctgaaattgtagaggaaaacgtacaaatattagaaaagagaagattaatagaaggggacggtgctgaaacgaaggaagagacagaagatgcttttacaaaagctgctaaggagaaagtgatttctttagaggaaatactagatcctgaagatagaatacgtgcagaacaagcattaagacaacaagacaataattcaaagaaaaatgacaaagagccgaacggcagttcttccatggtttatattggtattgctgtttttttatttttggttggtgcttttatgaaatga

SEQ ID NO: 764 - DNA, 1293 bp, Saccharomyces pastorianus
atggcagaaaaaattttgcaaaatcagaatcccaggttagaagcgatgacagtggaccatgaaactcctgcaccaaaggaaattaccgttaatgaacccagattgactagagttgccagaccattaaggcatgtaaggcatatacccgtgaaatcgttggttttccattccaagcacggacccgtcactttttcatacgaaaataaaataaaactgccaataagtaagaataaactggcagtccaggtaaattatgtaggtttaaatcctattgatatgaaaatcaagaatggttacaccaaacctatctatggtgaggccggcatcggaagagagtatagcggggtagtaacacatgttggtagcaatctgacagatagatggaacgttggagatgaggtatatggtatttattatcatccaaagttagccatcggtgctttgcaaactgcactgctcatcgaccctaacgtcgatcctattttgatgaggccaaaacataccttaacaccagaaaaggcggcgggttcattgttttgtttggggacagctttgaatctattatctaagctaaaggaaaagggccaattagatgcggagtctaacattttagtaaacggtgggacaagttcagtggggatgtttgccatccaactgttgaaacgctactataaagtttccaagaaattggttgttgtgacgtctggtaacggttcaacggtattgtctgaacacttccccgacctaaaggaagaaatgattttcataaattacctctcatgtagagggaaatcgagtaaaccgcttagaaatatgctgaactcaggtaaaattgtagattatgatgaccctaatagtcttaaagaaaccgaagcttacacacagggtaaattcaacgccgtattggatttcattggtggttatgatattttgagtcattcaagttccttaattcgtgctaaaggcgcttatattaccactgttggtgactatgttggaaactataagaaagacatctttgactgttgggataatcctagtgctaatgcgaggaagatgtttggctcaatgttgtggtcatatgactatactcatttttatttcgaccctaatatcaaactcatttccaagaaaaatgaatggatacatgaatgtggaaagctactgaatgaaggggttgtggactgtatcgtagataaggtttattcttggaaaaaactcaaggaggcgttttcttatatggccacccagcgtgctcaaggcaagttaataatgaaagttgaagatttttga

SEQ ID NO: 765 - DNA, 603 bp, Saccharomyces pastorianus
atgggtatttctcgtgactctcgtcataaaagatcagccactggtgctaaacgtgctcaattcagaaagaagagaaagtttgaattgggtcgtcaaccagccaacaccaagatcggtgctaagagaattcactctgtcagaaccagaggtggtaacaagaaatacagagctttgagaatcgaaaccggtaacttctcctgggcttccgaaggtatctccaagaagaccagaatcgccggtgtcgtttaccatccatccaacaatgaattagtcagaactaacactttgaccaaggctgctgttgttcaaattgatgctactccattcaagcaatggttcgaagctcattacggacaaaccttgggtaagaagaagaactccaaggaagaagaaactgttgtcaagaccaaaaactctgaaagaaagtgggctgctagagctgcttctgccaagattgaatcttctgttgaatcccaattcagcgctggtagattatacgcttgtatctcttccagaccaggccaatccggtagatgtgatggttacattttggaaggtgaagaattagctttctacttaagaagattgactgctaagaaatag

SEQ ID NO: 766 - DNA, 1929 bp, Saccharomyces pastorianus
atgtcaaaagctgtcggtattgatttaggtacaacatattcatgtgtcgctcacttctcaaacgatagagtggagattatcgctaatgaccaaggtaatagaacgacaccttcgtacgttgcatttactgacaccgaaagactaattggtgacgctgctaagaatcaagctgcaatgaatccacacaatacggttttcgatgccaaacgtttaataggtcgtaagtttgacgatccagaagtaacgagtgatgctaaacattacccattcaaagtgatcgacaaagaaggcaaaccggtagtgcaagtggaatataaaggggaaacgaagacttttactccagaagaaatttcctccatgatcttaacaaagatgaaagaaactgctgagaactatttgggtacaaaagtaaacgatgctgtggtaacggttccggcttatttcaacgattcgcaaagacaagcaactaaggatgctggtacaattgccggtttaaatgtcttacgtattattaacgaacctaccgctgctgccattgcctacggtttagacaagaaaactcaaaaggaacacaacgtgttaatatttgacctgggtggtggtactttcgatgtctctctattatcaatagatgaaggtgtttttgaagttaaagctaccgcgggtgatactcacttaggtggtgaagatttcgataataggctggtcaacttcttagctgatgagtttaaaaggaaaaacaagaaggatttgacaactaaccaaagatcattaagaagacttagaactgctgccgaaagagcaaaaagaaccttgtcttcatctgctcagacgtctgtagaaattgactcattatttgaaggtgttgatttctacacttcaatcacaagagctagattcgaggaattatgtgccgaccaattcagatctacattagagccagttgagaaagttttggctgattcaaaattggacaagtcacaaatcgatgagatcgtcttggtcggtggttcaacaagaattccaaaagtgcagaaactagtctccgatttctttaacggtaaagaacctaatcgttcaattaatccagacgaggctgttgcttatggtgccgctgttcaagctgctatattaacgggcgatcaatcttcgacaactcaagatttgctattgttagatgttgcgccattatccctgggtattgaaactgcaggcggaatcatgacaaagttgattccaagaaactcaactattccaacaaaaaaatcggaagtattctctacttacgccgataaccaacctggtgttttgattcaagtctttgaaggtgagaggactagaacaaaggacaataatttgttgggtaagttcgaattgagtggtatcccacccgctccaagaggtgtcccacaaattgaagtcacatttgatatcgatgcaaacggtattttaaacgtatctgctgtcgaaaaaggtactggtaaatcgaacaaaattacaatcaccaatgacaaaggtagattatcaaaggacgatatcgacaaaatggttgctgaggcagaaaagttcaaggctgaagacgaagaggaagccggacgtgttcaagttaaaaatcagctagagtcatacgcctttactttaaaaaattctgtaaatgaaagcaactttaaggaaaaagtaggtgaagaagatgcgaaaaaggtagaaacggctgctcaagataccattgattggttagatgcttcacaggcggcctccagtcaagaatacaatgagaagcaaaaggaattagaagctattgccaaccctattatgactaaattttatggggctgcgggtggtgctccaggaggaggtcctgtcccaggagctggtccagacccaaccggtacaccagataaaggcccaacaatagaagaaatcgattag

SEQ ID NO: 767 - DNA, 630 bp, Saccharomyces pastorianus
atgtacagcaaccacgctttgaatccagatggtacttgttttaattgggaccaaatgaggctcgaagaacaatctgactcgaatctttcctccaatgggagcataacaccaaaatctgtaggttattccatgcattctaggttatcagaaaagagacaacaagaaaatgacgctttgaatattcaagattctccttccatagtttcaagtgtgatatcaaacaggcgagatcgggcacaagaagtttttggacctcattcttcatctcctattgccacctcggaacagcaacgaataaatcagagatcacaattagtatcgatgagatcatctaaacgtcaacagagaatgacagagaaacggggcggtttagaaaaaatggaacagatgatcatgcaaggtgagcgtcttcgagagattgaaagactgaaacaggaagctcaaagaaatgcggtcccttcagacatggctgagttcatggagtgggaaaataatgaggatctggaagacgatgatttgcttgcctttatcgagaagcaggagagttataaaaaagagctagaacagcttttgaacaaccctaatagaaatgctcacgcgaataattcgttttcagattatcacacgtaa

SEQ ID NO: 768 - DNA, 4182 bp, Saccharomyces pastorianus
atgtattccacccccttgaagaagagagtcgattacgatcgcgaggcttttaaatttgccggcacttcaggacgaaattacttgccggatcgattaagagatggccaagaccagcataatcctaatttgtcgaacagcccgttacaaaccagcagactagacaacaacatacggaagaagtatgacgaagcggcgaatgctgttggatcagattttcttgatattagcacgcatgtcgaagttagtgcttttacttcttctgaccgtttgcaattggcaagtaaatttgtccaggatctgagccttgcagatagaagtacaccagtactggacaatccctcatactatagtaacggagtgaactacaactttacaaatgaagtcggtggattaggtgcatttactccttttcaaagacaacaagtgacaaatataccagatgaagttgtgtcagaggtttctaacacagaaataaaaagtgatatgggtatatttccggaattgggctattgctggatcacttctgataataaattaattctgtggaacatcaataatagttcagagttccattgtattgatgaaattgaacataccattttaaaagtgaagttagtgaagcctagattaaacacatttgtttcctctgtcgaaaacctattgattgtagctactctttttgatatctacatcttgacaatatcttttgacagcaccactcataaactgaatatcttcaataccggattaaaggtgaacgcgaccggccttaacgtttctaatataacaaactatgaaaaaactgcacaaatattctttaccagttcatctgatggagttaacgtatgggagttgcaatacaattgcttagagaatttgtttaatagcaaatgtagcaaagtatgcttaactaaatccaacttagcaaatttgctacccacaaggttaatacctagtgtacctgggagtagaatgatactaagggtactggagggagacgctaatgttgaagaagagaccatattacagcttatagttgaccaatcaagaggtgtcttgcatacgttatcgacaaaatcaatcgttagatcttacctaataactgctgatgggttagaaggcccagtcttgattgatatccctcatatcaggcgcagcttgggtgcactggctgcaaaaggttctccgctactcaccagtcggcttttaaaaattgtcaaaattatttccatctctaaatgggagaataatgatatatttttagctttgataactacagccggggtccgcttgtattttaagggctccacttctaagaaatcaattagttccctaaagctagtctctttaaaatgtcctcctgctaatccatctgacaagtttcaaaaaactggtttttctgccgtcaatcagaagtcactatactcaaagggtccaagtccactctcggcgcacaaaaatagttccgtctacatcgataccactgatgcaagtaccataatatcgccaggggtatttttcacatccgtacgtaagactaataattccgagatattatcaaacaacctttcccaagcacatttgctggaaaataaggaggaacacaagctttatgtgagtgtaccagactatggtatattaaaaaattacggcaagtatgttgaaaatactgcactacttgacacaacagatgaaataaaagaaattgtttccttgaccaaatgtttcaataatactttgactccacatggttactctaatgtgtttgcctcacaatataacgcggagcccttaaaaattgctgttttaacaagcaatgccgttgaaatatatggatatcgtaagcctgatgaaatcttcgaaagcctgattgagaatcctctaccctttattcacaactatgggttatctgaggcttgctctacggctctttatttaacttgcaggttcaataagtccgaacatgttaaagcaagcgccttaggtttcttagcagccggtatccctggggtaattgagataaagccaaaatattttggagatagtggcagtttatcgtcaaccacaccaaacgaacttaatgaatccaatgacggtaatggaattgtgctgtctcctagattctacggttctgcactattggttacaagattatttagccaaatatgggaagaaaaggtattcacctttaaaatgattcctaaaacagaaaaaattaacacgtttggtatttccataactagaccacaagttgagtactatttatcatcgatatccgttttggctgacttctttaacattcaccgctcttcctttgtttcatttttggctccaagtgatgccaatgttacaacggcatcggacgcagagtcgattgctatggatgctcttatcgtgttgatcaactctataaaagatgtactctccctattaaatgtgttttatgaagagatggacgcttttaaatctttgttatatacactaatgggtgaaaggggtatttatgactcaaaaacacgtgattatttttttaacttacggttccatgatctatttacacctaatacagagacaaaacaaataataaaagagtttttaatagaaattgtcaatgccaatattactagaggatcatcagcagattatattatgaacgttttaaaggagcgttgcggatccttttgccgtggtgtggacattttatgtttcagagcaggagaacatttggaagcagcacagaaatttgaagtgctagattctaaattatcaaggaaccacctagattctgccgtagatctttatgaaagatgttctgagagtatggaaataaacgaactgaaacgtatagttgatgttatggtaaaattaaactaccagcctagtactgctgaatttttgctaagagttgcagacagaattgataaagaaaatcaagcccaaagatacgcaactgaaggttgcagaattaatgatcccaggaaaaaattttatgacaaacgtatcagtgtgtataatttgatctttgacatattaaagaccgttgatgaaaatacttttattgaacattctagttcagtgggaaagattacggtttcttctccagcgatgtcattgaaggaaagagtttattcgacgatattgaacagtaataacggatttttccattactgtttctacgattggttagtccaaaatggaagagaaaacgacttactccaattagattctcaatttattttatcctacttgaaagagaaagcagaaaagtcgttggaaacttctaatttattgtggatttacttatccaaaaaaaaacatttctttgaagctgccactgttttatatgcattggctaattctgatttcgatttgaagttgagtgatagaatcgagtgcctagcgagagcaaatgggttttgtgacagttcttcttccttcgaccagaagcccgcattggtccaactatcagacagtattcacgaattatttgatatcactgctattcaggacgacatacttactctggtggaaaatgaaacgaggattaacgaagatcacaagaaggaattgatttctaaactcaatggaaaagtgcttcccctttcctatcttttcaatgattgtgcagatccgttaggataccatgaaataaatttaagaatattcaaggcttcaggtttaagagatgaaagtgtcattcgaagagaatgggatctactgttcgatgctattaaaatgaaacttttgcctgatggaaaatgtggggacccagaatctttcatttctgaaatttcaagcgctctgattcgagttggtaagataacacacgatacagagataatatttccagttcatttcctaatgaataaggtattcgcatttatttctgatgagacaccagctaataatattccagatagatctgtccggtcaatttttatatcagcaggagtatcctatttgaaaatttattacactttgaaagatatcataaagaactcagaaggaagcaccgaattggcaaagaatgagatggtattgttaatcaaggaatggtatcaaaatgatacagagttacgtggttctattccgttggatcaaattaaaggattggagaaatacgatctagacgccgatcctgttcagaattatgtgaaaaacagtcaacatagcaagaaataa

SEQ ID NO: 769 - DNA, 1098 bp, Saccharomyces pastorianus
atgtcttttttcaatcgagcaaacacgacctccacaataggagcgggcactgcaatggctaacgaaaaggacatagctaatgacattgttattaataatccagcagaagactcgatatcggatattgcgttttcgccgcaacaagatcttatgtttagtgttagttcttgggatggtaaagtacgtatttgggatgtccaaaatggtgttcctcaaggtagagcgcaatacgaaagctcaagccctgtcttgtgtactaggtggtcgaatgatggtgcaaaagttgcttcaggagggtgtgataatgccctgaagttgtatgatgttgctagtgggcaaacacaacaggtcgggatgcacactgcaccaataaaagtattacgttatgttcaatgtggcccttcgaacgcagattgtatagtaacggggtcttgggataagactataaaatattgggatatgaggcagccccagccggtgtcgacagtaatgatgcctgagagagtgtattctatggacagcaaacaatctttattggtcgtagctactgcagagagacatattgtcattattaatttggcgaacccaacaagcatattcaaagcaaccacatcgccattgaaatggcaaacaagatgtgtagcatgttataatgaagcagatgggtatgcaatcggttcagttgaaggcagatgttccataagatacattgatgatgtaatgcagaaaaaatcagggttctcatttaagtgccatcgccaaaccaatcctaatagggcgcctggttccaatggtcaatctctggtttaccctgtaaatagtatagcatttcatccattgtatggtacttttgttacggctggtggcgacggtacctttaatttctgggataagaatcagagacatagactgaaaggctatcctactttgcaagcatctattcctgtatgtaacttcaataggaatggtagcgtatttgcgtacgctctaagttacgactggcatcaagggcatatgggtaacagaccagattatagtaatgtcatcaggctgcatgctacaagtgatgaagaagttaaagagaaaaagaagaggtga

SEQ ID NO: 770 - DNA, 2394 bp, Saccharomyces pastorianus
atgagttttaaagcgaacagttcatatccagattcaattcctttcgccgacacaccatactcgtcaaaccattatcgacacggcttgcagaataacattccaatggcgacgaatagcgagcaacagcagcaacagcagcaacaacagcaacagtggagagatcaggctatatcagatagtccaggtttcagagaaaggacgaacagtaagaaagcgcttaatcaatacatattcgatttcctttcgaaatcatctttaaaaaacacagctgctgcgtttgcccaggatgcgcaactaaacagagatacgaatgacgaacaattgggcaggaacaattataaagacaaaacacccggccaaagtccgatgctagaggtagtagacgcgccccaaggctttttgtttgaatggtggcagattttctgggatattttcaatactagctcttccaggggtggttcagagtctgctcagcaatactaccagcttgttctccaggaacaaagacaggaacaaatctacagaagcttggctgtccatgcggcaagattacaacacgacgcagaacgaagaggagaatatattaacgaagaggtagatcccatgcacttggccgcaatgatgctggggaactccatgtctccagcagcttcaatgcagaatgttaatgtcaatcctatgccgattccaatggtgggcaatcctatcgtcaatagttttccgattccgccatacagcaatacaaatcttgcaactggagcaacaacggtgactgcagccgcaccgccttccagtgatttttctaacacagcatcaatccagaatcgaaaccaaaacgttactggctggccagtttataactatccaatgcaaccctcgacagagaattcagcggggattccgtgtaacaataataccacaaataccacaagtaataacaaatctccggtgaacctacctaaaaacttaaaaaatatgcattcgtcatcaactgataaacccattaatgtggcaatgccaaaatccacaagaagcaggtccgcgacttccaaagctaaggggaaaacaacaaatggcacaggcactagaaagagacgaaaaattactgcaacagcagtttctgcaggatctgcaaacgccgcgtcgccgaatattaccacgccaggctccacaacaagcgagcctgctatggtaaattcaagacttaataagactccaaaatccgacacggctgctactcaccgcaaccaggttatggtatttggagatgaagacgcgtactcgaataagaaagtcagccccttaatgagtgctgtctctccttctaccatagtcgccaagcaaccagcaaaagcaaggaaaaattcaaaaaaggcatcgacgtcggcattttcagtagaatcgacccagtcaacaaataagagcaatagcaataacggaatctcaggtaaaaagcgcagtcctcctaatagtagagtttcaagaaggaaatctaccccgtccgttactttaaatgacaatactgccaaagacgcaaacgatatgttcaggacgcgttcgaataacactaccccaaacattcattcggctccaccaagtagaagcacaaatcccctacctttttctaatgtaaatctaggaagtttcaacaagccggctgtatccagtccattatcatcggtcaccgagtcctgttttgatccagacaatgggaaaattgtgacgaaaggtgggcccaaaagagcagtgaactcgaaagtctcagcatcatctcctttaaacatatcaacgtctccatctggtgatgctcaaaagcaaagaaattctaagccaacaggaagtgcggtcataaagcctccgcaagggttctcaactactaacttgaatattacattaaagagctcaataataatcccatcacagaacaatattataccacaagaattgccgactgcaaactctctggaagcacagatggctaaggatctaaggagcaataaaggtagtcataatgcttttactccagaggggacaaagacaccaaataacactaatcaagtatgtgagtttgagaacgtcaaaaatccgaattctttgatgcttccaaatcagatattcacgtcaactaatgggacaccaaatgaaaattcgaaccttgttaataccacatcttcaaataaaggtaacagtgatagtgcatcggttcagcctgcatccaatatcggtacaactttggggcctcaccaagccagtactactgaacaccaaaattcacagcctcaagagatgaaactcggtaatattggtataggggaaggtcaaggaacggatttcggtctaaacttactggacacaaatgaaaatgactttaatttcatcaattgggaaggttga

SEQ ID NO: 771 - DNA, 3342 bp, Saccharomyces pastorianus
atggatcaaaattttctaagtcaacttgagcagactttgaacgccatcacttctggtacaggcttgaaggaagctacaaaaactttgcaaggccagttttacactcagcctacaaccttgccagctttgattcacattctgcaaaatggtgcaaacgattcattgaaacaattagctggtgttgaagccagaaaactagtttctaagcactggaacgccattgatgaacccacaagaacttctatcaaggcctcccttctacaaactgcattcagtgaaccaaaggaaaacgttcgtcattccaatgctcgagtaatcgcttctattggtactgaagaattggatggaaacaaatggccagatttagttccaagcttgattcaagcagcatctggtgaagacgttcaaacaagacaaactgccatttttatcttgttttctttgctggaagatttcacctcttctctaactggatacgttgatgacttcttgactttgttctcacagaccattaatgatcccgcttccttggaaatcaggtcattatcagctcaagctttgaaccacgtctctgcgttaattgaggaacaagagactatcaaccccacccaagctcaaaagtttgctgctttgattccttccgtggtcagcgtcttagatgccgtcattaaagctgatgacaccatgaacgctaaactgattttcaactgtttaaatgatttcctgctactggattcccaattgaccggtaatttcattattgatcttgtcaagttgtctttacaaatttccgttaacactgaaattgatgaagacgtcagagtttttgctcttcaattcattatttcttctttgtcctatagaaaatccaaggtgtctcaaagtaagctgggcccagaaattaccatggctgctttgaaggtcgcatgtgaagagatcgatgttgaagatgaattaaacaatgaagacgaaactggggaaaacgaagaaaacactccatcatcttccgctatcagattgttggcttttgcgtcatctgaattgccaccatctcaggttgcttctgttattgttgaacacatctcagctatgctacaatctgcgaacgtttttgaaagaagagctatccttttagctatctcagttgctgttactggttctccagactacattttgtctcaattcgataaaatcattcccgccactattaatggtttgaaggacaacgaaccgattgttaaactagctgctttgaaatgtattcatcaattgactactgatttgcaggatgaagttgccaaattccacgaagaatacttaccattgattattgatatcattgattctgctaaaaacattgttatttacaactatgcgactgtcgccttagatggtctacttgaattcattgcctacgacgccattgctaaatatttggaaccattgatgaacaagttattttacatgttggaaagtaacgaatcatccaaattaagatgtgctgttgtttctgccataggttctgctgccttcgctgctggttctgctttcattccatacttcaagaccagtgttcactatctagaaaaattcattcaaaactgttcccaaattgaaggtatgagtgaagatgatattgaattaagagctaacacatttgaaaatatttctaccatggctagagcagttagatcagatgcgtttgctgaattcgctgaacctttagttaactctgcttatgaggctattaagacagattctgctagattaagagaatccggttatgcgtttattgcgaacctggctaaggtctacggtgaaaattttgctcctttcttgaaaaccattttaccggaaattttcaagacattagaattagatgaatatcaattcaacttcgacggtgatgctgaagatttggcagcatttgccgattccgccaatgaagaggaattacaaaataaattcactgttaacactggtatttcctatgaaaaagaagttgcctctgcagctctatctgaattggcgttaggtactaaggaacactttttaccatacgttgaacaatccttgaaggttttgaacgaacaagtcgatgaatcatacggtttgagagaaactgctttgaataccatctggaatgtcgttaagtctgtcttattggcttctaaagttgacccagaaaactatccaaagggtatcccagcttcttcatacgtaagtgcagatgttttagctgttattcaagctgctagagaaacttctatgggtaacctaagtgacgaatttgaaacctcaatggttattactgttatggaagactttgccaatatgatcaaacaatttggtagtatcattatcatggataacggtgactcttccatgttagaagctttgtgtctacaagttctaagcgtcttgaagggcactcatacctgtcaaaccattgacattgaagaggacgtaccaagagacgaagaattagatgcctctgaaactgatgccactttacaagatgttgccttggaagttcttgtcagtttatcccaagctttggctggtggttttgccaaggtctttgacaatttcagaccagttgtttttgggttgttccaatccaagtctaagaacaagagatcttctgctgttggtgccgcctctgaattggctttgggtatgaaagaacaaaatccatttgtccatgaaatgctagaagctctagttatcagattgacaacagacaaatctctggaagttagaggtaacgctgcttatggtgttggtttattatgtgaatatgcatcaatggatatttctgccatttatgaacccgttttgaaggcgctttacgaattgttgaatgctgccgaccaaaaggctctagctgctgaagacgacgaagccaccagagaaatcattgacagagcatacgcgaacgcaagtggatgtgttgccagaatggctttgaagaacagtgctttggttccattggaacaaaccgttccagcattattggcacatttgccattgcacactggttttgaagaatacaatccaattttcgaattgatcatgaaactatatcaggaaaataaccctgttgtcacaaacgagaccccaaggatcattgagattttcagcgttgtgttcactaaagaaaatgatagagttaaactagaaaaggaatctactctaggcagagaagaaaatatggaaagattgaagcaatttcaaactgaagagacgaaacacaaagtcgttgaactattgaagtatctgaacactacttacaatggaattgttgcccagaacccggtattagctgctgtcatcgcttga

SEQ ID NO: 772 - DNA, 3291 bp, Saccharomyces pastorianus
atgccctttgatgctttgctatcaagccaaaaagatagtgtcaattcccagaacattaccccaatatctaaatctgttcttttggcccctcattccaaccaaccgataattgaaatagccacgtattcagaaactgatgtgtacgaatgctacatacgcgggtttgaaaccaaaatagttatgagaagaactaaagatgattggattaacattacgcaagtattcaaaattgcccaattctcaaagactaaaaggactaaaatattggaaaaggaatcaaacgatatgcaacatgaaaaagttcaaggtgggtacggtaggtttcagggaacttggattccattggattcggctaaattcttggtcaataagtatgaaatcattgaccctgtggtaaattccattttaacttttaaattcgatccaaacaaccctccaccaaagagaagtaaaaatagtatcttaaggaagacttcaccaggaactaagataacatcaccttcgagctataataaaactcctagaaagaaaaataacagcgcatcaacatcgactaccacaacaactacgagcaaaaagggcaaaaagattgtttcagtcaaccagccaaatccaagtcctttacaaaaccttgtcttccaaacccctcaacaatttcaaacgaatccatcaataagtataataactagtcacgataacaacaccatgatgaatttcaacaatgacactagacacagcttaataagtaatattacgaataataatagcaaccaatctaccattattcaacaacaaaaacctattcacgaaagctcttttagtaacaattattccgctactcaaaaacctttgcagtttttccctattccaacaaacttacaaaacaaaaatatgattacgaacaagactaatagtattgaaaacaacacttataatcataacaatgaaaatagcaacagcaacagcaataacaatttgataatagtaccagatggacccctgcaaaatcaacaacagcataacgaatatatgacaaataactttaatcactcgatgatagactctaacacaaacggtaatagcaaaaagaaaagaaaaaaattgaatcaaaccaatgaacaacaatttttcaaccaagagaaaatacagagacactttaagtcaatgaaacagcctttactatggcaatcatttcaaaatccgaatgaccatcataacgagtacagtgacaataatggtaacaacaacaacaccgtagtttccaacggctcctctattgaagtcttttcttcaaacgaaaatgataacagtatgaatgtgtcctcacgctcaatgacaccatttagtgcaggaaaccattcatcccaaaataaaatggaaaacaaaatgtcagaccaggaatacaaggaggcgatattgataatattatcgtcagaaagatcttccgatgttgaccaagcattgttggctactttgtatccaacacccaaaaatttcaatataaatttcgagattgatgaccaaggccatactcctctacattgggctacggctatggccaatattcctctaataaagatgctgataactttaaatgccaacgcattacaatgcaataaactaggtttcaactgcatcacaaaatcgattttctacaataattgttataaggaaaccgcatttgatgaaataatctctatcttgaagatctgtctaataactccggatgcaaatggaagattgccgtttcattatttgattgaattgagcgttaataaatctaaaaatcccatgataataaaatcctatatggattcaatcatattaagcctgggccaacaagattacaatttattgaagatctgtttaaactatcaagataacatagggaacactccattgcacttatctgctttaaatttgaacttcgaaatctataacagactagtatatcttggggcctcaacagatattttgaacttagataatgagtctcctgcatcaataatcaataaattccactcaactaccaacgcgactaacgataacgatactaaaaccgatcaaaaagaagctcgagaattttcccagaagcacaattatcagcaacaacagcaacagcaacagcagcagcagcagcaacagcaactacaacatcagccacaggagccaccacaacgacagaacaacatcaaaattcccaaaatcattaaaacccaacaccatgataaagaaaatcctgctataaatgttactgtaatcaaacaagactcagaaataagtgaaagtcattatttacattccaaccaaccaaattcaacaaacattaacactataatggacgacctgtcaaatctcaattcttttgtcacttcttcagttattaaagatatcaagtctacaccatccaagattcttgaaaactcccccgtcctatatagaaaaagatcacagtcatcatcaagtgagaaggagaaagaacatggacaagagaatcaaaataaaaagaaaagggagtcttcaagtataaaagaaaacgctttgccatcattagactcgccttccacattattacccatacaaacatctccgttgagaaagtattccaaaccacttgcgcaacaaattgacaaattaaatgcaaaggttacttcgattcaaagattaatgggtgaggatatcaagaatctagacagtgaaatagttaaagccgaatcctctatatctaacaatcatcaaagattgaccacaatatcacatcaaataaaggatgctttcaattccgtgtcaacgaaagtttccatagattcgatatcagatttacagtctagaatcaaagaaacctcttcagaattgaattcgaaaaagcagaattttattcagagtttggagaagtcacaggctttaaaactggcaacaattgttcaagatgaagaatcgaaggttgacgtagatcccaattcacaatcacatccggaaaatcaagaaaataaagacacaagtccaatttcgaagtcgagctcttcttcgcccaataataccgaagtgaaaactaaattttctaaggacaagcaacattcatatgataaaaacgaaatgttagagctagccactgaactgacattcttacaattcaaaagacggatgacaacgctgaaaataagtgaagccaggagtaaagtaaattcgtcggtgaaattagataaatacaggaacctaatcggtatcaccatcgaaaacattgattccaaattagacgacattgaaaaagatttaagagcaaatgcataa

SEQ ID NO: 773 - DNA, 582 bp, Saccharomyces pastorianus
atgctacctttatatcttttaacgaatgcaaagggacaacagatgcagatagagctgaaaaatggcgaaatcatacagggtacattgaccaatgtagataactggatgaatttgactctatctggcgtaaccgaatatagtgaagaaagcctagtcagtggcgaagatagtgctgacagtagtaaggctgtgaaactgaatgaaatttatgtcagaggaaccttcattaaattcatcaagttgcaagataatataattgataaagttaagcagcaaattaattccaacaacaattcaaacaataacaattcaaacaacaacggtcccggtcaaaaaagatactataataatagagattcaaacaataacaatagaaataactacaacagaagaggtaataataacaacagtaacaataaccgccgcccatactcccagcatcgtcaattcaacaacaacagcaacaacaacaacaacaacaacaacaatgccatcaatagcaatccaaatatgaacagcggtttaggtggatccgttcaacataatttcaacgcctcttctccgcaaaacgtcgaattttaa

SEQ ID NO: 774 - DNA, 3117 bp, Saccharomyces pastorianus
atgagcagtgaaagagaaacacctgctctctcacagctcaatacgtctgttggtgagaacaaagatgcgtcccaaactctgtcaccggagtatgataataaagggagtataagcgggcgtgagggtggcaatttccccacgtacattgccatcaacgagtattataagcgaatggaagatgaactagatatgaaacctggtgacaagatcaaagtgataactgacgatgaaatatacaaagatggctggtattttggacgtaatctgagaaccaacgaagaagggttatatccagttgtattcacccaaaagataacggtggataggaccccaacgctaatgagagccaagtctaccaagagagtgtatagcccattggcacacgaagatcctcttctctctagcacgtttatcaatgaaaacgactccaccagtgaattacccactccacaaccaattgaaactgctgcctccatttcaagaaatactaatggcaaacttgacagaaacctgtccttgaaaaatacaatgagtgatatagataatgccttacgggagtttaatgaaggctccgagggcgctccggatcgctctatcgcttcaagcagggacgaagctcatagcataactcatgaaacaattttatctacgaccgatgggctggacgtgatcgaagcgaacaacaagccaacaaccagcggatctactaagcctttaagcaacagtatgggcacacaagctactttcattaatggcatcgacactaccaaactgaaccctgttgaagcggaaatgtggacacctgaagaaataacagcatattttatcatggaaggatatgatgtccaatccgcctctaggtttcaaaaacataagatatcaggtagaattttattagaactagaactagtccatttaaaagagctagatataaattcctttggtacaagatttgagattttcaaagaaattgaaaaaatcaaagaggcaattaggacaaatggtcactcatttaacagagttagcaaggctaataataacactaacagttacaaccaattgatgcctcctgcgaacgtcgaccagagggtatcctacaggggccatgtcagaaaaacttcacagtcgttagatgaccttccatcacaacagaattttactgctacccctcaaggtaacagaaattcttcaacaggtaaacatagaccgaaatctttaactcttgatactcaagaaggcgattccagtgctactccaaaaattcagattcctcaagttgtagaagaaattgctagtaatgaatatttgtttgtttccccaagaagggcacccaaacctccatcttatccaagccctgcacaacctcccaagtcacccctcctaagtaatagaaaggcctcaccgtctcccacccaattacattcatggcaatcaccaagttcatcttactcggactcaaaaaaaaatttgtataccgaccaatcttcatcgaattctaattcaaattcccgttttgcactttcaaaaaacaaccaagggaacgggaggccattgtctcctattcctccccccactcttaaagcaatttcaaattctgcagacaaaacgaaagacacaaatacagtatctgcaaatagaaattccgttctttattcaggatatgctgttgactctttcaacagaaaatcttcttattccagtggtgaggaagagcacttccaagaaacgttggatacactcgaaagacccacatccagcatatacgccgatgggtctacaatcgcatcaatgagtaatgctaggccaatacaagacaatgaaaagaagaaaaaaccgacgagacattcttccttgttatcttcaaaatccaaaggtgatcccaaaaggaactcttctttaaagagaagcagtagcgcatcaagaaccagttcattcagaaaaagcacttttatgctaagtccctttagacaacagttcactgaaaatgcggctcgttcttcaccaagtcctgaaaaaaattctatggcttcaacgccactatccccaaccgataacaaatcttccaaggacaaatcaaaagcaagatctgtcagcgccaaagacgctattcatgaggattttacagaagttgtaaaggatgataaaaacaagaggtctgttagtgaggctgtcaagggtgagaccctcaagggaaaaagtttgcgccaaatgactacgagacctttggcaaagaaaaaacaaacatcggcgtttgtggaagggctaagaaacattggcgtcaaagaagcaatgaaaaatgcagacttttcaggttggatgagcaagaagggaagcggcgctatgagtacttggaagacgagattcttcacactgcatggtaccagattatcctatttcagttccacaacggacacaagagaaaggggtcttattgacgtcacagcgcaccgtgttatacccgctaaggaagacgacaaactggtttcattatatgctgctagtacaggtaaaggtcgatattgttttaaactactacctccacagccaggttcgaagaaaggcttaacatttacacagcctcgcactcattacttcgcggtggaaagtaaagaggaaatgaggggttggatggctgcattgatcaagactactattgacattgacacttcagttccagtcattagttcttatactactccaacggtttccttgagcaaagcacaagaaatgctagcagaagcaagagaggagaccaagataagagaacagcaaattttggaaaacgaagaagacgaggaccaattgttatgggatcaacaacagcagcaacaacatcatcaagatggtaaccaaagtcaagctgaccgtacaatttctgcttccacccaacggacttccgatgaagacaataccatatctactccaaatctgtcctccgctaccaatacaaccgttggctcaaatgggttttctagtcctttcttactggcttctgggatgttatctcctggactggctcgcaacaacagtatgcgggggccagataagaagaataaactcgtaacggaggaggactacttcgggcaaaattttgaacacaagggtggcaaaatatag

SEQ ID NO: 775 - DNA, 576 bp, Saccharomyces pastorianus
atggttgtttcatatttatggcaatcatactcttcctccaatttccagtggatttacccattgcataccggtaactgccttcaaaatgcaaagtctccctttaccgcggaactattgctcaagaggaaaagcgatgatatccaggatatccaaaatagcagaatgattgagttgctactgcagggcgcatatgatacgaagagacagcaaacatatatacagggatacattccgagcaggaagaaaaagactcacatcaagaaattcctaaagaagcagaaaaaatcaaggaaaccggtcacgttagaacaaggctgcttgtccggccccgtaactctgcgtttcggaaattttgcaggaattagagatttgagaggtgcgagatgtccgctccacggcataaaacatggcgttcaccccaaacctggagagagatgtgcgtgtcaacaagccactctcttcccaagcccactgactaaactcagtcatgaccagtcagttgcactcgattggcttgggtcctcttcacgctttcttgacaatattgccgatgatttttcatccttgtatttttga

SEQ ID NO: 776 - DNA, 813 bp, Saccharomyces pastorianus
atgacaagtgggcctgataaccaaggtttagaagatgaaaacctacgaatcaagagggcgagaatagaaccgatagagcataacggtgatgaggatgagagctgcttatcaagcatagataatggggtagcagaaaaccgtgaagaagactcagaagcagcagttgaagttgtcggagaaagatttttcgataatgtttccgaggacgatgacacatctctgttcagggcactcgaagaaggctctggtaacagtactgcaagcgccgctccgaacattaccaccaggaatgatgggagaacagcagataacgggggatcggatgcgaacggcaataatgctgccacaacacacgatggggaggcgcatacagtagaagttccttcacaaacagcagacccttcaagtgcttctctcatctctcaagaaataccaccattaatagaatctgctacaaatatcaagggacgaactgtcgacttgactgcagaagccatagacttagacgccgaagagcagcaagtgttggaaatatcagataaggattttcaagacgaaaacaaaacgcctcccaaggaatatggtgcggccaaggactatcggtgcccgatttgcttcgatccgccagagactgctctcatgaccttatgtggccatgtattttgttgttcatgcctttttcaaatggttaacagttccagaacctgcaggcagttcggccactgtgcactttgcagaagtaaagtgtatttgaaagacgtaaggatgataatactaaggaaaaaacaagtcaagaagaaagcgaaaagctag

SEQ ID NO: 777 - DNA, 1356 bp, Saccharomyces pastorianus
atggtgactagtattagatctggcgtattgacgctgttgcacacggcgtgcggtgctggaattttggccatgccgtatgccttcaagccgtttgggctagtgcccggagtggtgatgattgtgatttgtggggtgtgtgccatgcagagtctgttcatacaagcccgtgtagccaggtacgtagcgcccgggaaggcttcctttagtgcgttgactcggctgatcaacccaagcttgagcattgtgtttgatttggcaatcgcggtcaaatgttttggggttggggtttcgtacatgattgtggttggggacttgatgccccagatcatgtccacgtggaccgggaatgcgtggctgctgagtaggaacgtgcaaatatcgctgatcatgcttttcttcgtggctccgctgtcgtttttgaagaaattgaactcgctgaggtacgcctcgatggtggccatctcctctgttgcgtacctgtgtgtcttggtgctggtgcactatgtggctccctcgaacgagatcttaaagttgaaaggccgggtctcgtacttcttcccacgtcaatcgcacgacttgaacatgctgaacactctacccattttcgtcttcgcctacacatgccaccacaacatgttctcgataatcaatgagcagaagtcggtccggttcgagcatgtgatgaagatcccgcttatttctatctctttggccctcgccttgtatatcgccatcggttgcgccggctatctaacgtttggtgacaacatcatcggaaacatcatcatgctttacccacaaagtgtctcgagtaccgttggcagaatagcgatcgtgctgcttgtgatgctggccttcccgctacagtgccatccagcgagagcctccatccaccagattttacaatactttacagaggagaatgctactacaagtactacatcggtggctggccccactggtctcgctggccccaacgaaagctccccgttgatccttaacaatagcctggacatcaacgaggtcatcgaagaagagccgatttaccaacccaaggacactcccttgaggggcaagagctttatcatcataacgtgtggtatcctggttgcgtcgtactgcgtcgcaatctcagtatcatcgttggcccatgtgctagccatcgtgggtgccactggttccacctctatctcatttattttgccggggctatttggctacaagctaataggaacagagcacaaggcggatatgcccctcccaacgagacttttcaagtattccggtcttgccctctttattttggggctactaatcatggttacctgcctgacggcagctcttaaactaaactag

SEQ ID NO: 778 - DNA, 735 bp, Saccharomyces pastorianus
atgtcagctgttgaaatctcccccgatgtgttggtgtacaagtctccattgacggagcaatcgacggaatacgctagtatttccaacaactcagaccagaccgttgcattcaaggtcaagaccacagctcccaagttctactgcgtaagacctaacgcggcggtcgtggcccctggcgagacgatccaggtccaggtcatcttcctgggtctgactgaagagcctgccgcggacttcaagtgtcgtgacaagtttctggttattacgttgccttctccttacgacctcaatggaaaggctgtggcagacgtttggtctgacttggaagctgaattcaaacaacaggccatctccaaaaaaataaaagttaaatacttgataagtccagacgtacgtcaaccatcgaaccaaaatacacaggatagcaaggatgtcgttgagcccgtggcccaagaaagtgcgccaagggaagatttttcaatggtagacgaaaaagaaagccctgttgaactggaaaccgagccacctgttcaaataaagaaagaagaagttccacctgccatccaggaaactgtttcccaagaaaatgagaagcacgcctctaacagcgctccaactacaaagagccaaataaaggaacctgcaaccctgcctgcagaaaacgaatcctccagcatgggtctattcatattggttgcgcttcttatcttggttttgggttggttctacaaataa

SEQ ID NO: 779 - DNA, 1479 bp, Saccharomyces pastorianus
atgagtagcgatgaaggagaatccttcgccacagagcaaaccactcaacaagttttccagaaactaggtaacaacatggaaaatcgagtttgctttgattgtgggaacaagaatcccacctggacatcagtcccctttggtgtaatgctgtgtatccaatgctctgccgtgcatagaaacatgggtgttcatataacttttgtaaagtcttctacgttggacaaatggacaattaataatctgagaagattcaagctaggtgggaaccataaggctcgtgacttttttttaaagaacaacgggaaacagctattgaacactgcaaatattgacgccaagacaaaatacacgagccctgtggccaaaaaatataagctgcacctggacaaaaaggtccaaaaggatatggaattgtacccatcggctttggtcttgaatggccaagacgatacggattctccattggacaccgattccgatgcctctagatcgaattctaaagaaaacagcgttgatgactttttctccaattggcaaaaaccaaactcaaattccaattctagttctaagattaatgtaagttcaggttcactagcctccaataataccccaaagactacagcgaccaaggcaagaagctcaatcttaacagcaagcagaaaaaagccggtattgaactcttcggacaaaaaaaaacactcgattttattatcagcaagaaagcccacaagactaactgctaagaaagtggacaaatcgcaagctgatgatttgttcgaccagttcgaaaaagacgctcaacaagaaaaggatgatgaattcaccaatacatcttctaacgccaaggttagacaaaatgattacgattcccaattcatcaatagcggcagcaaaagcaacaataatgacagtatagatgatatgaatacacagcctgatgaatttagtgacttcttgaatgacgctccaagcaactctgatacaaatagaaaccagcatcaagatactctaacaccgaagtttgctaaattaggatttggtatgaccatgaatgacgctaacgatttagccaaacagcaaaaggaatctcaaaaagtagcccagggtccaagatatacaggaagaattgctgaaagatacggcacacaaaaggctatatcttccgatcagctttttggtcgtggttcatttgatgaggtggtcaacaaggaagcacatgataagttaaagacgtttgataatgccacatcgatctcatcatcctcgtattttggcgaagaagtagacgaatatggtaacccgatcaatggtgatgtgggcgggatgggatccagttcattcgatggtcgcaataccaacggtaatggattcattgatttcaatgctactacagatgatgaattacaaatgttaaaagacgttgttgaacaaggtgcggaaaaattaggaagttatctgagagactacttaagaaagtga

SEQ ID NO: 780 - DNA, 1566 bp, Saccharomyces pastorianus
atgtcccaacgttcctcgcaacacattgtaggtattcattatgctgtaggtcctaagattggtgaaggttctttcggggtgattttcgagggggagaatatactccattctggccaatcccaaactggcagcaagagagactccagcataataatggcgaacgagcccgtcgcaatcaaattcgaaccgcggcactcggatgctcctcaattgagagacgagttcagagcctacaggatattgaatggctgtgtcggaatccctcatgcttattatttcggccaagaaggtatgcataacattctgatcatagatttactggggccctcgttggaggatctttttgaatggtgtgggagaaagttttctgccaaaacaacttgtatggtagccaagcagatgattgatagagtgagagcaattcatgagcatgatttgatttatcgcgatattaaacccgataattttttaatttctcaataccaaagactatcaactgaagggaaggtcaccaagtcatgcgcctcttcttctaataatgatcctaatttaatttatatggtagattttggtatggcaaagcaatatagagatccaagaactaaacaacatataccctaccgtgaaaggaaatcattgagtggtactgccagatacatgtctatcaatactcattttggtagagagcagtcgcgtagagatgatttagagtcactcggtcacgtttttttctacttcttaagggggtctttgccatggcaaggtctgaaagcaccaaataacaaattgaaatacgaaaaaattggtatgaccaaacagaaattgaaccccgatgatcttttatcaaacaatgctattccgtatcagtttgccacatatctaaaatatgcacgttctttaaaatttgaggaagatcccgattacgattatttaatatcattaatggatgacgccttgagattgaacaatttagaggatgatgggcattatgattggatggaattgaataatggcaaaggctggaatataaaagtcaacagaagggctaacttgcatgggtacggcaatccgaatccaagggctaatggtaacacgacaagaaataacactaatatgaactcaaaaacccgaaatactacgccagtgccgacagctaagcaacaagctcaaaacagcaataaggacaattcgaaatctagaatttcatcaaacccacaaagttttattaaacaacaacttttgaagaaaaatgagcccaatagtaaatatattcctgaaacacattcaaatcttcaacgaccaatgaaaagtcaaagccaaacgtacgactctatcagtcatccccaaaattcaccatttgtaacatattcaagcttaaaacccaatcctaaaagaagtactaacgagcataacttaccaaatcactattcaaatttcgcgaataagaatatcaattaccaaagccaacactacgaacaagaaaacgatgtttattcaagtaacgaaaatgaggcattttgttttaggttttataactactgttgctgctgcttttgttgctgttaa

SEQ ID NO: 781 - DNA, 1722 bp, Saccharomyces pastorianus
atgcaagataccaagtattacgaaccaacaaacatttttcgtcaaccagccattaatatcaaaaagcggtcagagaaaaagaaagttttacagtcaattacaacctcatccacatataaaaaatcgtggcaaaataatacttcaaaaatgaactcacccattttacgaaaggcatccgataacttcaatgacttttacacaacaaaaaaattaagatctgattactggaaattatacggtattgatgaagaggagcagttcataccttcagatatctctatcgtggacaacatagtcctagtatccacaatgagcgataaagataacttgaaactcttcgaaatttccagcgttaaaaaactaaaggagttacaaacaatcagtgttcctggcacacccattacttgtatttgcttattacctatggcagatttctcacctagtgttttccgtaaccctcggataaattctagccatgatcaattgatcttgacgggtcatcaagacggtgtggttaatttgatatctacttcgatatataagggttgtgcgaagataataaaaaggtttaaccataataagttcctgaagtctaccgtgtcatcatcaacgccgattctagagatatcaccaaagacagcaccgattttaaaggtttcgccatggaacaaaactggttttgtttcccttttaaatgattctttattcatatacgatttgaaatcgaatacgaattcaatgaaaacacctatatttttgcagtcatacccaggtataaattcctttgctgttaacgacttttacgatccattcttattggctttggttggttcaaagtttggcccaaacggtgtctcgctgctcgatctaaggacaaacttatacattccagatattttagataataacactgtgactggaacaagtgaagaccacttgcaaaggaaaaacacgagtttggattgtgtctggatagataatcattacgttgcgcagggtttgaacgataaaattcaaatttgggatattcagtcttgcgacagcaaacctgtttgtgaactgaatgcgaataaagggtacgttgaaagaataaaatttgataaaaagacaggtttgttgtatagcagtgacgaccaggggtttgttatttgctgggatttgcaaaatttacacaatatgaaatatggggaattaattcatgggtttaactcaattaacctagacgggataaacgaaacattgttaaccaaagaagtctttcaatgtggtaatattattgtaagcggtgtagataataaaaaaatatgcttagagagcaatgagatttcgctcaagggaacagggtgtggttttttgttcttggagacgacgaatgagggaagtttaataactctcgacaacttctgtgaactgggattacatcaaatctgtcaagtgaaatacaacgtcaacactggtaaaccaatcgacattgacgatactgcaaataacgaaatttctgattcatccgttttattatgttgtaatgaaagcgatcaaagtctcacggataattcagacgatatgttctcaaataatggtaattgggattgctcttcagcaaatactattggtgaaggtagattgcacagtgaccaagaagatgttgttcttacgaaaaggatatattccatgaatgacatgtatttaagcgggtctactattgacgccactgctatataa

SEQ ID NO: 782 - DNA, 2430 bp, Saccharomyces pastorianus
atgccttcatcaatatctgtcaagctagtggccgcagagtcactgtataagagggatgtgttccgttctccggacccctttgctgttttgaccattgatggttaccaaaccaaatctacttctgcagcaaaaaaaacgctaaatccttattggaacgaaacctttaaattcgatgacattaatgaaaattcaatcttgaccgttcaagtgtttgaccagaagaaattcaaaaagaaggatcaagggttccttggtgtcgttaacgttcgcgtgggcgacgtcttaggccatctggatgaagatactgctacatcaagtggcagacctcgtgaggaaaccattactcgtgacttgaaaaaatctaatgacggaatggcagttagtggtagattgattgtcgttttatccaaacaaccttcttcaaactcacattcacaaactgcctctggtcatgctgcatcatcgagtacaggcacaagttccactcctcgagctaatggccatacttcgtctgctacccgtaatcattcatcttctcatgcctcgaggggtaccgctcaagcagtggaatcaactttacagagtgggacaaccgctgccactaatacggctgctacaaacaaccgtcccgccagttccgcttctagcggcacaagacagtactcctcattcgaagatcaatatggtcgcttaccacctggttgggaaagaaggactgataattttggtcgtacatattacgttgatcacaacacaagaacaactacttggaagcgtccaacactcgatcaaacagaagctgaacgtggtaaccaattaaatgcaaataccgaattagagagaaggcagcatagaggaagaactttacctggtggatcctccgacaattcctctgtaacggttcaagttggaggtagctctaatataccccctgttaacggtgcagcagcagcagcatttgccgctacaggcggcaccacatcaggtttaggtgaactaccctcaggttgggaacaacggtttactccagaaggtagagcttattttgtcgaccataacacaaggacaactacttgggtagatccaagaagacagcaatatatacgtacttatggtccaacgaatactaccattcaacaacaacccgtatcccaattgggtcctttaccatctggctgggaaatgagattgacgaatactgcccgtgtatatttcgttgatcataacacaaaaacaacgacttgggatgacccaagattaccatcatcattagaccaaaatgttcctcagtataagcgtgatttcagacgtaaggttatatacttcagatctcaacctgctcttagaatattgcctggacaatgccatatcaaagtacgtagaaagaacattttcgaagatgcctatcaagaaatcatgaggcaaacaccagaagatttaaagaaaagattaatgattaaattcgatggtgaggaaggtttagattacggtggtgtttccagagaatttttcttcttactatcacacgaaatgtttaatccattttactgtttattcgaatattctgcttatgataactacaccattcaaatcaaccccaatagtggtattaacccggaacatttgaactacttcaagttcattggtagagttgttggtctaggtgttttccatagaagatttttggatgcattctttgttggtgcattatataaaatgatgctacgcaaaaaagttgtattgcaagatatggagggtgttgacgctgaggtgtataattcattaaactggatgcttgaaaatagtatagacggtgtcttggacctcacatttagtgccgacgatgaaaggtttggtgaagtcgtaacagtggacttgaaaccagacggaagaaatatcgaagttactgatggcaacaagaaagagtatgttgaattgtatacacaatggagaatcgttgatagagtacaggaacaatttaaggcatttatggatggtttcaacgaactaatccccgaagacttagtgaccgtgtttgacgaacgtgaactagaattgttgattggtggtatcgcagaaattgatatcgaagattggaaaaagcatacagattatcgtggttatcaagagtcagatgaagttattcaatggttttggaaatgtgtcagtgaatgggataatgaacaaagggcacgtttattgcaattcactactggtacttctcgtatacctgttaatgggttcaaggatctacaaggttccgatggtccaaggagatttaccattgaaaaggcaggtgaagtacaacagctgccaaagtctcatacatgtttcaacagagttgatttaccacaatatgtcgattacgacagcatgaaacagaaattaacattggctgtggaggaaactataggtttcggtcaagaatga

SEQ ID NO: 783 - DNA, 786 bp, Saccharomyces pastorianus
atgcctcaaaacgattatattgaacgtcatattaagcaacatggtaaaagattagaccatgacgaaaggaaacgtaagagagaggcgagagagtcccataagatctctgtacgtgctcagaatttgactggttggaagggtaaacaatttgccaagaagagatatgccgaaaaggtatcaatgagaaagaagatcaaggcacacgaacaatctaaggttaaaggttcatctaaaccattggataccgatggtgacgctttgcccacatatttgttggacagagaacaaaccaatacagccaaagctatttcttcatcgattaaacagaagagactggaaaaggctgacaagttttcagtaccactaccaaaagttcgtggtattagtgaagaagaaatgtttaaagtcattaaaacgggtaaatctagatccaagtcatggaagagaatgataacaaaacatacttttgttggtgaaggattcaccagaagaccagtaaaaatggaaagaattattaggccaagtgcattgagacaaagaaaggcaaatgtgactcatccagaattggccgttactgtcttcttaccaattctagctgtaaagaaaaatccccaatctccaatgtacactcaattgggtgttttaaccaagggtaccattatcgaagtcaacgtttcagaactggggatggttaccgccggtggtaaagttgtctggggtaagtatgcccaaattacaaatgaaccagatagagacggttgtgtcaatgcggttttgcttgtatga

SEQ ID NO: 784 - DNA, 1344 bp, Saccharomyces pastorianus
atgtctttatatcctttacaaagattcgagtcgaatgacacggttttcagctacacgttgaactccaagcctgagctggtcagcgagggctgtaataatgacgaccaacgcttcactctccaactcataccaaacgcaaacgccaatgctaaagaaatttataataacaatatcgaaatcatcaatgatctaacaggcaacactattgccgatggatcagcaatcgctacgacatcgaaccagcaggaaaggaggctttcaatatcggattatcgtaccgagaacggcaactattatgaatacgagttttttggtaaagcggaatttaacgagccactatttagtaacaatgtcgtggaagatgacggggagaatgacgtcgacgtgaacaacaacaacgacagtgatgtattgatggtaagcgatgatgatttggaactcgacgaaagattctccttccataaacagcagtctcttgacggactaaatggggtcactagcactaataccttaaagaatctagaaattcatgagtttataatagctccaatcgataataacgatgatgatctcgaggattcatttactaatgcgcctcaatcaaagaagaaagtaaaggactacttcaaactaaacatatttggcacaaatagtagtagcaatagcaacaacaatagcctgggtcccgaacttacttcaaacgaagtctctccctcacaaaaaatgttcaagaatagatttttcagaagcaggaaaagtactcttatcaagacccattctcttgaacaagaaaacgaagtactaataaactccgcctttgaatcgtctttaagtgacgataacgatgaagatgatcatgccatcataaatcctttgaaattgcttggtaataataaggaagcttctactcacatcgcaagtaaaatctcaacgaatccgttcaagtcaaacaacgattttgaagtacccgaaccaatctcagatccaagcgatgattcaaagaaagatctactatctgttatatcagggtcttcctctccttcttctccttctgcaccatcaccttcaatgtcgtcctccttctcgtctcatagtctaatatcaagaaagaaggcaggtagcacgcaaaagacccgtggaagaaaaccctctttaatcccagatgctacaaaacaattcggttgtgaattttgtgatcggagattcaaaagacaagagcatcttaagagacatgttagatctttacatatgtgcgagaaacctttcacttgccacatttgtaataagaatttcagtagaagtgacaatttaaaccaacacgttaaaactcacacctctttataa

SEQ ID NO: 785 - DNA, 360 bp, Saccharomyces pastorianus
atgccaaaaaagagagcttccaacggtagaaacaagaagggtagaggtcacgtcaagccagtcagatgtgtcaactgttccaagtccattccaaaggacaaggccatcaagagaatggctatcagaaacatcgttgaagctgctgctgtcagagatttgtctgaagcttccgtgtaccctgaatacgctctaccaaagacctacaacaagttacattactgtgtctcttgtgctattcacgccagaatcgtcagagttagatctagagaagacagaaaaaacagagctcctccacaaagaccaagattcaacagggataacaaggtttctccagttgccgctgctaagaaagctttgtaa

SEQ ID NO: 786 - DNA, 5262 bp, Saccharomyces pastorianus
atgatcgtgttacagccatcatccagtgtttgttatccattaaacctgcctatcgcgcccggaccgcatcttgatgaagcaacaagaaagaaactcacattggagtgcaggaccggtgctgctgtagaactagcccgttcaggtgtattcgtacatggcggtctcacactgcctctaaatctgacagttataaactctctgcaattgcaaaaagaattaatattgtattttggcaagcataaaaatagaaatatagattttaaaacattagctgattggataagccctgagatattcttcctcgatttgatttcaagaacatggcaaagagtattaaccacaatagatacaactacaggaggcgactcgaataaagacctgcacttcaaagagaggttgctccattcgatgtgctttacagaatcaaacatctatatttttggtgggctcatagtatcaccccaaaatggctatgaactggtagggacaaacgaattatggaggctagatctcaagacaaagtgttggtctttggtaagtaagaaccctcaaataacaagacgctttaatcataacatgcacatcctaaacgaaaacaacgaaaaccaagatacaaagctagttgtagtaggtgggttgaataatatggatattccaataaaaaaaatcgatatatttaacctacgaacaaacacctgggaatcagaatcaaaatcagaaacgttaccggatttaaaacggtcgtccaagatttgggttaacattgacggaatgccaatttctttatctcatgattctaatttttctgttttaatcgagaataacgaagccgaagttccgacgttagcattatattatcctcaagacacgaaaaagacatccaggaggggaaccaacgatgacagcttttcgaactacattcatagtgtagatgaacaatcaagcgtaccaaaacatccacaccatggtcacggtgatctgaggtactttgaaggggaagacgcagaaagcgattcaattaaaacactaatgtcaccaattgtaatcttaccattgctcgcaaaatccgagggtgctagaatgacatcgaatcctactcaaaacaacaaaggaaattctatcctgcaaataccgtttcatttacaatatccttcgggtagttacttcaactacaatattgttgtcatagggttctatccagaccctcatccctcaaatttgcattgttttatttataatattgctagtggcaaatggattaaagtaaacataagctgcactgaatgtagtacgaatacgcatagattttggaaactgttaacctggaaatcacatcatcaagctttattgcttggtaccaaatccaacgatttttgttcacctagcgttcaaaaattcgatcacattttagcattttcgttaccaatgttaaatgggtacaataagttaattaatgaaaaaaataatggtacaaataatagtacagccatcaatcgtaaccccaagttgaacttgagtctctatgaccacctcccattccctacttcaccaataactgatcaggaatgctcgcacaccataactaaagcgcacgccgcagatgactctaggctcccagactctgcctcaagcgcaacctcacaatttgaaaattattctcgctatatcactgttccattggaaatggaatcaacaagctcgatatttccatcatatgctatggttttaggtaaagatgccttagaaatatttggtgaaacgttatccgattttgaattccttactgctgatggtgattcgatcggtgttccagtatacttgctgaggaaaaggtggggaagatattttgattcccttttatccaatggttacgccaatacgtcattcaactatgaaataaatggagacccttctaatattattagtttttctcctcaccctgtgtcaaaggccgcaaagtttgattactcaaaccaatcgtctaatggatccttggaaaaactcttttcaaaaacagaaaatagcaaatcaaacagtaatataaacattaaaaaaccacatagcgtagattttacatcatcaaggtcctcacctaaacaacgggccctttcgcatagcaaaacgtctcctttagaaccaacattcttaacgaatgatgaggggaatagagcaaacacaccaaagcaggaagaaattgccaatagtgacctgcaaaacaacagcacttccaacagtaggccaatatccaccacttgttcttccacaggtatggtatttagggtcccattccaggatataaagaattcgaagttggggctttctgaacattctagccacactacgcgggcaaactctgcttcacctccccccgtacgtgaaaagtcaacattcgataacactagtaatgacgtgctttccaatacacgcccatcatatcgaggggcctcaactgtaggagcaactagaaataactcaatagatgacgtcttttcatctattcgtcgcgcctcacatcctcttcaatctcatatcatggcgaaatcttcgcccaatagcatatcaaatcccagcccagaggaagagtcttcgtcgcgtagaaaatcgtctgcattaagattcatagctagttcacacaagtcgagacaaccttcttttgcctctaccaatagcactgcttctattgtaagttccacttcaggaagaagacgaaactcaaatcaagtctctcatttgggaagttcatcaagttcatctattttgcctgtgttaaatattcagctacctccacaagaaaagattccgctagaaccgccgccgccggttccgaatttaccttcaagaagaagtagctctttggcagattatgtccaatttagcagagatagcccaatcgcgtcaagaggctcttcccattctactagaaaatcaagttcttcggatataaggcgcatatcaaactcctctttactgaggagtactctagattcacaattactgaataattcatgtggtaacgatattccttatgaagcaagcattgaagaatatggtatgattaatggaagaggtgaagaagatgacaaagacaatggagactataactgttttttaccttccaatataaggcctgtattttctacaataaatgcagtaagtataaacggtgattttaaggaaggtgagcttatttctgcaaagtcgtatataaatagcgaaaagggtagacgactttcttatatttcgaaccctgaaagtgttgaaagtactaattcgaacaacaacgcaatcattgaactagagcctttattaacgcccagatcgttatacatgccctggtctactgcttccgtaagagcatttgcagaatttttttacaccgcacggattaatggtaagtggctattagcaccagtgactttggacttactcattatggccaaaatttatgaaattcctattctatatgaattgattacagaagtactatacaaaatagccagcaaaaaggaggaaagtcttcttgttacttgcgaggcgttacttaatttatttcagtcaaaaatctcgagatattgcaatgaaaatgaaggcaaaataaggaggatgttagattctaatgaatcatatcaagatattctggaaataaaaaaatcgctagtaaacatagacaacggatacattgatccataccttttacgaaacacgtctatggcacattcaacagacgacagtaatgtggataccgaaacgaccgatatgcaccgtacaagagtttctagtttaggatctcttgccagcagggccgttcccactgtttttgccggtggccccagagacagccataattctattggttcaattgcttttcctaacagttcaagtgttcaaaatttccggcgctctgtatctttattcagtccaacagcgaagaagaaatctagcttaagtaaagaaccaggcccgctagatagctatgatgaagctactggtgatatccgcaatgacgagacggtaaagcaacattcaaaccttccaaggacaaatagcatcaaccctttcattcataggacatctttggaacccacaaataaattccctaatgaaaatgatgtcgggagcagttcaggcaaacctttttacgacaaaaaagagcaaatcgagcaaaccacgcttcagagcatatcaaatccagataaaagtaagatttctacatcgcaaaaggggagcagtagcgatgaaaaagatttgcaggggtctaattatgcatcgaaaagcagggatacgcagggggtcggaagttcatccaatttgaagacaaacacatttgttcgtgatgaatttgatagtgactcgggctcctcctctcactccgattcagatgatcttgattcacagctaggtattttgccttttacaaaaatgaataaaaaactacaagaacagacatcccaagaatttgatgattcgattgatcctctctataaaatcagttccagcacaccaggctcttcgagattacatggatcattttccaaatatattaagcccctttcgcaaagagaggatgctccagaatatattaatatttcaagtttggaaaacatggtggcaccaaatgcattgccacctgttgattatgtcatgaaatcaatttatagagtttcagtgttagtcaatgacaaaaacttgatgatacgtactaaagaagcaattggattgtcaaaaattttgaaaagattgaaaaaaaaagtactgcaagatatttcacagatggacgatgaactgagagaggctggtaaaccagtggatattttcccacgaggatcctcgtctcctaccttgagcagacagcattctgatattacagtactttcaagacaacagggaaatgcaagaccaagcttgaaattggcgacaagttccccgatttcagaagcattcaagaagacctcgagcaagtttatccagccgggttcggctcaaatttctcctagaacgtctgtgagtgattatactgcatctcaacaaaggagacaacatatgaataagcgatttagtacccagacgacacactctacatccgctttattcatgaaccctgcaatcatgccccctgcagtaaatgctgggcatagggagagtgaaggagagaatggggaagggtttgcttccactaccaaaaataacaataaggaagacgcagcttcaattgataaagataatagcggagccttgtttcccttttttggcaaacgaaagtaa

SEQ ID NO: 787 - DNA, 1356 bp, Saccharomyces pastorianus
atggatcaagagactattgatacagactacgacgtgattgtcctaggtaccggtattaccgagtgtatcctatcaggtttactctctgtagatggaaaaaaagtattgcatatcgacaagcaagaccattatggtggtgaagctgcttctgtgaccttatctcaactgtatgaaaaatttaaacagaatcctatcagtaaagaggaacgggaaacaaagtttggtaaagatagagattggaatgtcgacttgattcctaaattcctaatggccaatggggaacttacaaacattttaatacatactgatgtgactagatacgttgacttcaagcaagtgtccggttcctacgtgttcaagcaaggtaaaatctacaaagttccagctaatgaattagaagccatttcatcaccattgatgggtattttcgaaaagcgtagaatgaagaaatttttggaatggattagctcttataacgaggacgaaatgtcttctcatcaaggtttggatttggataagaataccatggatgaagtgtactacaaattcggcctaggtaactctaccaaagaattcatcggccacgcaatggctttgtggaccaatgacgactatttgcaacaaccagctagaccatcattcgagagaattctattatattgccaaagtgttgcccgttacggtaaatcaccatatttgtatcctatgtacggattgggcgaactcccacaagggtttgctcgtttatcggctatttacggtggtacttatatgctggatacaccaattgatgaagtgttgtacaaagaaaatacaggtaagttcgaaggtgtcaaaactaaactcggaactttcaaagctccattagtaatcgctgatccaacttacttccctgaaaaatgtaaatctactggccaaagagtcatcagagccatttgtattttaaatcacccagttccaaacactagtaacgcggattctttacaaatcatcattccacaaagtcaactgggcagaaagagtgatatatacattgccattgtttcagatgcgcacaacgtttgctctaagggtcattatctagccattatttccacaatcatcgaaactgataaaccacatatagaattagaacctgcctttaagcttctaggacccattgaggaaaagttcatgggtattgctgaattgtttgaaccaaaggaagacgggtccaaggataacatttacttgtccagatcttacgatgcatcttcccactttgaatccatgactgatgatgtcaaagatatctactttagagtaacaggccatccattagttttgaaacaaagacaagaacaggaaaaacaataa

SEQ ID NO: 788 - DNA, 444 bp, Saccharomyces pastorianus
atgtctaaggcgtcaaacaagacagatgatgatattgtcaggttgtcgcaggctatggatgtcttagccaagttaattatttcgaagcaaaaggatggatctcagttacaggtggagtataagcacaagttaaaagaattggaaaaggtcattaatctactgttaagtctgaatgacagcgccggcaccagcgtgatggacgccaatggtcttgacacagtgctgcggaacggcatcgaagttctggaaagagacgatcggagatacgctctgatacccataaaacccaaatatgaaggcgattcaacggatacaccacaggatgcagccagcaagaagagtgataagaagaaaaagaataagataaagtgttctttctgtcaccagcccggacacacaagagcacgttgcgaaacgagattggcacaaccgccaaaggaataa

SEQ ID NO: 789 - DNA, 681 bp, Saccharomyces pastorianus
atggcgacgattgaagatataaaggaagcggcgttaatccctttccaaaagcacaggcaactttccatacatgaagcagaggtaataactctagagatcatcggtctactgtgtgattcagagtgtaaggatgaggaaacattgaagtatttgagtcgatttctcactcccgatatgtatcaagacctcgtggacgagaggaatctaaacaaaaggtgtggatatcccctttgtgggacagcaccagaacggatacgtgatcccttttcaatgaatgacactaccaagaagtttttattggaaaataacccatatgcatatttatcacactattgtagcaaatttcactttagatgctcccagttttaccaagtacagctatcagatgaagcattatttgcccgtacggggattcatttgtttgaagaccccgaacaggacaagcatgatgtagatttcaaaataaccttgttcgaggagttattaagggaaaaggcatctgaagatgacatcaaatcgttgatatcaggtctaaaaaaattagggttgaatcctgatgatgataatacagataaaagcgatgcagaattagaagacgatctatcaaaatggttagcccaaattaagattgttgaaaatgataatccaagcgttttaggcgatttcaccagggaggaatga

SEQ ID NO: 790 - DNA, 1671 bp, Saccharomyces pastorianus
atgcaaaacaaggatacgggagtagcgaaggacacagttaaaaagcgtttacatagaaggaatagtgcaccgtcagctatacacataatatctcaactggacagaaaatggtccttcctatggaacactattgatagacgcaagagtgttgaagggaaagaagataggagtgaagcggaacgtgaggatgaacaggaagatgattatgaattagagcaattgctaaacatggtaaggatacccatgtttttggagaaattcatgctctttgcacttttgacaagtttggactgtttcttgtattactttacagtgttaccgataagattgattaaggggtacgtaaagcagtttaagaagtatcgtcaacattaccgcttgcaacaaagatctggacacataccaaacgtaccatttagatacgagataacctcaagggaatataaagaaaggtgtatgattttcatcataacaatttcgtctattttgttgagcaaattggatacctcaaaactgtaccacaggataaagcgacagagtacgatgaaactgtatatgcttttcagtgtgctggaaatggcagacaaaatgttggcaagcttaggtcaaagcctgctaaccgttatgctttccaaaaaaagttctacacgcatactgccgcataaatgcttattgttgtcaatatgcttggcatatgttacagtacatggttatgtactggtttaccaagcgatctcaataaacatagccgtaaattcatattccaatgctttgttaactttgttactatctatgcaattcgcagagattaaatcatctgtattgaaaaaatttgataaagaagggtttttccaaattactattgcagacgtggtggagagatttaaactaacactgttattgtcaataattggtgtgagaaaccttcgatcatggacatcttcactatcaagtacaagtaccaatttatggagtctagggtcaccagtaacagtagtcatcaacatcctctgcgggccaatggttagcgtcgttggaagtgaagtaatagtggattgggccaagcacgcctacatcacgaagttcaatcggatccgtccacagatatacgataagttctattacatcatatacaaagactactccacaagaacgcacaagctagaagatagattaggattgtctttacctgcgtttgttgtactattcattgtcatggtcaggccgacgcttttcaaatcaccggagtcctcttaccttccattattattcagggttttcttcataggtgcatcggtgttttcgttagccttactgaccaaatttgtgctggatcttatcctaatcaaatggggcaaacgcatcgagcaacagtccaaatatcaaaatctcaacacagcggtcacagaaaatgaatacgtcccggggctactctcgggtggcatgggcaagatcgacatcgctacacgaattacattgcattcagaacacaacaaagaaaatcaactagggaccccgccaacgtctccaatacggaaaaaggaaaatattttgcctggcctacgtactcctcccagtatcaatgacattagaagacaaaaggactccaaaagcccacggtcactcgagaatgtcgctcgttataagatggtttctaaaagaatatggtag

SEQ ID NO: 791 - DNA, 1461 bp, Saccharomyces pastorianus
atgctttttagaaacatagaagtaggtagacaagcagccaggttattaacgagaacctcgagtcgtttggcctggcaaagtgtcacgacctcgagagccctttcttctattaaacaacaggtgaggaaggttccatcatttagttttaagacatctacgagcacccgtcctttttccttttcttcccctgttttgagaccacacgttgcttcagagtcaaaccctatggaatcgcgtttgaaaacttcaaagaatgtcgcttactggttaatcggaacttctggactggtttttggtatagttgttcttggtgggttgactaggctgacggaatcagggttgagtattacagaatggaagcctattacaggtacgctgcctcctatgaaccagaaggaatgggaagaagagtttatcaagtatagggagtcgccagaattcaagttattgaactcccatatcgatttggacgaattcaagtttatcttttttatggaatggattcacaggttatggggccgtgccattggtgcagttttcatcttaccagccgtttattttgccgtgtccaagaaaacctcaggccatgtcaataaaaggttgtttggattagcaggtttattggggttgcagggattcgttggctggtggatggtgaaatccggtcttgatcaagaacaactagatgcgagaaaatcaaagcccactgtttctcagtacagattgactacacatctaggtaccgctttcttcctgtacatgggtatgctttggactggtttagagattttgagagaatgtaaatgggtcaaaaatcctgtccaagccttaagccttttcaaaaaattggatagcccggcaattggcccaatgagaaagatatctttgggtttattggcggtgtcttttctgaccgccatgagcggtgggatggttgccggtttggatgccggttggatctataacacttggcccaaaatgggcgaacagtggttccccagttctcgtgaattaatggacgagaatttctctcggagagaagacaagaaagatttatggtggagaaatttgctagaaaatccagttacagttcagttggtacatagaacctgtgcctacgttgcattcacatctgtgttagctgcccatatgtatgccatcaagaagaaggctgttattcccaaaaacgcagtgacttccttacatgtcatgatgggcgtcgttacattacaggccacccttggtattttaactatattgtatctagtcccagtttcattagcctctatccatcaagctggtgctttggcattgcttacaagttctttggttttcgcctctcaactaagaaaaccaagagctccactgagaaacatgatcattactttgccacattcaagcaaagtcacaagtggcaaaattttaagcgaagcttccaagctagcctcaagaccattatag

SEQ ID NO: 792 - DNA, 1275 bp, Saccharomyces pastorianus
atggatttgacaatttcaaacgagattactggtgaaatatacgggccaatagaagtaagtgaggacatggctttgactgatttaatagcgttactccaggccgattgcgggtttgacaaggcaaagcacgacctatactataatatggatatcttagactcaagcaaaactcaatctttgaaagaattagggctcaaaactgatgacttactattgattagaggcaagatttctgattctattcaaacagatgctaccaatatgtccgacgaggtattcgttgaacaattcagacaggagttgctgagtaatcaaatgctcagatcacatcttgtatctcaaatccccggattgaatgatttagtaaatgaccaacagctctttaaggaacgattgggcccgctcatcttgcagagacgttatggtggtcaaagcaccgcaatgaacccgtttggcattccgcaagatgaatataataggctaatgtctaatcctgacgaccctgacaataaaaagagaatagcagagcttgtcgaccaacaagcgatcgatgaacagttgcgcaatgccatcgaatatacaccagaagtattcactcaagtccccatgctttatattagtatcgaaattaataactatcctgtcaaagcatttgtagacactggtgcccaaacaaccatcatgtccaccagattagcggagaagaccggcctaacgaaaatgattgacaagaggtttattggggaagctcgtggtgtaggaacaggtaaaatcattggtaagatccaccaagctcaagtcaagatagaaacgcagtatattccatgtagttttactgtcctagatacagacattgatgttctaattggattagacatgttaaaaagacatttggcttgcgtagacttgaaagataatgttctcaagatagctgatgtggagacaaagtttctaagtgaagcagaaataccaaaaagttttcaggaggaattaccaggaccaacgtcggtcgcatcttcgtctaacaagcctgcttcacctaccaagacaagctctagtttgcagccgcaacccggtgctgtaccggcgcttgctccaaagacaggcgtaagaccaacggctacaggaagaaccacagctggtgttacgagaatgttccccgaaaacacaatcaaacagcttatggacttgggattttctagggacgctgttgtcaaggccttaaaacagactaatgggaatgcagaatttgcagcatcgctccttttccaatga

SEQ ID NO: 793 - DNA, 2376 bp, Saccharomyces pastorianus
atgggctcagagcaaccgtacagcgaggccggagaatccaccaaagatcggttcagcaggctgacgcatctcgtgcaggagttcctgcaagatgacgacgtgccacaagagttcgtgcccttgctccaagagtgcgcagagatatgggccagctatacagacgcatgccacgacatagctatgcaggctcccagagaggacgctggccatttgtcgaaggcgtacctccggttgaatgaaacggcgttcatttactacatgattgtgcacacgatcttgaacgatagtgttcctaagctaggcgggttctcgaacgccgacgacaagaatgcttggcatttgtatactgagaggcttcgcgctttacagaacgaccctaatattgggaaaatacgtagcgttattggaaactaccctaaactggcgcccttgcaatctatagaccccagcaagttgagctcgttgttgcatttccatgacgacgcattcttgctcgtcgatgtgcggcccagacccgaattcgtcaaggcccaaatcaaatgcaaacatattatatgcatcgaacctgtttcgttcaaggactcttatacagaccagctggtggaaagggtctccttgaccacgtcaccacagctggaaattgaactcttctccaaaagaaacacgttcaaatacatcgtactctacactgatacgcaatcgcaaggagacttccagcaaaggcaaacacgcattcttgccaacattctgtcccaacattctgtagcgaaggtgctcattttggaaaaagggttttccaactgggtcaaactaggtggcgcctaccaaacgttttctgctggacaaactcaactcgcatcgccgtctccgttgccatcctctgccattccaggcacatctgcaggttcatttagccagacttctcgctctccgcccagggggaaaagtcccactttagtgtcaatgaaggcgcaatctcaacctttacaagcaaccgtccagactcctcaagtgcccttatactacccagaaatggccaccttatcacattttaataaagactcttccgttttgcacaccctcagccctcatcctttaattgccgtccccaaggaaaagccatcaacgtttgtccatgataaggttaccagcatagaaacgctgtctccaggtccccagctacatcaggccaatgtgattccgccgcgtattccgcctttaccgcaacagaatttgtcgctctccaggccgcctgttcagaacagcccacagatttttgacttggattttattgtggggttagaaaatatgggcaattgctgctacatgaattgcatacttcaatgtatggtaggtacgcacgacttgactcgaatgtttttggacaacacttaccttaattttatcaacttcgataatatgagaggttccaagggattgttagctaaaaactttgccaatttggttcatactatgcacaggcatggtgcgttcaagtctccgaatgcgagaatagccccggtccagaccatccaattcaagaagacttgtggccatatcaactttatttacagcgattcgatgcagcaggattgtcaagaattctgtcagtttttacttgacggattacatgaagatttaaatcaaaatggtggcaaaaaacatctgaaacaactgtctgaagaagaggaacggatgagagaaaacatgtctatacagaaagctagcgctcttgaatgggaaagatttttgctaactgatttcagcgcagtaatagatctgtttcaaggacagtacgcgtctagattacaatgccaggcctgtgaacatacttctacgacataccaaactttttctgttctttccgtccctgtcccacgcattatgacctgtaacgtgttggattgttttagagaattcactaaatgtgaaaaattaggcatcggtgaacaatggtcgtgttctaaatgtctaaaaaagcaaccttccactaagcaacttaagattaccaggttgcccaaaaaactaatcattaatctgaagagatttgataaccaaatgaataaaaacaacgtgtttgtacagtatccttgtttcttggatcttacaccatactgggccagagctttcaatcatgaagccataattgatgaggacattcccaccagaggccaaattccgccattcagatataggttatacggggttgcgtgccattcaggaagcttatatggtggccattacacatcatatgtctttaagggtcctcagaaaggttggtactttttcgatgacacaatttatcgacctataaggtttaataatgaatttattacaccaaatgcatatgttttattttacgaaagaatcttttga

SEQ ID NO: 794 - DNA, 1221 bp, Saccharomyces pastorianus
atgcctaacaaagtttttaacgtggctgttttcttcgttgtgttcagagagtgtttggaagccgtgattattatctccgtgctgctgtcgtttttgagccaggcgatcgggcacaaggacccggtgttgtaccgtaagttgaagatccaggtgtggaccggggtggtgctcgggttcatcatctgtctggccatcggtgctggtttcatcggtgcgtactactctttgcaaaaggacattttcgggactgccgaggatctgtgggaaggtattttttgtatgatcgcgacggtaatgatctccatgatggggattccgatgttgagaatgaacaagatgcagagtaagtggagagtgaagatcgcgcggtctttggtcgaggttcctcaccgtaagagagactacttcaagatcgggtttttgagtagaagatacgccatgtttattctgcccttcatcacggtgatgagagaagggttggaagcggttgttttcgttgccggtgccggtatcaccacacagggctcgcacgcctccgcgtacccgctgcctgttgtggtcggtttgatttgtggtggtttggtcgggttcctgttgtactacggtgcctccaaatcttcgctgcagattttcttgatcctgtccacctcgattttgtatctgatttccgccggtcttttctcccgtggtgcttggtactttgaaaactatagattcaaccttgctagtggtggtgacgcctccgaaggtggtgacggtaatgggtcttacaacatcagaaaggccgtgtaccacgtcaactgctgcaacccggaactggacaacgggtgggatatcttcaacgctttgctcggatggcaaaacaccgggtacctgtcctccatgttgtgttacaacatctattggctggtgcttattatcgtgttgagtctgatgatctttgaagaaagacgcggccacttgcccttcgccaagaacttgcagatgaaacacatcaacccaggctactggatcaagaacaagaagaaacaagaattgaccgaggagcaaaagaaacaattgttcgccaaggtggacaacattaacttcaaccaggacggtgaaatcaacgtgcaagacgacgaggaagaagtccctgaacaaaccaccaccagccgttcctcgtccgggaacgtcgtcatggacaaggaggccccacacgtcaaaatcgaatccatttaa

SEQ ID NO: 795 - DNA, 723 bp, Saccharomyces pastorianus
atggccgatgaggaacgtttaaaggagttcaaagaggcaaataaaatagtgtttgatccaaataccagacaagtatgggaaaaccagaatcccgatggtacaaagctagcaactacttttcaaagtgaagaagacataaagagggcggccccagaatctgaaaaggatacatctgccacatctggtattgttccaacattgcaaaatattgtggccactgtgactttgggttgtaggctggacttgaaaacagtggcactacatgcgcgtaatgcggagtataaccctaaacgtttcgctgctgttatcatgcgtatcagagagccaaaaactacagctctgatttttgcatcggggaaaatggtcgttaccggtgccaaaagtgaagatgactctaaattagccagtagaaaatatgccagaatcattcaaaaaattgggtttgctgccaaattcacggactttaaaatacaaaatattgtcggttcgtgtgacgtcaagtttcctatacgtttggaagggttggcattcagtcatggtactttctcctcttatgaacccgaattatttcctggtttaatttatagaatggtgaagccaaagattgtgctgttaattttcgtttccggtaagatcgtccttaccggtgccaagcaaagagaagaaatatatcaagcttttgaagccatataccctgtgctgagcgaatttagaaaaatgtaa

SEQ ID NO: 796 - DNA, 250 bp, Saccharomyces pastorianus
gccgatgaggaacgtttaaaggagttcaaagaggcaaataaaatagtgtttgatccaaataccagacaagtatgggaaaaccagaatcccgatggtacaaagctagcaactacttttcaaagtgaagaagacataaagagggcggccccagaatctgaaaaggatacatctgccacatctggtattgttccaacattgcaaaatattgtggccactgtgactttgggttgtaggctggacttgaaaacag

SEQ ID NO: 797 - DNA, 250 bp, Saccharomyces pastorianus
tggcactacatgcgcgtaatgcggagtataaccctaaacgtttcgctgctgttatcatgcgtatcagagagccaaaaactacagctctgatttttgcatcggggaaaatggtcgttaccggtgccaaaagtgaagatgactctaaattagccagtagaaaatatgccagaatcattcaaaaaattgggtttgctgccaaattcacggactttaaaatacaaaatattgtcggttcgtgtgacgtcaagtt

SEQ ID NO: 798 - DNA, 1266 bp, Saccharomyces pastorianus
atgcagaaatttgatttagagctttcaagaaaggcaaaccctctgctcttcagtccggaacgatacgaagaatatccactaaagtacgatgaactaaaggaatatctcttttcacaaaacccatctcatcctcaccataacaataggccatacacctcagttgattactttgattatctattatatacaagtaaaaatgacaactcagaaatagacctcgatagaaagctggtatctgaatttgcattatattacgttcagaaaaatcgccgcaactctgatgattcagcgcccacgcttaatgatttattgaaattaaaacttggctctaaggaatggtacgaaatgatgctagaaattcttgaatctatcaacaccacagggatgaaccagctaaccagagaaaacaaaaataacagtttccccaattctaaaagggccaactcctccaccaacacggccggtgttgacaacttcaatagcagtaccaatcacgctgctgatgctaccgatgacacggatgaagtgctgcaagaattgacctcctttttgatgtcaaactctattcaaaaaggtatcgatatcaaacccatcccattagacgaccctgtgaattttttgaaaaatggtataaattcaatcttgaacacttgtgtcaacctggaaaagactacaccgttactatccgcttcatctaactcttccgcagatcaagagaaaaatacttctaacaaactagatgagttggagacggcgtttaatgatttgcaactggcacataattttttgaccaagcaatttgaaaacgatcgtgccgaatacgtacaagacattgaaaaactgacacgaactaacagggagttgcaagatagactactgaactatcattcgaatttgaataaaacagaaaaaaaaatatacgacttagaacaaatgaataaagaattagaggaagcaaacagcaagttgagttcaaacaaaagtaattttagtatatcatcaccggtgagctcgccagctacgtgggatccggcttctccctcttctataggaagtccaacaggtggctctggatcacgctcactttcaataatgacaggtgaatttaaaaaagtgttgacgagtacgcaaagaaaatatgaaagggaactggccgaagaacgtgaacatagatacaaactagaaaaggaattagctatgctgaaaagtgaaaaggaaaacacctcattcgcactcagtgatgcgcaacaatcagatatgctataa

SEQ ID NO: 799 - DNA, 432 bp, Saccharomyces pastorianus
atgttgtctaacgcaaagttcctactaccattggccatggcctctaccgctttcgggttggtatccaactctagctcctctgtcattgtggcgccatcgagcgacgctttcatcggcggtaacggcactgctacctcttcttctgttccagttttctacaactctactgctaccacaacacaatatgaagtcgttagcgagtttactacctactgtcctgaaccaaccacattcgtaacaaacaacgctacatacactgttacagccccaacgactctgacagtcaccaactgtccttgtactatcgagaagccaacttctaaaaccacagcttcctctacacatgacgtggaaacaaacgtcaatgctgctaatggaaaggtaattccaaacgccttgggtttggccggggcagttatgatgctattataa

SEQ ID NO: 800 - DNA, 783 bp, Saccharomyces pastorianus
atgctgagtattacgagaagactgatgggcaccgacgtgcgctcgcggctcctgctgagcagtctcaacggagacatgccgggtgcgctgctgctgctgcgccagcagcagcaggccagcatggacgtggagctgctacacacggtgctggcgcgggcgacggcgctagcacacgtcgaaaccatagcgtacgtgtggtaccaccacgtgcagccgcggcggctggcggtggagggccgcctgttgtgcgacatggcgggcgtggccctgcaccaggacaagctgttcctgccggcgcagttcctacagcaccaccagacgatggggctaggccgtggcaccagcgccagcgccagtgctgaggcccaggcggtggagttcgagctccgcagggtcaaagtggaggcctttgcgcgcggaactatgcactccacggctcttagcgagaagtggaaggtgttcttgcaggagatggacacgctgccggggcagccgccactgcggctgcgggacttcccgcagttggccagggcggtgggcgtagccgcccagctacagcagccgcaggagcaggcagccgcgctggcgctgtttgggcggcaaccgctggtcgtgaagaacgaatggtcgctgccgctactgttgagcgcggtcctgtggcatgtgcccggcccagcgcaggcgcgacgcgttctagcggagtttcggcagtgttatcgcgggctgccgctgacggatgccgaggtggtgataaagagaagaggattcgagattgatacttga

SEQ ID NO: 801 - DNA, 1209 bp, Saccharomyces pastorianus
atgttcaaactcacctctcgactcgccacgtctaggctcgctgtctcctccagactgggctttgcccacaccgtagtgtcgccccgagccatcccgccatggatctctttaccggttaaaagattcaactccacaggcccgaacggcaacgacgtgtccgaaatccagacccagttgccctccatcgatgaattgacctcgtcgtccgcgtctctttctgcttccacctcggaccttatcgccaacaccacccaaaccgtgggcgagctgtcctcccacatagggtaccttaacagcatcggcctggcccagacctggtactggccctccgacatcattcagcatgtcttggagagcgtccacgtgtactcgggcctgccctggtggggcactatcgctgccaccaccatcctcataaggtgcctcttgttccccctatacatcaaatcctcggacaccgttgcgagaaactcccacatcaagcccgagctggacgccctgaacaacaagctgatgtccaccacggacctgcaacagggccaactggtcgccatgcaaaggaaaaaactgctctcttcgcacggcatcaagaacaggtggctagccgcccccatgctgcaaatacctattgctctcgggttctttaacgccctgagacacatggccaactacccggtagatggattcaccaaccaaggtgccgcctggttcccagatctgactctcgcagacccttacttgggcctgcaggtcattaccgccgcagtgttcatttcattcacgaggctgggtggcgagaccggtgctcaacagttcagctccccaatgaagcgtcttttcaccatcctgcccatcatttccatcccggccacaatgaacctgtcgtccgccgtcgtgctttacttcgccttcaacggggccttttccgtcctacaaacacttgtcttgagaaacaagtgggtccggtccaagttaaagattacagaagtggccaaaccaagaccccccatccctggcgcttcatcaacggaaaatatgggcattttccagtccatgaaacataatatccaaaaggcaagagatcaggcagaaagaagacaactaatgcaagacaaggaaaaaaaattacaagaagattttaaggagaaaagattgaactcaaaagttaaaatcgttcacaaatcgaatttcatcaataacaaaaaataa

SEQ ID NO: 802 - DNA, 6507 bp, Saccharomyces pastorianus
atgaagggtctcctctggtccaagaacagaaaatcttctacgccaagtgctagctcaggctcaacttccacgcctcaaaaaacctctgctgcgtccacaacgtcgtcttcttcgtcaccgtcgccctcccagactacacgaaactcgtcaagtggtatctcccaatacatgcattcccaccatcatggtcagggacacagccaccatagaggagaagatagcattagggataagaggaaaagttccatatttgcatcctccaaacagcacttatctaccagtgccagtcaggcaaacctgggaatgtatcgctctgagacaaacgaaactacgtcaaaaagcgttggttctacgctaagagacgattctgcatcagcctattctgaagaggttactagcaattcttctagtcacaaatccaatcctccggatgaaacgcctagcaataagaagagctctcactcgaaagactcgttattgacctcgcactcttcatcttcatctttatctcctcctcaatctcgacgcagcactggaaccgcactggaaagttcctcaaatactccaagtaccgacaagaaccacattaacaacaagcagaacataagcggtggtaacgtgaccgagccaaagcaaaagaatgccattcatttaaatcctgaaaattatgatacaacagttttcaagactggttgggtaaacagatctcatggtcaaaccgtcgcaacgaactacaacagctcaataacggcctcctcctcctcatcttcctcctcgtctcagaacctgcgtaatgatgcgtattcaaggactagggaaagcagattctatactggtgatggttcgattttgaaaaacgatgataataacaataatgcaaccaatgatatggctttatcgagaaatagtatggccttagatccgcagatgctggtgcccgactaccgtctttatagagcccagttgaaaggttgtgttctgaatttgtacaagagtggtttaaacaacagtattaaatttttcgatccgacattaccgattccaaataatggtatagcaaacgaaaatcaacagcaaaagaaacaacaggcaaacgtccaagaacaaggacaagcacaaattccaaagcaaccaattgattctgcaagcgagccgatcaaattagatttgaaatatttatctgaagtttatccacatccagatctgaatctagataaagacggaaaaattacatctggcacaatcgaaagtttatgccatgcagtgttattttaccctaattcgaaacattcagatatatccaatgaaaagtcatcgtcaaaaacccatagaactattattaatttgttgttaatgtttccatgtgatagatcttttttaaatttctataaaatatttaaccaatatgggctttcctttaccaagaataaatctaaattgacaaataattccacccaattttataatataactcctggtatggacgactccatgacccaaagattagctttagtcgcaaaaactatcctcgatgtatttccgggatttctgttggatgagcagatgctcaaggctacaatatctttattagacaccatatccttgcataacgatgaaatttctaatactttgaaaatcaaaatcgccaataagcataacgaattaatgaaactaaccgcatttagtcgatcctcatcatcaacaacaacagtagcatcggcacgtgagttagagagtattttagatccaagccattttctctctttagacattagggcattggctgatgaagttcatcaagtcaatttaaaatttgacaaagtttgggcaccgaaatttgactattctctgctttatgattccaagttcgttaaccaaaaaataatttcattaaacccactagtatttaataataaccaaaacgttcatttcctgggaagactactaatatcacatttattcccaacaaatgccacatcaattaaaaaaatgacaccaaaactaaaagctgaattattaaataaatgggttcaaatcggttgcagatttgaacatttaggtgatatggtatcatggctagccgttgccactattatctgctccgtccctgttttaagatcatcttcatggaaatatgtgcccgatcagtcactcaaaactattttcaaagattgggttcctaccatcattcaattagaaaggcgacaaaggtcatcaaggtccacaagcagtgtcttcattcttgctccacctaacttagatgacgattttacaagggctaatgtcatttcttattttggcgacttactaatccacgctgatgatttaccttctgatacgaaattcaaatacttggagaagaaaattaatagaaccaagaatgctttccataagtggcaacaaaggttacaatcaatagactctatgagaaatacgaccagtttatccaatcatatcaaggaaaatgatccatccaccagccttatttatcagctatggaaattccacttagcgcaatctccgttaaacatagagggaataatgaaattgagtgttcaacttgaacctccaatagttgaccaaaaaggatactccacaatcggtgcccaaagaagtgctttagtgactggaagttatttacccatcttgttcaatgaattactgccaaattattcactgtttcctaaaaatacattagtgggcgctgcaggtgatgcaaaattacctccccccagatcttcggcccgcctctcgaaatcactttcaattagcgaaccaattccaattatttccaacagtcacaccttgagctcgtttatggatggcacttccagtgcgacaaatgacaataataaagttactggtattggtaaaattgatggccctgtgattaaagaaatgtcatcaaaacagtcaaataaacagagattattgaaatccgtaagagatgtatttaatattgacatggatgtgtttcacatatcggatgatctggttttcaagtctgtttacgataatgatggtaaatcccgtcctgctagtatggttatagaaacaccgaaaagattttcacagcactcctctatgatcattaacaataccgccacctcaaaccagacagttagggattccatggataccactggaagattgagtaaaaccttagaaaatatggattttttcaataatattggacaagtatctgattcattaaaggaatcgataattcacgtggtcttaaaatcatcatcactagataagatatttgacttattagtattaactgccaatattttttcaaaattagttgatactaaagaccttgaaaactattattatcatcaaaagcaaagaaatagctctaataaaggacttcctgatgacaatgttgggctattggactatgcatttgttaaactaaccatggacaacgatacttttacggaaacgtttttcaatacatacaaaagtttcaccactacaacagcggtattagaaaacatggccaaaagatacattggtgccaaaagttgtagtgtatcaatatccaagattctggatcgtaatgacgatacaaaactgaaaatgacagaggatgctaacatagcatcttcatcgttaggcctttacaatcaaaattttcctgtatgggacatgaaggttctcgacgaaaaaaatgtaaaccctgtttatatggccaaaatccaaattggcgccgctgaagctatactgcacttggtgaaaaaccattactctgactttacagacgatttgtccagcaactccactctattggacatcataaaaattatggaacaggaggtatctacggaatggaccagaagagtagcgaacctaaagttgcagaacactttaccagaagatcttattattgaaacagagaatttattggttacactaacagatttattttacagtattaagtcagtgtaccaaaagcagctttacagacctattggtgtcaatagaactcaaaggagaataaccgatagtttggattcatttaacactttttctttcacagattttaacagcatccttgaagactcttccttcaatgatgacatgattatatcttttcaaaaattaaattccagtaactatgaagacatacttgaatggatatatcagttagacaatttcatttccaagaagttcaatttagtatcaaaaaaagattgggtggttattttccaggagttagaactgctttccaaagaatcgctggtttcatttttcaattatccattacatttcaaatcaagcaaattgataagctcaggatatttacaattagatgaacttgaaatttcaaatattttcagttggatttctacgttaacttttaaggacaataatggagaaagcactcttttatttaaaagattacctcagtctattcaattattggtgaagctacacatgagtttaaccacatttttcctgatggaatcttcaaatgttaataagagcaataatgaaagattgataacttgtaaagtcattttacaaatattgaattatatccggtggaagaacggaactttggatttatttgattcagaggatgacgaaagccctcacgctatatgcccgcatattccatcttttattgaaacagctatagcgcatgccataacttcacccgagtcaagaaactatgaattttcttggatcaaagcttctgaaagtctttctgatactacggccgggaatcaaaatttaagatcaatcaataacattttagaaaaaatagacgatgcacatataaagagcttcattgagattgataatgtattcagtaataagtctaagaatttatgtccttgtccaggttggtttatttcaagattattagaaatatcgcagtttgttcccaacatgagcattacaaattcaaaattaatcaactttgataaaaggagatttgttaacaatataatttcgaatatcttagatttgatccctaacgaaagagaaattttgtttaattctgagatgaatgacgaaaactcctcgaaaagaaataattttggtcgtgttttgttaaatgacttcgaagattcaaataaaacgtacagaaagaagactaaaattgtatcagtatcagaagctaaatcaaagaggtttcaagagagaggactattcaatgaaatcttagtcagtgaagttgaaaaaattaaaagagaagccagaaaattggagattttatttgatcaagaaagggattcgaaaaactctgccatcttacaacaaactgtgcccaagaaaaatagaggatccgttattataccaggaaatcaaagcccaagtgataacaacgacaacggtaataaaattactggtcaaacatcacctcccgtagttagtgttcttgagagtggtaattcagcaaggaataaaaggggttcaatggcttcattttcgacgaatagatcatcagtcgtatccaattccagtcataatggggtgagtaaaaaaattggtggatttttcagaagaccattttcaattggtggattcaacacctcaagttctaattattcattaaacagcatattatcacaagagatttcaagtaataaatctattttacctagtatattaccagaggtcgattcgatgcagttgcaggatatgaaacccagttatagtttgaaaacatttgaaataaaatcgataatggaaataatcaatcacagaaatattccggcttattattatgcatttaaggtcgttatgcaaaatggccacgaatatttaattcaaacgactaattccaatgatctcaatgaatggatgaagatgatcaaggcctccaagaggtattcgttccattccaagagatataagggtaagacacacaacaagatatttggagttccattagaagatgtttgtgagagagagaatacattaattcctacaattgttgtgaaattactggaagaaattgaactacgtgggttggacgaggtagggctatatagaattcccggttccattggtagtatcaatgcattgaagaacgcatttgacgaagaaggtgccaccgataactccttcaccttagaggatgacagatggtttgaagtgaatgccatcgcaggatgtttcaagatgtatttgagagagctaccggactcccttttctcacatgcaatggtaaacgattttactgatttagccataaaatacaaagcgcatgatatgtcctgtgaagaatacaagggaatgatgaatggactactgggaaagctacctaggtgctactatcaaactttgagaagaatagtgttccacttgaataaagtacatcagcatgttgttaataataagatggacgcatctaatttggctattgtgttttccatgagttttatcaatcaagaagatttggcgagtagcatggggcccaggttgggggcagttcaaaccattctccaggatttcatcaagaatccaaatgactactttggacagtaa

SEQ ID NO: 803 - DNA, 1017 bp, Saccharomyces pastorianus
atgaatagcgtgaaaagagttaaactagattccaagatggttaagcagatttgcacacattccggatcctttcacgcagacgagtcgttggcagtgtacctgttgaggctattgcccgagtataaagatgctaagctcgtcagatcaagaaaccctaaggactgggaggctagtgacatcttagtagacgtcggtgcccagtacgacggtgtgaagttcttcgaccaccaccagcgtgggttttttgaaacattcaatgagaactacaagactaagctttcaagtgccggtttgatcttcaagcactacggccgcgacatcatcaagactattttaaacggcaaatccagcagtgctgacatagacttgctgtacgacaaggtgtacaagcagtttgtagaggcactggatgccaacgataacggtatcaacaagtataccattcctaaggactccaggttagaacccaatttcagggacaacgccatcagcatccccggaatcgtttcaggaatgaaccctaactggaacgaggattcctccgatgagtccttcgacagatgctttgctcgtgccagcacgtttatcggcgaggtcttcgtcacactggtgaaaggctacggcgaatcatggttgccagccaaggcccttgtcgcgcaggcgattgaggaaagaatggacgttgacaagagtggcaagatcattgttttgccccagttctgcccatggaaggaacatctttacgagctagaaagagagaagagcatcgaaaaacagatcgagtttgtcctgttcacagactcctctggcgcctggaggatctccaccgtgcctatcaactccacctctttccaatttagaagaggcctgccagaaccactgagaggcctcagagacgaagagttgagctccaagagtggcgtcccaggatgcatcttcatccacgcagcgggcttcattggcggtgccaagaccaaggaggccgtctacgagttagctaagatgtcgctagcctaa

SEQ ID NO: 804 - DNA, 1008 bp, Saccharomyces pastorianus
atgagctttctttccaagctttcacaaattcgaaaatcaacaacaggatccacacccaaagtacaaaatgtattaccgaagaaaaatgacgaggactattctttactacccaaaaattatataagagacgaggaccccgctgtaaatagattaaaggaactaaggcggcaggagttgctaaagaatgcagccctggctaagaagagtggagtaaaacggaaacgcggtacctcatctggaccagaaaagaaaagaaaagagaggaatgatgaagatgaaggtggtctcgggatcagattcaagagatctattgggtctagtcatgccccacttaaaccagcagtgagaaagaaaccagagcctgtcaagaagatgtcattcgaagagctgatgaaacaagcagaatccaacgaaaaacagccttcaaaaacaaagtcaccggaacctgttgctacggagcgcccacgcctcaataaaccaggttttaaaagttcaaaaaaaccactaaagaaagcctctcctggtttagcatcgcgtgggacaccatcaaggggcgatagcatgaaattaccagagcaacacaggcctgttaagctcaatcttcctacgaatggattcgcgcaacctaataggagattgaaagaaaagttggattccagaaagcaaagatccagatatcaagatgattattacgaagaagataatgatatggatgattttatagaagatgacgaagatgaagaggaagcccatcgtagcagatcaaagcataacgatggccccggatatgatcgtgatgaaatttgggcaatgtttaatagaggtaaaaagcgctcagaatatgcttacgatgatcttgaggatgacgatatggaggctaatgaaatggaaattctagaagaagaggaagctgcaagaaaaatggcgagattagaagataaacgtgaagaagcatggttaaagaagcatgaacaagagaagaaacgtcgcaagaaggacattcgctga

SEQ ID NO: 805 - DNA, 699 bp, Saccharomyces pastorianus
atgactaacgacaacagcgggatatgggttcttggctacggatcactgatttacaagcctccgtcccactatacgcataggattcccgcaatcattcatggctttgcacgtcggttctggcagagttccacggatcatcggggcacacctgagagccctggcagggtggccacgctgattccttacgaggaaatcgtgggccgggcggccttcttgaagaacgtcaatcgatacagccagggcacatctattcagggtccggacgatttgattaccattggtgtggtatactacatcccgtctgaacacgcccaagaggtgagagagtatttagatatcagagagcaaaatgggtacactctgcacgaggttgaggtgcatttggagactgaccaaaaacatgaggtggaattgggtgatgccctagaacagttgccccgccatgacaaaacgggcaagcgggtgttgcttacgacggtgtacattggtactgtcgacaacgaggctttcattgggccagagaccatggatgaaaccgcaagagtcatcgctacgtcgcatggacccagcggttcgaattacgagtacctcgcaaaactgcagcaggcgcttgcacaaatgcccatgataaaggagcagggctccattactgaccactatctgactgccctattagaaagtgtagataagcatagataa

SEQ ID NO: 806 - DNA, 4401 bp, Saccharomyces pastorianus
atggctgccaaggagatatcaaccgaagttctgcaaaaccccgaattgtatgggctaaggcggtcgcatagagctgccactcatcaacagacttacttcaatgatagcgatgacgaggacgacgaagaaaatattaaacggtccaggaggaagagaacaaccaccattgaagatgaggaggacgattttgaagacgaggacaaccaagacgatgctgaggacgatgaagtcggagaggattttgaggaagatgacgattattatggctctccagtaaagaaaacccgtgtgaaacccaaacctaaatctaaatcaaaaccgaaatttcagaccgagaaacatcctgcagtaatcataccaacaagattttccaatcgtcaaagcaaaacagtaaactacaacgtcgattacagtgatgacgatcttttagaatcggaagacgattacggctccgaggaggatttatcggaagaacatacatatgaggtatctgctacgccacaacctgaagactttcacggtattgacattgttatcaatcatagactgagaacgtctctagaaaaatcaaatgtcttggaaaagactgttcccgagctaaaggactgcaaggagagctacgaatttttaatcaagtggaccgataaatcccatctccacaacacatgggagacttacgaatctattggccaagtacgtggtctcaaaaggctagacaactattgtaaacaatttatcatcgaagaccaacagataagattagatccctatgtaaccgccgaagatattgaagtcatggacatggaacgtgaacgtagacttgacgaatttgaagaatttcgtttgccagagagaatcatagatagtcaacgtacttcattagacgatggtacctctcaattacaatatttggtcaaatggcgtcgtttaaactacgatgaagccacctgggaaaatgctactgatattgtaaaattggcacctgagcaagtcaaacattttcagaacagagaaaattcgaagatccttccacaatattctagtaactatacttcacaaagaccacgtttcgagaagttaagtgtacagccacctttcataaagggcggagaactgagagatttccaactaaccggtactaattggatggcatttttatggtctaaaggcgataatggtatcttagcagacgaaatggggctaggaaaaaccgttcagaccgtggcatttatcagttggctgatttttgcacgtaggcaaaacggtcctcacattgttgtggttcctttgtctacaatgcctgcttggttagatacatttgagagatggtcacctgatttgaattgtatttgctatatgggtaaccaaaaatcaagagatacccttagggaatacgaattctacaccaatccacaggcaaaggggaagaaaacaatgaaatttaacgttttattaacaacatacgaatatatcttaaaggaccgtgctgaattaggtggcatcaaatggcaatttatggccgttgatgaagctcatagattaaaaaacgcagaatcatctctttatgaatcattgaacagtttcaaggctgcgaaccgtatgttgatcacaggtactcctcttcaaaataatattaaagaactggctgcattaattaatttcttaatgcctggaagatttactattgatcaagaaattgattttgagaatcaagatgccgaacaagaagaatatatccatgatttacataggaggcttcagcctttcattcttcgtcgtttaaagaaagatgtagaaaagtcattgccttcaaagacagaacgtattttgagagtcgaactatccgacgtacagacggagtactataagaatattttaacaaaaaactattctgctcttactgctggtcctaagggtggtcacttttctttattgaatattatgaatgaactgaaaaaggcatcgaaccatccgtatctattcgacaatgctgaagaccgggttttacaaaagtttggagatggtaaaatgacccgtgaaaacattttaagagggctgatcatgtcttcaggtaaaatggttcttttggatcaattattgaccagattgaagaaagatggacatcgtgtgttaattttctctcaaatggtcagaatgcttgacattctaggcgattatttgtctatcaaaggtattacctttcaaaggttagatggtacagtgccatctgctcaaagaagaatatctattgatcactttaactctccggactcaaacgactttgcatttttgctatccactcgtgctggtggtttaggtatcaatttgatgacagccgatactgttattatttttgattccgattggaatcctcaagccgatttgcaagcaatggcaagagctcatcgtattggtcaaaaaaaccacgttatggtgtatagactggtttccaaagatactgtagaggaggaagttctggagagagcacgtaagaagatgattttagaatacgctatcatatcacttggtgtaacagatggtaataagtacactaagaaaagtgaaccaaatactggtgaactgtccgcaattttgaaattcggtgcaggcaatatgttcactgctacagacaatcaaaagaaattagaagatcttaatttggatgatgttttgaaccatgctgaagaccatgttactacgccggatctaggagaatcacatctaggtggtgaagagtttttgaggcagttcgaagtgacagattataaagctgatgttgattgggacgatatcatacctgtagaagagttgaaaaaacttcaagatgaggagcagaaacgtaaggatgaagaatatgtgaaggagcaacttgaaatgatgaatagaagggacactgctttgaaaaagatcaaaaatagcgtcaatggtgacggggctgccgccaactcagattcagacgacgatagtacctccagatcatctagaagaagagccagagctaacgatatggattcaattggcgaactagaggtgcgagccttgtacaaggccattctaaagtttggtgacctaagcgaaattttagacgagctgattgcggacgggacattgcccgtcaaatcgttcgagaagtacggtgcgacctatcatgaaataattgacaaggctagagaatgtattcaagaagaagaaagaaacaggaaacagactttagaaaaacttgaaaaggatgctaccatttatagaacaaagctgaaaaacggtgaaataaaggccgaaaatcaaccgaaggataatccattaacgagattatcactgaagaaaagagaaaaaagagccgtacttttcaactttcttggcgtgaaatcgttgaacgccgaatctctattaacgagagtggacgatttgaaatatttgaagaacttaataaattcaaactacaagaatgacccgttgaaattcaacctcggcaatagtgcacctaaacctgtccaaaattggtcatcggactggacaaaagaagaggacgagaagctattgattggtgttttcaagtatggatatggttcttggacacaaataagagacgacccatttctaggtcttacagataaaatatttttaaatgaggctcaaactcccgcacctaaaaaaacgacaggtccatccgatgcgacaccaacggctgcatctgcaaagaaggggaaaggtataaccggatcttccaaaaaagtacctggcgccatccatttgggcagaagagtggattacctactttccttcttgagagaaggtccaaatgcaaagagtccaagtactgagccaagcatgaagaaactccccactggaccctctaagaaaagacaaagaaagactgccaaccatagcaagtcgatgacgccagaaaccgccaattccgagtcagcgactgccccgccaaacaaacgtatgaaagctctgccaaaaggccctgcggctttgataaacagcgcaagatcctccccaaacagccccactccatcatctaagttcaaggcctccagggacaatggcacaagacaaacaagcaaccccagtagtggtagtgcccacgaaaaggaatacgacagcatggacgaagaagactgccgacatacgatgagcgctatacggacttcattaaagcgcctcagaagaggtggcaaaggactggatcgcaaagagtgggccaagatccttaagaatgaattaaccaccatcggcaagcatattgagtcgcaaaagggctcgtccaggaagacaaagccagacaaattccgcaagcacctctggtcatacagtgctaacttctggccagcagacgtgaaaagcacgaagctaatggcaatgtacgacaagataactgagtctcaaaagaaatag

SEQ ID NO: 807 - DNA, 1734 bp, Saccharomyces pastorianus
atggctgatattactgacaagacagctgaacaattggaaaacttgaatattcaagatgaccaaaagcaagccgccactggttcagaaggccaatctgttgaaaactcgtctgcatcattatatgttggtgacttagaacctgctgtttctgaagcccacttatatgatattttctctccaatcggttcagtctcctctatccgtgtttgtcgtgatgccatcaccaagacttccttgggttacgcttacgtcaacttcaacgaccatgaagccggcagaaaggccattgagcaattgaactataccccaatcaagggtagattatgccgtattatgtggtctcaacgtgacccatctttgagaaagaagggctctggcaacattttcatcaagaacttgcatccagatattgacaacaaggctttgtacgacactttttctgtctttggcgacatcttgtctagtaagattgccactgacgaaaacggaaactccaagggttttgggtttgttcacttcgaagaagaagttgctgccaaggaagctattgacgctttgaatggtatgttgttgaacggtcaagaaatctatgttgctcctcatttgtccagaaaggaacgtgactctcaattggaagagactaaggctcactacaccaacctttatgttaaaaacatcaattctgaaaccacagacgaacaattccaagaaatgtttgtcaaattcggcccaattgtttccgcttctttggaaaaggatgctgatggccaattgaagggtttcgggttcgttaactacgaaaaccacgaagacgctgtcaaggctgttgaagctttgaacgaatctgacttgaacggtgaaaagttatacgttggtcgtgctcaaaagaagaacgaacgcatgcatgtcttgaagaagcaatacgaagcttacagattggaaaaaatggctaaatatcaaggtgttaacttgttcgttaagaacttggacgacaccgttgatgacgaaaaattggaagaagaatttgccccatacggtaccatcacttctgccaaggttatgagatccgaaaacggtaaatctaagggtttcggtttcgtctgtttctccactccagaagaagcaaccaaagccatcactgaaaagaaccaacaaattgttgctggcaaaccattatacgttgccattgctcaaagaaaggatgtaagacgttctcaattggctcaacaaattcaagccagaaaccaaatgagataccaacaagccactgctgccgctgctgccgctgctgccggtatgcctggtcaattcatgcctccaatgttctacggtgtcatgccaccaagaggtgttccattcaacggtccaaacccacaacaaatgaacccaatgggcggtatgccaaagaatggtatgccaccacaattcaggaatggcccagtttacggtgttcctccacaaggtggtttcccaagaaacgccaacgataacaaccaattttatcaacaaaagcaaagacaagctttgggtgaacaattatacaagaaggtttctgctaagacttcaaacgaagaagcagctggtaaaattactggtatgattttggatttgccacctcaagaagtcttcccattgttggaaaacgatgaattgtttgaacagcattataaagaagcttccgctgcttacgaatctttcaagaaggagcaagaacaacaaaccgaacaagcttaa

SEQ ID NO: 808 - DNA, 2550 bp, Saccharomyces pastorianus
atgccgaagaataaccatcaccatcgttccagttcggtaagttccacaaagaaccgctccacggaatctacgaacaaatggaaaattccgcactattaccgtagatccgcaagcggtagtacgcaagcttcgccaaatagaagctcttcaactgaggcatgtagcacacctatactgcctaccatgaacgtaatgtccagcccgaagaaagttttactggaagagcccagggacaacaaagcaaagaagacaagcagaaagaaatcgggagaaatggtctttgtcaattatactgtacaagacacagccaatgaagaggacacagatctgaaaagtgagcctgcgcctgtcccagcaccaaaggcgaagttaaagaagaaatcttctaaaaggagaatgctaaagatatttggatcgtcaaaaaacgagcatatcgaagacatcgtcgaagaacagccgatggtcctccagaccgatttacagccacagtcacagtcacaatcgggaattcccacttcagaacatggttttgatccctcatcattgacttccaaaagatcctacaattcgtttttgaaacacaatagactgcatggtaaaacttcattttctagcggcctgtctttcccatctttaaacatgatgggaaatgctagtgatatcagtattgagaagagtggatttggttgcgtaaatgaagtggttccgaaatcaactcacaatccttccttggcgaagccgccatctaggtttgatgagaatgaaaggaactcacccaacttatcaaatataccccttttgaacacaaaaaatacaagactgaagtataataaagtcgcgtctcagaattcggaccaacaaagattacaagaaagtggcttgtatcattctaacgaatcattcagtttcaaagatcatagcacaagtaccaataagtcttctttgagtttaaattctgactctggaacttcccacttcacaaagcattcacctgattcaccaagaacttcaagatccttcaactgcggagactcacaaagtagagccaagttgccagaggaaaatgacgcttctattgcatttagtaaaatgtttactagaaaacgagctaacactggcgggtccacgtgttcgctagcctcgccaaccatttcacaagccattcaacaatcaaacatgaaagtcaataaactaccgactcaaagaacaacctcagtaagctctttgtcatctatgtcaaaccgttactccccaataagagttgcgtcccccgggcgaccaagatctggaacacgcgggtcttccctttatagattatcgagggatttgaactctttaccaagtgtcactgacttaccggaaatggatagtacaaccccagtcaatgaaatattcttagatagccaactgcagtataaaaacagcggtggaaaacatgggcacaggaaaaaacaagagtctatttctgatgctcaaagaaaccaaaatgcaaattcacacatctcaacaccatcctcttccctcgtgacgcccccttattacatgacggggtttacactaccaagttcggcgtcagcatcttcaacgccaaatgtgctcgaaacaaataatatgaatttagttcaaagtgccaacgttgctacaagctctcggccctttagtaacttctcctcttttgaaaaagaatacaacaacgagaacgacggaactgcggaaacatcggcattcaataccccattggaaaatataccagctttaaagggtatacccagatccactttggaagagaatgaagaagaagatgttctagtgcaagatgttcagaccactactaattttcgaagaagagacgctatagggatggacgctcataggaaagaggacagtttagattttagctctttaatgccacatggcagtacaactaatagcagcatcgtggattccgtaatgacaaactcgatatccactaccacaagcaatgcaaccggcaactatttccaagatcaagagaaatatacactggtgaatacgggactgggtttgagtgatgcaaatctcgaccattttatcagaactcaattcaagcaagcttctaaattagattcgaacagtatggggaaccgtgtttcttataatggttcaattcctaataataatgatccaacaagggccaatttgcaagtatatactgaattcgattttgaaaatccagagtcttttttccatgaacaatcaaaattactgggtgaaatgagccatggtaataataatggcgataatgacatcagtatgaatgagccaaaatcggcagacactttcataggcaatatatccccagacacctccgcaaccgtttcattgggcgacttgatgagttcaaacgtctcaaataatagtgaaagaaatttctacgacggccacacctttgttccacaatttcaacaaaactcgtctatagaagattcaagcaatcaaaatatggcaccagttacgaataacgacatcgacaataatctacagtctttttattttgataataaccactaa

SEQ ID NO: 809 - DNA, 1641 bp, Saccharomyces pastorianus
atgctacgatccactatacccctactgatgaaaagtatcccgcagaaggcaatgactaaccctaccttcgccttacaggcacccaagatcactttgaccaaagtggaacaaaatatctgcaacttgcttaacgactatatggatctgtacaacggagagcaccagaataaacccgagccattgacgcttcgaatcacgggcggatgggtgcgcgacaagctgctgggccaaggttctcacgatctagatatcgccatcaatgtcatgaccggtgaacaatttgcgactggtttgaacgactacttgcagcagcattatgccaagtatggagtcaagccacataatatccacaagattgacaagaaccctgagaaatcgaagcatctggagaccgctaccactaagctgtttggtgttgaagtggattttgtaaatttgagatctgaaaagtacactgaactttctagaatccctaaagtgtgcttcggtacacctgaagaagacgccttgagaagagatgctacattaaacgctcttttctataatattcaaaagggtgaagtggaagacttcacccggaggggtctgcgagacctgaaagaaggtattctgcgtactccgcttcctgccaaacaaacgtttttggatgaccccttgagagtgctaagattaatccgttttgcctctagattcaacttcgccatagatccggaagtcatggctgaaatgggcgacccacagatcaattctgccttcaattccaaaatttctagagaacgtgttggtgtagaaatggagaaaatcctaataggtccaactccactattggctttgcagctgattcaaaaagcacatttagataacgtcatatttttttggcataacgacaaatcagtggtagaattcaacgagaaaaactgccaagatataaataaaatcaagcacgtctacgatgataacatactgaactcacacctgcaaagtttcatagaattatatccaatgttcttggagaagcttcccattttgagaaaaaagattggtcaatcacatagtttccagcagaactttatactaagtgcgattttgtcccccatggccaatttacaaatcattggaaaccctaagaagaaacttaataacttgttatccgtcccagaaagtattgtgaaagaagggttaaagttgagtaaaaatgacgcagtgatcattgcaagaactgtagattcattggggtcgtacgaggaattggtttcgagatttacaaatggctcgctgttgcaaaaatcggaaatcggtatattcttgagaagtttcaatggcgaatgggaaatcgctcatttcacgtccctcttagatgcatttttaaaaattcccagatctgaaaccggaagaactgagtctcttctccacaattacaacgcattttattcttatatatacgacaatagtttggaagattgccacgaactaaaacccatagtggacggcaagcaaatggcaaaagtactggaaatgaaacctggcccgtggttaggtaagattaataatgaggcaatcaggtggcagtttgataaccctgaaggaaccgatactgagttaataacccatttgaaagccatactaccaaaatatctataa

SEQ ID NO: 810 - DNA, 2334 bp, Saccharomyces pastorianus
atgaagttctatatagatgatttaccagtgctctttccttacccaaagatatatcctgagcaatataactatatgtgcgatatcaaaaggactttagatgtaggtggaaacagtatcttggaaatgccttcaggaacaggtaaaactgtctcattattatcgctcacaattgcctatcaaatgcactatccagagcatagaaaaatcatatattgttcacgtaccatgtccgaaatcgagaaagctttggtagaactggaaaaccttatggattatagaaccaaggaaatgggctaccaggaagattttcgaggtcttggcttaacatcaagaaagaatctgtgtttgcatcctgaagtcagtaaggaacgaaaaggtacagtagtcgacgaaaaatgtcgtagaatgacgaatggccaggcgaggagaaaagcagaggaagatccggacgccaatgtagaattgtgcgaataccatgagaatttatacaatatcgaagtggaagattatcttccaaaaggtgtattttcctttgaaaaacttttaaaatactgtgaagaaaaaaccctttgtccatatttcattgtccgtcgtatgatttctctttgtaacattattatttattcttaccattatctattagaccctaaaatcgccgaaagagtctccaatgaagtttccaaagacagtatagtcatttttgatgaagcgcacaatattgataatgtgtgtatcgaatctttgtccttagatttaacaacagatgcgttgagaagagctacgagaggtgccaatgcgttagacgaacgtattaccgaagttagaaaagttgattcacaaaaattacaagatgaatacgaaaagttagttcagggtttacactctgctgatatccttaccaaccaagaggaactatttgtggaaacgccagttttacctcaagatcttttaacagaagcaatcccgggaaatatacggagagctgaacatttcgtttcgtttttgaagagacttatagagtatctgaaaaccagaatgaaggtactccatgtcatttctgaaacacctaaatcatttctacaacatttaaaacagctgacatttatagaaaggaaacctcttcgattctgttccgaaagactgtcgttacttgtaagaactttggaagtcgcagaggtggaagattttaatgcattgaaggacatagcaacatttgccactcttatctcaacgtacgaagaagggttcttgctaattattgaaccatacgaaattgaaaacgccgccgttccaaatccaattatgagattcacctgtttggatgcatcgattgccatcaaaccagttttcgaaaaattttcttctgttattattacttcagggactatatcgccattggacatgtacccaaggatgttaaacttcaagactgttcttcaaaagtcttacgctatgacgttggctaaaaagtcgtttttaccgatgatcattaccaagggatctgatcaagttgcaatttcttcaagatttgaaattagaaatgatcctagtatcgtccgtaattatggttccatgctagtagaatttgccaaaattacacctgatgggatggttgtgtttttcccctcgtacctgtatatggaaagtattgtttcgatgtggcagacaatgggtattcttgacgaagtttggaagcacaaattaatcttagttgaaacaccagatgctcaagaaacatctttagctttggagacatacagaaaagcctgctcaaacggacggggggcaatattgctttctgttgctagaggcaaggtttcagaaggtattgattttgatcatcaatacggaagaaccgtactaatgataggtattccctttcaatacacagaatcacgtattttgaaagctcgtttggaattcatgagggagaactatcgtattagagagaacgatttcttatcttttgatgccatgagacatgctgcacaatgtttgggaagagtcttgagaggtaaggacgattacggtgttatggtattagcagaccgtagattttccaggaaaagaagtcaattaccaaagtggattgcccagggtttatcagacgctgacttaaatctttctactgatatggctatatctaacaccaaacaatttttaaggacaatggcccaacccacggaccctaaagaccaagaaggtgtatctgtatggagctatgatgatttaataaagcatcaaaatagtaaaaacaacaagggggggtttattgaaagcaaaagtaaaggggaacaagaacaagatgaagacgaggatatagatatgcagtaa

SEQ ID NO: 811 - DNA, 6480 bp, Saccharomyces pastorianus
atggtcgatcatgaatcaaaggataaagcaaagaaaatcaaagagatctatcgttacgatgagatgtcaaataaggtgttaaagctagataggcggttttttaataccaaccagaacccccaaaaagatgcagaaatttcacagccaaagtccatgagtggcaggattaccgctaaagatatgggtaaggacgtccgcagcgatactcctggaaagaaaagagatcttgatagtatagtaggtatgagagagaaaaggccctcatcaagaaaaattcagcaggatagtactattttggacgcctcttccaactttaggttgcattactacccaaagaattcctccagcattgaattatacgagcaaattttgcaatgggtcacagaagttttaggcaatgatataccgcatgatcttattgttggaactgcagacgtactcatcaaaatgctgaaggaagatgaagaaaatgaagacggaaattttgataaacgaaagaaaaacattcaggacgaactgggtattgacatcgaaacttcaaaactcatggagttggtcaaacttacgaaagacattaccgattatgaaactgactcaaacgaaaccgttgaacgagcggtggcaattcttgctgataacgaagatatggatgcagaagaagaagaaaataattccgacaacacgaatgttctcgagagacaaattgatgatgatgaagaggattttgaagaggataacgttgatcctaactccaagattcggactaacaaagcattaccaaatgttgaaaatgacacaatcaaactttctgattataagataagtggcattgaggctattccggtatactcagtcgatgagttttttttacaaagaaagcttcgatccgagcttggttataaggatacttcaatgatccaagaactttcagaaaagattttaaatgagatcaaaaccctcgaagacaatccaaaagctctagagcagaagctggttgatttgttagattttgaaaatatatcgctggctgaatttattttcaaaaatagattagcaatcttttggggtatacgcctagcaaaaagcacagagaacgacgtaccaaatttgatagatgaaatggtcgccaatggtttaaactatctcgtggaacagtacgaggctagaggaacagtaaactcgaaacgtcagcttggttctgatgatgaaaagtttaagtattcagctgcaaaaaggacaaaatttcacagtacctccattttaccgcctattgtagatttggaaaaggtcaaatttgacgaaagctctaaattaatgactataacgaaagtttctctgccagaaggatcattcaaaagagtcaaaccgcattatgatgaaatacatattccggctccaaagaaacctgttattgattacgagttaacagaaatttcctctctgccagattggtgccaggcggcatttccttcgtcggaaacaacatctctaaatcctatacagtcaaaggtttttcctgcagcatttaacggtgattcaaacatgttaatatgtgcacccactggttcaggtaaaactaatattgccatattaaccgtattaaaaactttatcccgcttttataacacagaaacgaaaaaactgaacctttcagcgtttaaaatcgtttatatagcgccgttgaaggccttagtgcaagaacaagtcagagagtttcaaaggagactagctttccttggtataaaagttgctgaattgactggtgactccaggctcagtaagaaacaaatagaagagacgcaaatcttggtttctacaccagaaaaatgggatataactactagaaaatcgaataattcggctcttgttgaactagttcgtttactgatcatagacgaaattcatttactgcatgacgggagaggccctgtattagaaagtattgtcgccagaacattttgggcttccagatacagccaggagcgtccgaggattatagggctgtccgcgacattgccaaattatcaggatgtcggcaggtttttaagagttcctgaggagggactgttttatttcgactcttcatttaggccatgccctctatcacaacaattttgtggtatcaaagagcaaaactctctcaaaaaattaaaagctatgaacgatgcttgttatgaaaaagtattggaatcaattaatgaaggaaatcagataatcgtgtttgttcattctaggaaagaaacctcacgtactgcaacatggttaaataataagttcattgaagaaaaccttgctcacaaactaatcaaaggtgatgcaggatcgaaacaaatccttaagacagaggcttctaacgtacttgaccctaatttaagaaagctgatcgaaagtggtatagggacacatcatgctggactagccagaaatgacagatcattatctgaagacctgtttgctgacggattactgcaaatattagtgtgtacggcaacgctggcatggggtgttaatctccctgctcatacagttattataaaaggaacagatgtctattcgcctgaaagggggtcctgggaacaactctccccacaggatgttctccaaatgttaggtagagctgggcggcctagatatgacacgtttggggaaggtatcataataacaaaccaatcaaacgtccagtattatctatcggttctcaatcaacagttgcccatagagtcacaatttgtcgcgaaattagttgacaatttgaatgctgaaattgttgctggtaatatcaaatgtagaagcgatggtgtaaattggctggcatacacttatttatatgttagaatgtcagcttccccggacctttataaaatacctgatatctccgaagataaggacttgaaaaagtacagagaaagtttaattcattcggctctttgtgttttgaaagagcaagatttagtcttatatgacgcggaaaatgacataattgaagcgacagatcttggaagtatagcatcggcattttacattaatcatacctccatgaatatctacaatacagagctagatgagtacacaacgcagatagatctctttagaatatttgcaatgtcagaagaatttaaatatatatcagtaaggtatgaagagaaaaaagaactgaaacaactactagaaagggctcctattcccattagagaagacatcaacaatcatttagcaaaagtgaatgtgctattgcaatcttacttctcacaattaaagttcgagggttttgcactaaattcagatatggtgtttatccaccaaaatgcaggaagattattgcgtgctatgtttgaaatatgtctaaagaggggctggggacgtccaacacggatactacttaatctttgcaggtctgctacgacaagaatgtgggcgacaaattcgcctttgagacagtataagagatgtcctgctgaagtagttaaaaggttagaggcttccacagcaccctggggagattatctagaattggagtcgcctgcagaggttggtcgtgcaattagatctgaaaaacatgggaaacaggtttatgatttaatgaaaaggtttcctaaaatatctatgaaatgtaacgctcagccaattacccctagtattatcagattcaatgtcgaagtactggcaagttggatgtgggatatgaatatacatggtgctcttcaacccttcttgcttttgctagaagacacagacggtgattcgattctttttcatgacatattgttaatcactccagaaatgatagggcaagaagtttcgttatcctttacctatgaattaaaccagcaagatcaaaataacttatcaccaaatttttttcttacagtaatatccgaaaattggtggcacagtgaattcgagattccagtttcctttactaatttcaaacttccaaagaagtttccagctcctaccccactcttagaaaatatcgaaatttcgacgtcagaggttggtaacaatgatttctccaaagtgtttgaatttcaaactttcaatagaattcaaagtcatactttcgaaactatttacaactcaaatgactcagtctttgtaggctcagcaaaaggcacaggtaaaactgctttggctgaattagcattattaaattattggagacagaataaaggaagagctgtttatatcaatccgtcacaagaaaaaattgatgttgtgctttcgagttggaataaaaaattatcccatcttgctggtggaaaggttattaacaagctggggaatgacccttccttgaatttgaagctattagcgggaagccatgttctcttggccactcctgcacaattcgaacttttgtcgcgtcgatggaggcaaagaaaaaatattcaaagcttggagttaatgatatatgatgacagtcatgaaattagtcaaggtgtttgtggtgcagtatatgaaactttgatatccagaatgatctttatagctacccaacttgaaaagaaaattcgattcatttgcttatcgagctgcctagcaaatgctcgtgattttagtgagtgggttggtatcacaaagtcaaatatattcaatttctctccaagcgaaagagttgatcctcttgaaataaatatacaatcattcaaagacgttgagcacctgtcattcaactcaccaatgcttcatattgcatttgaaacggcgttagctactgcagcaaatgggaattgcagttcaattatcttgccctccagaaaggattgtattgaagttgcgtctacatttatcaaattttctaaagcagtagagtgggatatgctaaatgttgaagaaaagcaggtcacaacgttcgctgaaaagctgaccgacagtcaactaaagaccccattaaaacatggcataggtatactatatgatgggattgtgtcaaatgatgagagaattataagaaggttgcacaaatataacgcactttcaattttattcattacgaaggattgtgctgctctagctcctaggtctgatgaagtaatcgtactaggaacgaacttttacgacggtagagagcataaatatatgccatacaccgtaaacgaactatcagaaatagtaggattaacaaagagcagtggtgcagcggtgggtaaagctttgattttgacgagtcataacatgaaagcttactacaaaaagttcataactgaacctttgcctacggaaagttttctacaatatactatccatgataccttcaacaatgagattgcaaactccattatacagagtaaacaggattgtgttgattggtttacttactcatatttttatcgtcgaatccatggaaatccgagttattacggtgtgaaggacgcgtcttcatatggcatatcggtatatttaacagacttagtcgagaccagtctgaacgacttagttgagtcttcatttattgaaaccgaagaccttgaaataaatgcagaagcggatggggaagatgaagaatcttctgaagcaatttcttccttgaacaatgggctgatcggttctcattatggtgtctcctttttcactatccaattatttgtttcttctttatcaaatagttcaacactcaaagacatactgcatgttttgtccacagcaacagaatttgaaaacatctcactaagaaaaggcgataaagctttactttctaaactgagtaaaaagcttccaataaagtttgctggcagtgtctctactgagtctgtgaattttaaagttttcttattgttacaggcacatttctcgcgtattgaattacccatcgatttccaaaatgatttgaaagagatcctggagaaggttattcccctaattaatgtaatcgttgatattctctcagcaaacgggtatctaaatgctactacagcaatggatttgatgcaaatgctcattcaaggtgtctgggatgttgataatccattgagacagattccatatttcaacaatgaaatgttagaaaaatgcagagctatgaacgttgaaactgtttatgatataatggctcttgaggacgaagagagggacaagatactaactctcggtgattcacaacttgctcaggttgccacatttgttaataactatcccaatgttgaacttacctattctttggaaaatttgagttccttaatctcaggtgcaaaacaaaaaatttcaatacagttaacaagagactttgaacctgacaacctacaagtaacatctgaaaaatatccattcgataaattagagagttggtggttagttttaggtgaagcttctaagaaggaactttacgctatcaaaaaagttagtttaaataaagaaattcagaattatgaattagagtttgatattccaccaactggtaagcacaacctaactatttggtgtgtttgtgattcataccttgatgcagataaagaaatatcatttgagatcaatgtgagataa

SEQ ID NO: 812 - DNA, 735 bp, Saccharomyces pastorianus
atgaccgtaatagaaataacaaaccaggaccaattcactcaattaaccactataaatactgtcaataagctcattgttctatattttcaaactcaatgggccgagccatgtagaagcatgagcgaggtgctcgaagccatcagtgaagaagttagccaagagaatgtgcggtttttgtcaatagatgcagacaagcatactgaaatatcagaccttttcgaaatagcagctgtaccatattttatcttcattcaaaacggcactatcgtgaaagaaatatcaggggcggatccaaaggagtttgtgaaaagtttagagactctctccaatggttccgcctcaatatccaacaatgttagtggacccagatccacttcagatgtagaaaacagtgggtcttctgatgacgaagacgaagagacggaagaagaaataaacgcgaggttagcgaagctagtacaggcggcgcctgtaatgctcttcatgaagggaagcccatcggaacctaaatgcgggttttctagacaattggtgggtatcctaagagaacatcaaataagatttggatttttcgatatactgagagatgacaacgttagacagagcttgaagaagttttccgattggcccacattccctcagttgtatattaacggggaatttcaaggtggtttggatatcatcaaggaatccatagaagaagatcctgaatttttccaacatgcccttcagtag

SEQ ID NO: 813 - DNA, 900 bp, Saccharomyces pastorianus
atgtctaccttttctgcctctgatttcaattcaaaaagatactcctcttcaagaccttcctacccttctgaattctacaagatagtagatgaataccacgaaggtgatagaaaactactcgttgatgtcggatgtggtccaggcactgctactctgcaaatggtcgaggaattaaaaccgttcaaccgaatcattggaagtgatctttctgccacaatgattaaaactgccaatgctataagggaagataatcccaacatatacaagaacgtttcatttgaaatctctcccagtgatagttttgaatttttgggcactgattcagctgacaagcaaaagattgacattattaccgcggtggaatgtgcccattggtttgatttcgacaaatttcaaagatctgtccatgccaatttgagagaagacgggacaattgctatttgggggtacgcagaccccatctttccggactatcctgaatttgacgatttgatggatgatgttccatatggcaaggaaaccctaggcccttactgggaacaaccaggtagatcacgcctccacaacatgctgaaagacttcaccctggatccgaagcttttccgtcatattcaagtgtcatatttttatgcaacagacatgagagacttggaaaaaattcgccaatataaagaaaaaccactcttaataagaaagcaaatcactttgctggagtttgcagaatacgtcagaacctggagtgcttaccaccaatggaagcaggatccgaagaacgaaggtaaacaggatatcgcggactggtttattgaggaatcgttgggaagaagaccggaacttactgctaataccaagattgaagttgtttggaacactttttataaactcggtaaaaggatctag

SEQ ID NO: 814 - DNA, 3417 bp, Saccharomyces pastorianus
atggatttccagtgcagaacatgtaatcaagctttaaatgcagagcagatgatgaagcatctctcaattaccagacataagacggtatttaaaatttctagtggcgaggacatctgctgtgaagaatgtcaggatacaaacatacaccaacttcaaatcattaggtttgggggtgaggatatgattttactttgtaattcttgttttcgaaaggactattcagaaacagagcgtccagtaactagctattcattactaaatggctccatattaaagttctgggagaagtatgtgaaggttagagattgttgttgtgatatctgtggaaaagagtctcgcctgaatgtaaaccgcacaggagaagtgttatgtgacaaatgcctaccaaaatcagacaaaagtaaaggcttcatttctgaaaagagtggaagatttttgtatatctatttggggcttaacgagacaccgaatagcactaggaaacctagcaaaaagggaggacgaagagttagtagagggaaaaagggcgaaaaggctggtaagttcaagaaagacaaaaaagaaactttcgaagacaaaatcagtagaatcgcctaccaagtgaagaaagaaaatagtatcattcaaagttctagtaattcaagtttaaaaaacttcaaaggtttcaaagcagtggaaagcgattcaaatattgcagtgtccttctccaatcgtgcaaaagcaaacaaatcagaggccaaaaagaacaatcctggctcgttgaatgggaaaaaagggaaagagaatagaacaaaaaccaacaaaaagagtgaaaatgaagtgaaaagggagaaagagaacacgtcaaaaaacaagaaaaataatgaaaatgaagtgaaaagagatatcgctcaaattgaggttatttcagaagccaaaaagaaggtcagtaaccaagctaaggcaaaattggattcaaaaagcaaagttaaaccagttgagaaggctcaagaaccacgacctaaaattctgaatgctataactaaagctgcaaacaaaactactctgaaaaagagtaaactcaaagcagatcaaaatcaaaagatcaaaaaaaatattaagggtaacgcagatgcacaacaaagtaagcttaatttaaatggcaagagaagtacagtaaccaagaaaccaaacaataagccagataaaaccaacagtaaatggacaattggttctgatggtgattcttctagggaatcgagtgtttgcccaacggagaaggttaatgcgaataacaaaatgcgaaaccagcaaaagaaggttgacaataaaaaagtgggctctgcatcaaaggaaaaattcgtctctcaagtaagccccaaaaaatccgagacaaatctatatcaagataaagatatcgaaaagaccaaaaacagcggactcatttatgaggaaggtgaaccgctgaccaaatataatgccttcaagcccacgttgtcatatccagacttgaacacgtacttaaatgattattcgtgcgccctgttcttggaacagaaattagagaacgatttcatgcagaactttagcatattgtggcctcgtaatgaaagggaaacagccttcattatcaatgttgacaaaaacaacaatcccgaattagaaaaattactacctcctaatttgcttgcactcggtaggccagcattcaatgagaggcagcccttttttttttgcacccaggatgaacaacagatgtggtatatcttcatcaaagaactttctattcaaagaggtaaatatgtgttgttggcagagctattttcatggaataatttggggctgccaacgaagaacggatcatcccagttcaagctcttaccaacgtctgcacaaacgagcagaatcttgttcgctatgacgcgtattaccaatccgaaattcattgatctgctgttggggcagaagcctattaaacagatatattttgataatagattgaaattttcaagcgacaagttaaaccaatctcaaaaaacagcagtggagcatgttttaaacaatagtatcactatattacaaggcccacctggtacgggtaaaacgtctacaattgaggagataatcattcaagtgattgaaaggttccatgcattcccaatattgtgtgttgccgcatccaatattgccattgataacattgcagagaagatcctggaaaataggcctcagatcaagatcttgagaatcttatcaaaaaaaaaggagcaacaatatggtgaagatcatccgctgggcgatatctgtcttcacaatatagtgtacaaaaacctttctccagacatgaaattggtggcaaacagagcccgcaggggcgaaatgatttctaaatctgaagataccaaatattacaaagaaaagactcgtattaccaataagattgtatccttatcacaaatcattttcacaactaatatcgctgcaggtgggcgcgaactgaaagttatcaaggaatgtcccgtggtgattatggatgagtccacacaatcctcagaggcctccacattagttccactgtcattaccgggcataagaaactttgtctttgttggtgacgaaaagcaattgtcaagcttcagcaacatcccacaattggaagcctcgctatttgaaagagtcctgtcgaacggcacatacaaaaagccactaatgttggacactcagtacagaatgcacccaaagatcagcgagttccccataaagaaaatctacaacggcgaattaaggaacggtgtcacggagcaacaaaaggcatggcctggcgtggagcatcctctgttcttctaccaatgcgatctggggtctgagagcagagtgagaaacacacaaagagacatagtcggattcacgtacgaaaacaggcacgagtgccaagagatcgtgaagatcgtccaaatactaatgctggacaagaaagtcccgctggaggagataggtgtcgtgacaccgtactccgcacaacgtgacctgctatctgaggtcttgaccaaaaatatagtcatcaaccccaaacaagtctccatggaacaagaatacgacgaaatcgaactatttaacgcggccggctcgcaaggagccagcagcttgcagaacaatgttatcaacatcatcaacggtctgcatgtcgccaccgtggattccttccaaggccacgagaaatcctttataatcttttcctgtgtcagaaacaacagcgacaacaaaatcggattcctgcgcgataagagaaggctgaacgtggccttgacaagagccaagcacggcctgattgtggtcggtaacaaaaatgtcttacaaaacggtgacccgctgtggagagactacattgcctacctcgaggagcaagacgtcatatttactgaccttgcagcctactag

SEQ ID NO: 815 - DNA, 795 bp, Saccharomyces pastorianus
atgtcaaccagtcgtgaagattccgtgtacttagccaagttggctgaacaggccgaacgttacgaagaaatggtcgaaaacatgaaggccgtagcctcctccggccaagagctctccgttgaagaacgtaacttgttgtccgttgcctacaagaacgttattggtgcccgtcgtgcttcctggagaatcgtatcctctatcgaacagaaggaggagtctaaggagaagtccgaacaccaggtcgagctgattcgctcgtaccgttcgaagatcgaaactgaacttaccaagatctccgacgacattttatccgtgctagactctcacctgattccatccgccaccaccggcgagtccaaggtcttctactacaagatgaagggtgattaccaccgttatttggccgagttttccagtactgacgccagagaaaaggccactaacgcttctttggaggcctacaagaccgcctctgagattgctaccacagagttgccaccaacccacccaatccgtctgggtttggcccttaacttctccgtcttctactacgaaattcaaaactccccagacaaagcctgtcatctggccaaacaagccttcgacgacgctattgccgagttagacactctatccgaagaatcatacaaagatagcacactgatcatgcaactgttaagggacaatttgactttatggacttcagacatgtccgaatcaggccaggctgaagaccaacaacaactacagcagcagcagcctgctgctgccactgagggtgaagcaccaaagtaa

SEQ ID NO: 816 - DNA, 795 bp, Saccharomyces pastorianus
atgaatgtcggtgagaaggtgcaacaagatgaaaatcaaacacatcttcccctacacaagaaatcaaataacctttttataaaggaaaaggctgtgacagaatacaacaaacctgataatataaggcttcgtaatttgaacttcaatcatagaaaatatctggacgataaaaaaacgaagcaatttccggttccggttaacttcgaaaagtctaccagatgtgaagtcggtataggtttagaacctggtgaattaactgacgttaaccttgattatataccaaaatccccgtctatagaaaaaatatcagggcccaacactaccattacaccgaaaaacataatacatttacaatctgattcggatcttgttatcgaagaatgtgatcgcggttatgactgtggccctttttatcacctatacaactacgaaaacagaatcgaacctgatgattacgaagccattattgaagctataataaccgacgaaattgccggtacatatccgatgtttgaacgagaattagaatatcaagagttgaaaggccttgttagaaagcgggattatattttatattatttgttttccaaggattacttgggattctttcagctaaaagaggaacgtacatttttttatacttacccctcgattgcttatactagcccattgagatatctggataacgtacctgaaaacgacttgttcactgaagaaaatgatgagcagcttcagtcatttgatttcgaaaatatgtcatctgttaggactttggacagcggtgtatggcgttaa

SEQ ID NO: 817 - DNA, 258 bp, Saccharomyces pastorianus
atgtctgcagaaaacaccagcagcgatttaccagtcagtacccaattatcttttgaagccaacgttagcgataaggaagttaaaacgaaaaatgagaagttagtgcgtcaaaccaaacttttgaaagatactttagatctgctctggaataagacattggaacagcaggaggtttgtgagcacctcaaacaagaaaatgattatttggaagattatattggtaatttgatgaaatccagtaacgtcttagagaaatag

SEQ ID NO: 818 - DNA, 897 bp, Saccharomyces pastorianus
atgtccgaatttaaggtcaaaactgggttagctcaaatgctaaagggtggtgtgattatggatgtggtcaacgctgaacaagcaattatcgccgagagagcaggcgcatgtgccgtgatggcgctggaacgtattccagccgacatgcgtaaatccggtcaagtgtgtcgtatgtcagatccacacatgatcaaggaaatcatggccgcagtgtccattccggtgatggcaaaagttcgtattgggcactttgttgaagcacaaatcctggaagcgctacaggtggactatatcgacgaaagtgaggtcttgaccccagctgactggtctaatcatatcgagaagaacagcttccaggtcccatttgtttgcggtgccaaagatttaggtgaggcattgagaagaataaacgaaggcgctgcgatgatccgtactaaaggtgaagctggtactggtgatgtgtccgaagccgtgaagcacatcaacaagatcaggggtgagatccagctatataaagagaccttgactaaggagtcagatcttgccgcaaaagcattggaactaagagtgccagtcgaactattgaagaccacgattgagaacggcaagttacccgtagttaatttcgctgccggtggtgttgctacgcctgcagacgctgctctgctgatgcagctaggctgcgagggtgttttcgttggctcaggtatcttcaagtcttcaaaccctgataagttggcccgcgccattgtggaagccaccactcactacgacaacccaaaaaaactgttagaagtatccagcgacttgggtgatttgatgggtggtatttcaatccaatcgatcaacgaggcagccaacaaaaacggcacaagactttctgaaatcggatggtag

SEQ ID NO: 819 - DNA, 1023 bp, Saccharomyces pastorianus
atgtctaccgataaaatcacatttttgttaaactggcaaccagccccataccatattccaatcttcttggctcaaaccaaaggttacttcaaggaacaaggtctagatattgctgttctagaaccaaccaatccttcagatgtcactgaattgattggttccggtaaagtggacatgggtttgaaggccatgattcacacactagctgccaaggctcgtggcttcccagtcacttccgtcgcctctttgttggatgaaccattcactggtgtcctatacttggccaacagtggtatcaccgaagatttccaatctctaaagggtaagagaatcggttacgttggtgaattcggtaagattcaaatcgacgaattgactaagcattacggtatgactccagacgactataccgccgtcagatgtggtatgaacgttgccaagtacatcattgaaggtaagattgacgccggtgttggtatcgaatgtatgcaacaagtcgaattggaggaatacttaaccgcacaaggcagaccagctaccgatgctaagatgttgagaatcgataagttggcttgtttgggctgttgttgtttctgtaccgttctttacatctgtaacgacgaatttttgaagaagaaccctgaaaaggtcaagaagttcttgaaagcccttaagaagtctaccgactacatgttgaacaacccagttgaagcttggaaggaatacgttgacttcaagccacaattggacactgatttgtcttacaaacaataccaaagatgttacgcttacttctcttcatcattgtacaatgttcaccgtgactggaagaaggttaccggttacggtaaaagattgaacatcttaccaccagactatgtttctaactacaccaacgaatacttatcttggccagaaccagaagaagtttctgatccattagaagctcaaagattgatggctcttcaccaagaaaagtgtagaaaagaacacactttcaagagattggctcttccagcttaa

SEQ ID NO: 820 - DNA, 1338 bp, Saccharomyces pastorianus
atgattacaaacatgattactagatatacagcgctgctgactcttttcaccgtgcttgcgatgtggacaggtttgtcagaaactcacccgttggcagacaattcagatgcatctaagttgaactcagattactcgcttcctcacctgattaacctacgtaaagtgcctagtaactggcaggctggcgagcaagctagtttggaagaaggtagagttgtattaacttctaagcaaaacaccaagggttcgctttggttgaagcaagcgttcaatttgaaagattcttttactttggagtggacttttagaagcgtcggctattctggtaagactgatggtggtatatcgttttggtttgttcaagattctggtataccaagtgacaagagtctgtacaatggcccagccaagtatgatggtctacaattgctggttgataataacggtcccttgggttctactcttcgtggtcaactaaatgacggccaaaaacctgtggagattgcgaatatttatgaaagaagttttgcctcctgtttaatgggttaccaggactcttctgttccttcaacaattagagtcacttatgatatcgacgacaataacctattgaaagtgcaagtggataataaaatctgtttccaaactagaaaaattcgctttcctactgggtcataccatatcggtgtaagtgctgaaaacgggagagtggataagaatgcagaatcatttgaaattttaaaaatgcaattgtttaatggtgttattgaagattctttgattcctaacgttaacgcaatgggccagccaaaaatgatcacgaaaattattgatcaaaagaccggcaaagaaaagcagatcgaaaagacagttttcgatgctgataaggacaaaatttctaactatgaactctataagaagctagatagaatcgaaggtaagattctcgctaacgacatcaacgctttagatggaaagttgaatgatgtcgttaaagtacaacaagaattactatcattcatggcttctttaaccaaccaacgttccacaaagcaatctactgataacaaaaagggagtttctactgaggacatcattgctgaagataaagaagagtacaaagatttcttatctctgaaccaaaagttggaaaaaatagtggtagaacaagaaaaatatagagaagctgcaaaacgccatggtcaaggtggtcctcaagtggatgaaattgccagaaaattgatgatttggctgcttccattaattttcattatgttaataatggcgtactatacatttaaaatcagacaagagattatcaagaccaaactattatga

SEQ ID NO: 821 - DNA, 624 bp, Saccharomyces pastorianus
atgctcaaacgtattgttggaattcctacaaggcgtgttttccatagaagtgcgttgttattcagcaatgattttgaaactgttcatattccaaacactaatcacttcaaagatttactaattgcaaaaggtaaatttcaagaggatcaagcaacaacgatagtggaaataatgacagaagctattaggggcggggtgtatcatgtctcacaagatctggctaagagagaaaaattgacacaactaagttaccaacagcgtgttgatttcgcgaagttgagagatcagctactaagtgctgatagaagtgaatttcataacatccaaaacgaatacgagagtgtgaaaaatgatctggagaagttgagaaataaactaagagaagaaattacaaagactaacgcaggctttaagctagatctgtccttagaaaaaggtagaattagggaagaaagtagtcatcatgacttgaaaataaaggaaatcgacacaaaaatcgagcaagaagtgaccaacatgaaaatgcaaattgattctgtaaagactcaagtcatgcaatggttgataggtgtctgcacgggtacctttgcactcgtattagcatacatgagactattgacgtag

SEQ ID NO: 822 - DNA, 765 bp, Saccharomyces pastorianus
atgagtatttctgaattcgcttacaaggaaaagccagagactttggttttattcgatgttgacggtactttaaccccagccagactgactgtttccgaagaagttagaaacactttgatcaagttgagaaataagtgctgtatcgggtttgttggtggttccgatttgagcaagcaattagaacaattgggtccaaacgtcttgaacgattttgactactctttctctgaaaatggtttaaccgcctacagattgggtaaggaactggcttcccaatctttcatcaactggctcggtgaagaaaaatacaacaaattggctgtgttcgttttaagatacttgtcggaaattgacttgccaaagagaagaggtactttcttggaattcagaaatggtatgatcaacatttccccaatcggtagaaatgcttccaccgaagaaagaaacgaattcgaaaggtacgacaaagtacaccaaattagagctaaattcgttgaagctttgaaaaaggaattcccagactacggtttgactttctccattggtggccaaatctcctttgatgtcttcccagctggttgggataagacctactgtttgcaacacgttgctaaggatggtttcaaagaaatacatttctttggtgacaagaccatggttggtggtaacgattacgaaatctttgctgacgaaagaaccatcggacattcagttcaatctccagatgacaccgtcagaattttaactgaaatattcgacttataa

SEQ ID NO: 823 - DNA, 1623 bp, Saccharomyces pastorianus
atgaaggctatgaaatctattatttggagacttcccaaaatgccgaaaatcaaaatcacaaaaacttacgaagttgccaaaatcacggcaatattaacccttataggatttatcatgggcctcgaagttccgtcattagcaacttttctcacaaacaagacattcaacgaatatttcaagtacccaacaccattgcaacaaggtctattaatggggtccactcctctgggtggcatagctgggtgccttatttattgtatgatgaatgataaatatagtagaatttaccaatttcaaacgggaataataatttggaatatagttacactgttgaatttcggtatttggaacttgttaggtttactgatttgtcgagtgatcaaggggatgatactggggaatttttcgatcttggtggcttcgtatgctaatgaaattattcctcgcgacaaacgtggtagtacaatgagttatattcaattgtgtttaaccattgggattcttgtcatgcattacttgtgcattgcattgagcctttggaagtcacatttcgcgttccgtgttgcatggtgtataggaattgttcccggagtggcgttttgggcagctagttacgccttaccagaatcctaccattggctagtactgcatggacagatgagtaaagcccaggagattcaacacaatttagccaagaaatttaacgaaagccagccaagagatgcagtaccagaaatgagtaagattgaattagcaggagatttttggattggtgttaacgatctaaatttctgcaaaaaattgcctcgtggttcattgaagcctttggttcttggtatgactttacaattattgattcaattcagtggtataaatatcatcctaggttatatcacctacatttgcgagattgtggggctcgagggaaatgtgaaattattcacaagttccataccctacttcatcaatatggttttgagtttattaccaattacgtttatcgattacacaagcagaaaactaatcacagtgctgggcggattccccataagtgggctattagttactattggtgcattatttgttagatatggtcaagataccaaaccgatcgatggtaataagagtttggtttggtctattggagaaaacccgttcgtgggcgggtggatcttagcattgtgcttcctgattgttgggatttttgcgatgagcctttctagtataccttggatttacacaaatgaaatgttgccgtcacgagtgaaagtgaaaggatttgcaatttgcgtaacatttggatggttgggcaactttatattgacgtttctatgtcctgtgatgatcgaaacgttaaagggcacaacgtttataatatttggggttttcacgtttataataacgttaattgttttatttttgttcccagagacaaagggaatgagtatggaagacgttgataaattctttgagtttgaaaacagagtggaccctcatttgcatgaggagaagggtatcaagactccagattcgaattccaatatcggctccatacggtcctcggaagaaggggaattgcataagcctattaaattgaatagcaatgaagagatgattatttga

SEQ ID NO: 824 - DNA, 1374 bp, Saccharomyces pastorianus
atgagggaaattattcacatctccacgggccagtgtggtaaccaaattggtgctgcgttctgggaaacgatctgtggcgagcacggtttggatttcaacgggaactaccatggccatgacgccattcagaaggagagactgaacgtttacttcaacgaggcgtcctccgggaagtgggtacccaggtctatcaacgtggacctggagcccgggaccattgacgcagtgcgtaactcctccatcgggaatttgttcagaccggacaactacatctttggccagagctccgcgggcaacgtgtgggccaagggtcactacacggaaggtgccgagctcgtagacagcgtcatggacgtcatcagacgggaggccgaagggtgcgactctttgcaaggtttccagatcacgcattctcttggtggtggtactggttccggtatgggtacgctgttaatctcgaagatcagagaggagtttccggaccgtatgatggcgacattttccgtcctgccctctccaaagacctccgacactgtcgtggagccctacaacgccacgttatccgtgcaccaattggtagaacactccgacgaaaccttctgtattgataacgaagcgctatatgacatctgccaaagaaccttgaagctgaaccagccttcgtacggggacttgaacaacttggtctcgagcgtcatgtctggtgtcaccacttcgttgcgttaccccggccaattgaactcggatttgagaaaattggcagtcaatctggtcccattcccacgtttacatttcttcatggttgggtatgcgccactgactgcgattggttctcaatcgttcagatcgttgaccgttcctgaattgacccagcaaatgttcgactccaagaatatgatggccgctgctgacccaagaaacggtagatacttgaccgttgcggcattctttagaggtaaggtttccgtgaaggaagtggaagacgaaatgcacaaagtacaatccaagaactcagactacttcgtggaatggatccctaacaacgtgcaaaccgccgtgtgttctgtcgccccacaaggcttggacatggctgctactttcattgctaactctacatccatccaagaactgtttaagagagtcggcgaccaattttccgctatgtttaaaagaaaagctttcttgcattggtatactagtgaaggtatggacgaaatggaattctctgaagctgagtccaacatgaacgacttggtcagcgaataccaacaataccaagaggctactgtagaagatgatgaagaagtggacgaaaatggtgatttcggtgctccacaaaaccaagatgaaccaatcgccgaaaattttgagtaa

SEQ ID NO: 825 - DNA, 4059 bp, Saccharomyces pastorianus
atgctaagaccagtctacaaatctgtagtcaagacatcaatactgcaaagacgactaatatcgtcaaagggttccaagctatataagccttctccagattcaacaagtaccatactaataaaagatgatcctctggtagccgcttcttcctcctcctcatcttcctcatcaggcataataaactcatccgatttcccgttgttcaacaaaagtaacaagaacaccactaataatctatcttaccagtggaaaaatacctccaatatggagtttgatccttttaacaaatcgcatgcctcggcagtaacttcgatgacaagaaccagagacgtcatgcaattgtggtcgctgttggaggcatgtttgcagtcaaacctgctgaaaagggctttttctatattagaatcactgtacttgatacctgaacacaaacagagattcattgaggattataacatgtacctggattcattttcgaaaaacgaaccaaatttccccattataaaaatgaacgaaaaattaacgaacgatttggagacaagcttcaaagacgtaaattataacgacaagactttggcaataatgattcatcacgctttaaatttccacccaacggcaagttctatgcttctgtcgcccacaatttccgcttatttgaaaatgagtgtgaacggcgtcagagacatcttatcgaacctagatattttgaccatatcggatctgagtatcttggtgaacgacctaaaaatcatatcgttgtcacagttgccaacttctgtcaagcccatattggaatcccttgcaccatcttctacacctgtaaataatattgaaaacgaaaatggttccaacaaaatggaagctgagaaagattcaaatatagaccaaaaattagaattgggccgtgactctacaaagacaccttctttagaccctcttcgggaagcctcattagatgtctcagtgggagttttaccaaaggacgctgaaaagcttgtggcagtagacaccattgggatgagagttattagacatactttgttaggattgtcattgaattctcagcaaagagaacaaatttccaaattcaaatttgatgccaatgagaacgttttaaatatgaaacccacgcaaaatggtgaggataatgatcctccgataaatttttttgagatttacaattcattgccaactttggaagaaaagagagcatttgaaagtgcactaaacttattcaatcaagatagacaaaaggtattagaaaaccgtgccacagaagccgcaagagaacgctggaaacatgattttgaagaggcaaaggctagaggtgatatctctattgagaaaaacttaaatgctaaattgtggaaatggtacaacgatatgttacccttaataaaagaagagattagccactgtaaatcgctattatcggaaaagccagtgaataaaagggccttgaataaagtagacacaaaccgtttggggtatggtccttatttaacgttgattgatccagggaagatgtgtgttattacgatcttggaattattaaaattgaattcaacaggtggtgttatcgaaggtatgaggactgcaagagcggttatttcagttggtaaagctattgaaatggaatttagatcggaacaagtcttgaaaagcgagtctcagacattcagagacgtcaacaagaaatcaccggaattcaagaaactggtgcaaaatgctaaatctgtgttcaggtcatcacaaatcgaacaatcgaaaattttatggccacaaacaataagggcaaaaatcggttctgtgttgatttctatgttgattcatgttgcaaaggtctctgtgcaaggtattgatccaataacaaaggctaaagtacatggcgaagctccggctttttcacatggttaccaataccataatggttctaaactgggtgtcttaaagatccataagactttaattcgtcaattaaatggtgagagattgattgcatcggttcaaccacagctattaccaatgttggtagaacctaaaccatgggttaactggagatcgggtggataccactatacccaatccagtcttttaagaacaaaagactcaccggagcaagtcgcgtatttgaaagccgcctctgagaatggtgatatagatcgtgtttatgatggtttgaatgtgttgggtgatacaccttggaccgttaatagaaaggtatttgacgtggtttcccaagtttggaacaacggtgagggtttcttagatattccaagttcccaagatgaaatggttttaccaccagcacctcctaggaattcggacccttctatcttaagaacttggaaactgcaagtcaagacaatcgcaaataaattttcatctgatagatcaaatagatgcgacacaaattataaattggaaattgcaagggcatttttgggcgaaaaattatattttccacataatttagactttagaggacgtgcttatcctttatctccacatttcaaccatcttggtaatgatatgagtcgtggtcttttaatcttttggcatggtaagaagttgggatcatctggtttgaaatggctaaagattcatttatcgaacctgtttgggtttgataaaatatgtttagaggatcgtatcgcatttacagagtcgcatttgaaagatattaaagattccgcagaaaaccctttgactggagatcgttggtggacaacggccgataagccatggcaggcattggctacatgttttgagctaaatgaagttttgaaaatggataatccagaagaatttgtttctcatcaacctgttcatcaggatggtacatgtaatggtttacaacactatgctgccttgggtggtgacgttgaaggtgctactcaagtgaacttggttccaaatgataagccacaagacgtttatgcgcatgtggcaaaattagtgcagaaaagattagagattgcagctgaaaaaggtgatgaaaacgctgaaatcctaaaggacaagattacgagaaaagttgttaagcaaactgtcatgaccaatgtgtacggtgttacttatgtgggtgcgacgttccaaattgccaaacaattgagtccaatttttgatgaccgtaaggaaagtttagatttttctaaatacttgaccaaacacgttttcggtgctattcgtgagttatttcatagtgcgcatctaattcaagactggttaggtgaaagcgcaaaaagaatttctaaatccatcaggctggatgttgacgaaaaatctttcaagaacgggaataaaccagactttatgtcgtcggttatttggacaacgccactaggtctgccaattgtccaaccatatcgtgaagaaagtaaaaagcaagttgaaacgaatctacaaaccgtctttattagtgatccatttgctgtcaaccccgtcaatgcaagaagacaaaagaccggtcttccaccaaatttcattcactcattggatgcttcgcatatgctgttgagtgcggcagaatgtggaaaacaaggattggattttgcgtctgtgcatgattcctactggacgcatgcatctgatgtagatactatgaatgttgttttaagagaccagttcatcaaattgcatgaggtcgatttggttatgaggctcagggaagagttcacccaaaggtataagagctacgtcaagattggcaagttaaagagagcaacagatttggctcaaaaaattatcaatattcgtaaagatctatcgaagaaactaggaagaaataccacgttagcagatgaaatctatttcgaaaagaaaagacaacagttactaaatagccccttgccggaggatagaagtatcggtgagaagatgattacaaccgtatcgttatttcaggacgtcaaggatttagacgcacttgaattagaaaacggtggtgatgaaaatagcggtatgagcgttcttttacccctaagactacccgaaataccaccaaagggggattttgacgtcacagtattaaaagatagtcaatacttcttttcatga

SEQ ID NO: 826 - DNA, 3204 bp, Saccharomyces pastorianus
atgtctgattcggaagaagatttgggcctacagttgaaaggcttgaagattgcaagacatttgaagagctcagaagagcgcacctgccccggatccgattcaggttccgactcgagcaatcacgatgatttaaccattattaataatagtaatggtaaagacacctttgttggtcaggacagggcagatggagtatcggaggaggattcgttgcacgaggaggaacctgcaatagaggaaagaagtttgccctcaccacaaccacaggctagtacagatgaagcagatagcggtactaaccgggacgatgatgcgggtttgcaggatccctttagttctgtacaagatcctgatccattcgcggataagaagtctagagatggttctgactccggctctgattctgatgatggctggcaagagatgcctgccatatcatcattcaatatatacaacaataaaggtgaactagagctgacgtccaaggtaagagacccagagctcccccttaacacgcctactacagttctctccgcaaagaactcaaaaaatataaacgattccagattcgattatacgaaaatggcggcagaacagcaagctcagcgatcttatcgaacaaataagaggacagatttccttttcgaccataaggttctgaagaaaaaactgaataattcacaaaattccattagcctaacctcttccccttcgactacatcattgaataatgacaacaataacaacgacgatggtgaagattcgtatgatgaatatgaagacgatgtagaaccggttagtgatttagaccgtgattcccagctaaacataacgaaaaacctattaaatgatatggagaagtttgcatatataggtgcaataaatattcttgcaaaccaaatgtgtacagatttagccacgctatgcctttgtattgacatcaaatcccacaaaaaattagcacatcgactacaattcacccaaaaggatacggctgcgtggaaaaccgtggttttatcgaggctatatgatcatttaggcatatccccagaagaaatcgcaatgatcgagaaactttccttgcacaagatcgaactagcagatctatgtaagtgtttgaagactacccaaagcatagacaatccatgggaggattgtccgggctatgatgaaagtgttcaagatgaaacgataaaagaagagtcttccaaggaacaaaatgacgcgacactgcccaccacgcccaggcaagaacaacaaactgaaaaatcggaggagtcgaatgttgaaggatcttcatcgcctttgaaggtttcatcaaaggtactcgaccctgagaacgtcaaagatcaagataaactaaatttagacgtggcgtggaccattatatgtgacctcttcttgatatgtttacagtcttccacctatgattcaagatcaagaactttgttaatcagttttgctaaagccctgaatatgacaaatctagaaatctgtgaatttgaaaggcgtgtaacagactccttggacatggagcagtcgacagaagatcaggtatgggatgagcaaaaccacatgaagaatagaagaaaaagtaagagaagaaataaaatggcatatgtggcgctggctatggtaggcggttcattgattcttggtttaagtggtggtttattagcacccgtcataggtggtgggattgcagccggtctatcaacgatagggatcaccggtgccacaggttttttaactggggttggtggtactgctgtggttgcagtatcaagtacagctattggtgccaacattggtgctagaggtatgtccaagagaatgggaagtgtgcgaacttttgaattcaggccattgcataataatagaagagttaatctaatattaaccgtgtcaggttggatggttggtaacgaggatgatgtcagattaccgttttccacggtggatcctgttgaaggtgatttatattctttgtattgggaaccagaaatgctgaagtccatcggtcaaaccgttagtattgtggccactgaaatctttactacatcacttcagcaaattttaggtgccacagttctaacggcactgatcagttccgttcaatggccaatggccctgtcgaaactaggttacatcttggataacccttggaatgtctccctggatagagcttggtctgcaggcaaaattctcgcagacactttgattgcaagaaatctaggctcacgcccgattacgttaatcggtttttcgataggtgcgagagttattttttcttgtttaattgagttatgcaagaaaagggctttaggtttgatcgaaaatgtgtacctgtttggtacaccagctgtcatgaaaagggaacagttagtcatggcaagatctgtcgttagcgggaggttcgtaaatggctattcagataaggattggtttttggcgtacttatttcgagctgctgcaggtggatttagtgctgttatgggaatatcaaccatagaagatgttgaaggtttcgagaatgtcaattgtaccgaattagttgacggtcacctaaattatcgtaaaaatatgcccaaattaatgaagaaaatcggtattgctgttttaagtgaagattttattgaaatcgaagaaatgatgaacccagaagaagtcaagagacaaagaaaactggtaagcgatgtcgatgcagcgcaaaagaaattaaacgaaaggaaaaagcacaatagctgggtgccgaaatggctaaaacccaaaaaatctaaatggaaggttatggtcgaagaagctgtcgaagaaggaagagatatgcaagacctgccagaaacagatgccaataacaatgaaagcgaaacccaagatgagaatacacaaccaaaacgtaaagatgccgcccttgtcgatcatggggcattaatgcatgaattagagcttataaaacaggcaatgcgtgaagacgaatcaaagaaaaagaatctgccagctgaagacacgaatggagcggaagcttcaactgaatctttagacgaaacccagctcagaccaccatcaacaccaaaaataaatccaccacagagtccgaatcattttcaattattgagtgctggaagaaccattctcccggaggatgatgaaatgaattctcgagaaaaaagaaggatggaattttcttttccagatgatatatag

SEQ ID NO: 827 - DNA, 1158 bp, Saccharomyces pastorianus
atggctaattctgtagacacgctgctgatcccaggccctatcatccttagtgaggccgtccagaaggctctggacgtgccctcgctgggccacacctctcctgagttcatttccgttttccaacgggtcctgcagaacaccaggaccgtcttcaactccgctgctacctccaaatcgcagccctttgtgcttgctggctccggcacgctgggctgggacttatttgcctcaaacttcctgctctccggagctcccaacaggaacgtgttggtcgtatccactgggacgttttccgaccggtttgcagactgtctgcgcaactacggtgcccaggtggacgttgtgggccccaccaagataggcgaatctgttcctcaagaactgattgctgagaagctggtgcacaagaagtacggtgctgtcacagtcacacacgtcgacacctctacggcggtgttgtcggacctgaaagcagtctcgcagctcatcaaggacatctcgccggaaacgttcttcgtggttgatgcggtgtgctcgattggctgcgaggagtttaagtttgacgactggggggtggactttgccctgactgcgtcccagaaggccattggcgctccagcaggcctgtcaatctcgctgtgcagcagcaggttcatggactacgccctcaatgaccgcgagaacggccaagtgcacggctacttctcgtctttgagaagatgggccccgatcatgcagggatacgaggctggtaaaggtgcgtacttcgctaccccacccgtgcagctgatcaacagtctcgacgtggccttgagagagatcctcgacgaggggttgaccaagagatgggatttgcaccgcgaaatgagcgactggttcaaagacagtctggtgaacggcttgcagttgacgtccgtttctcggtacccttcgagcatgtctgcacacggcctgaccgccgtttacgttgctgaccctcccagtgtcattgcatttttgaagtctcatggcgtggttattgccggtggtatccacaaggacatcggacccaagtacatccgtattggccacatgggcgtgaccgcttgtaacaagagcttaccgtacgtgaagaactgcttcgacttgattaagttggcacttcagagaaagaagtga

SEQ ID NO: 828 - DNA, 1104 bp, Saccharomyces pastorianus
atgatactagatgatttagaccttacacagtgtgaattggtctactcgacaagaaccgctaggatttacaaatcaaatgcatacgccatcaaatgtttaccgcaagacttcaatatcccaccacataatgccaaatttgaactatcaatactacacaaagtaggttcccgatgtcggcatgtgttaccattgctagagtccaagacccttgaagatgacctgcttttgctatttgctttcgaggagatgaatctttatgaattcatgcaatcacagtataaaaaagatagaagaatgaacaatccatactacgatttgctgaaccccaccaacgaaaccgctgcgagcccgccagtcaaaaggtacactaatcaattggatgtaaacaggcattgtctgccctttttccagcaactggtgaagggcattgccttcttacacgataacaagatcatccaccgtgacatcaagccacagaacattgtgctgacggctggcaccacgactgactccccaaggctgtacataattgatttcggtatatcatatgacatggaaagcaaaccacaaacaagcatggagcccatggatggtaagatcacagatataagcacggggatatacaaggcacccgaggttctgttcggggtgagatgctacgatggcggagtggacgtttggtcactactgatgattgtctcccaatggtttcagagggaaacagatcggatgggacacgttccggcgatgattaatgatggcagcgacgaaatgaacctggatgggagcgacttcagattgatctgctcgatcttcgataagctgggcataccgtctctcgagaagtgggacgccgttgcaaaacatgggtctgtagacgcctttgttggaatgtttggtgcggatggcgatgggaactacatactcgaccaggggaaggacgtacaaatcaacgccatcgagaggaacatgcctcggcttaatgagattgtggacgtgaaagtcaaagaaacgttcgttaattgcattctaggaatggtctcgttttcaccaagtgagagatgggactgccacagaatcttgcaagaactggaaaagccataa

SEQ ID NO: 829 - DNA, 870 bp, Saccharomyces pastorianus
atggtttcccagtttgctattgaagtgcgtgacttgacgtataagtttaaggaaagttctgaaccatctgttgttaacatcaatttggagatcccatggaatacgaggtctttagttgtaggtgcaaatggtgccggtaaatccacccttttgaagttactaagtggtaagcatctttgcctcgacggcaagatcatggtgaatggccttgacccattcagtcccttgtccatgaaccaagtagacgatgacgaaagtgttgaggattctacgaactaccaaacgaccacttatctgggtacagaatggtgtcacatgagcatcattaatagggacattggggtcatggaactattagagagtatcgggtttgaccattttagagaaagaggtgaaaaattggttaggatcctagacattgacgtgcgctggagaatgcacaggctgagtgatgggcaaaaaagaagagtccaattagccatgggtcttttgaaaccatggagagtcctactacttgacgaggtcactgtggacttggacgttattgccagggcaagattattagaatttttgaaatgggaaactgaagccagaagatgctcagtggtttacgctacgcatatttttgatggattggccaaatggcctgaccaagtgttccatatgaaatctggtaagatcctcaacaagctggactttctcaaggatgtggagttttccgaggtggtcaacgccaaagttaacggccaagtggcctttgatgaagacagcgataaggttgtcattagtaaagtgaacagtttgcatccgttagcactagaatggttgaagcgtgataaccagatccctgacaaagagatcggtatatag

SEQ ID NO: 830 - DNA, 1494 bp, Saccharomyces pastorianus
atgccactacgatcattattaaatgctggccgcaataggcacgtcaaggaccggttggcagaggaaggagttgacgtctatttgcaatcgctcgatagttcaagcactgaaaaggcagaagaacaaaaaggggaagccatatcgaggttgttgaagaagaaggatgttcgtttgttgaggcatatgggcatagggccgctgggttttgtgtccaatccgctcagaagagactgttggtatgaattgttaacgtcgcagttgcacatcgatgatgctacggagtactttccgccggtagagaaacataaggatgaaggccaggtggcactggatgcagagaggtcttttggcgggatagcaaacaagaagttgaaggtacagttgaaggcgttgctggtggagttaattaccgacatattaaggaagtacccgtcgctgaactattaccaaggttaccatgacatcgtatctgttttcattatgtgctttagttgggacgtcactgaagagaaagggttggaatgggggtctctctcgttgcgagaacaaattaacattaataaattgttttactgtgttgaggcgtttacattattatatctgagagattttatgatgaactcgttagattttccattcgaacaattgagcttaatctcatcactgataaaggagtcggatccaaaattctataacgctttccaattcgataagaatgaaccgcttttcgctattgggtccatactgacaatctttgcacataatttaaagccaatcgatagcggcgacaccaacctacacaagacacttttccagatctttgatatgacgatatcctcacaatccatgcatttacccttgatcatatacaagaacttgctattgcaaaacgcacccgaaatattgaagcaaatagaagctaattctgaggtttttgaaaacgatttcgatttgcgtcatggagctatacaaacagtcttacagaaaaaattatacgacgaatcgctttgggaagaagttttgcaaataactagggaccattcggcaaatgctagcagaagggttttaaaaagggtacgtttgaacaagtatagtacattactcaatacagcgtgcggcaacccatccagtttccaaatggacgccgttgttttctacctagacgaacaaactaagatgaacggacagtataagaagaacaaacacgacggaatcgcaactaggtccaagacaagggcactagtccagaggctgggccattttttgccccctaagtatgataaatggggcaagatatctttactaatcggaatcgtggccatcctgtaccaactacggaacacgaggtcgttaagtctagtactcaatttacgatacatgatatccacaaagttgaaagacctgtcacatgtgaatatgaatttgcatcacgtcaataacatctggatggatccaatcaaagatatcttgaggtttggacgcccaaatagataa

SEQ ID NO: 831 - DNA, 1296 bp, Saccharomyces pastorianus
atgtctggtacagctccttcgttaagcgatttgttttatgactctacatacaatccaggccaaagcatcattgactacacttctatatacggcaacggtaccactgtcacattcgatgaattgcaagcccttgtgaatagtacggttactgaagctatcatgttcggtgttagatgcggtgcggcagccttaactttgattgtcatgtggatgatatcgagaagtaagaaaactccaatcttcatcatcaaccagatttcattactgttgatcgttttgcattccgccctctatttcaaatacttactgtccaattactcctccgtgacgtatgctctcactgggttttcccagttcataagtagaggcgacgtccatgtttacggtgctacaaatatcattcaagtgctgctagtcgcctccattgaagcatcgttagtgttccaggtcaaagtcatcttcacgggtgacaatttcaaaaagataggtctggtgttgacatcgatatcttccgctctggggcttgctacagtggtcatgtattttgtgagtgctattaaaggtatgatcgcgacttatcaagacgtcagcgctactcaagataagtatttcaatgcgtccaccatcttactggcgtcttcgatcaactttatgtcgtttgtcctagtcgttaaattgattctggctattagatcaagaagattccttggcctcaaacaattcgatagtttccatatcctacttgttatgtcgtgtcaatctttgttagtcccatcagtgatcttcattcttgcatatagtttgaaaccagaacaaggtacagatgtattaaccactgttgccacattgttagctgttttgtctctgccattgtcatctatgtgggccacagccgccaacaatgcatccaaaccgaccaccatcacttcagattttacaacgtcaacaaacggattctacccaggtggatcttctagttttcagactgaaagtgtcaacagtgatgcaaaaagcagctttagaagtaggctgtatgatttgtatcccagaagaaaagaatcaatatcagacaaacattcagaaagaacctttgtggatgggactgcgaacgatatagaaaagaatcagttttatcagttgcctacgcctacaagttcaaaaaacaccacgacagggccatttgctgatacaaattataaggaagcgggtagtgaacgtgtcgctgtgtatactcccaatactgctgcagatgaagaagcaagaaggttttggactgaagataatgataatctatga

SEQ ID NO: 832 - DNA, 3090 bp, Saccharomyces pastorianus
atgggtatcaaaaggttgattggtggtataacgcggcccatattcaacaaagttagttcatctagacaatactcgagagtacatactgaccgtgaagacagggaaaagccttctctcaagtataacagcaataatagcatggctgaaaaaaaaaattatacgtataacgctttctccattcttggcataatatgcatctgttcggttttgttaatatcgttgttaaaaccatttgacggcgcagatgctcctcagtgtaggtctatttatatgtacccatcatatgcaagtatcgatggattcgatgaacgatatacacccttggcgcacaagtatcatctttatctgtatcgagaacaaggtgtagatacaaaacctttaaatgacgataaattacaactcgatggtatccctgtgcttttcataccaggaaatgcaggttccttcaggcaatccagatcaattgcttctgcatgctctaatttatactttgatattaataccagagcgaccttgaataatgaaaatttacgaaatttggacttcttcacggctgatttcaatgaggatttcactgccttccatggtggaacaatgcttgatcaggctgaatacctcaatgatgccgtcagatatattttgtctctttatgaaacgacacctaattattcacatcctattccggaatccgttattttagttggacattccatgggcggtattgtagctagagtcatgctcactttgaagaaccatatcccgggaagtatacgatctatattgactctatcttcacctcatgctgcctcgccggtaacttttgatggtgatatattgaagctctacaaaaatacaaatgaatattggagagatcaactatcccacaacgactctttcttctcaaagaatatctcattagtttccatcacgggaggtatattagacaccaccttacctgccgattacgcctctgttgaagacttggtaagcttaaacaatggattcacaagtttcactaccacaattccagaagtttggactcccattgatcatttggccatcgtttggtgtcagcaattaagagaagttattgcacgccttttattggaaagcatagatgcttccaaacctgaaaaagttaaatcgttggatgagaggttacaaattgcaaaagaatttttactttcagggtttgaagattatgcatcggtaaacaacaaactgaattatcctcaagaaagtttacaagaattcagtggcaacttcttttcagacttcaccactttggcgatcaacgatgtgctaaatatttcaatgtcaaaccttgaaaattgggaagatgattacactaaagtaaatattccaaggaacgcatcttctatcggacatttaaaattcatgttgttaactagtttggaaacgcctatcgtatatttctgtgagaattcgaaaaacctaagttgtataacggctgaaggtagtatcttaacagtacctagatcttctcaacacacacaggttgcagcagattcctcttttggtgaggaagaaaatcctttcaaggtcatcagtgttgaaaaagagatattacagaaatacgactttctaatgataagtaagcctacttatgatgagttttccaaacaagaaactaatgggtcaaatgatggattccttttggcatcattgtccaatgagccaagtgttcaagtaagtcatactacaccttctcagctattgctatttggagagacgttgcgtttaaatggtgtagacatcgaacaaatcataagcttccataatttatgggattctttactatcgtataagttagagacaaaacttgaaggaaacaacaagtctattccagctggtgaggcgttattccagccttttataagacaatgggtttatgagccttttgaatccaagtggcatttggatatcctaaatcaagatgttgatataaatatgcacaacgtggcgccgtttattccattgaatgaatctgaatcaagatcactacaattgagttttttcgttccgcctggaatgtctttggaagctaagatgaccattaattggtggttgactttaaagatgctttttatcagatacagattagcgcttgcatcttttccggttgggtttattgcactcgtgctggcatatcagttttactggtacaataagacatctgaattcccctctttcgatgccaccataagccaaattatgagaaagcacggcatatttatgatgtttgctcttttcttagcttctcctatagttaataataagttggtccaacgaatactctatttcttagatccggtcggtttaaactatccatttctattgtccgaaaaacacatgcacgcaaacttttattatttggggatcagagattggtttatgtcgagtattgggttattgtttgggattatgactattggattgttagccctagtttccaaaattttgaaggcattggaattattattaacatcacttcaacgaatgttgaaaggggggaataccgaggccaaagaatgtgttggtattgctgaacctaaggtatatggtaagggcagactgatagcattaatattcctattattattgatttttttttacataccgtatcaaatggcttttattatcacattagttattcagatagctacctgtgtcagaatagcgctactacagccatcaaacgacgcacaaaaaaccaatttgttaaatttcaatatgacattactcatgcttttattatttgttagcgcgattaacattcctatcgtcattgttttcttacataatgttgccattaggtgggaaacttcgttcagatcacatcacaacatcctagctgtggcaccaattatctttttggttgggaacaattcagttttcaaaatgccaaagagtgtttcgataagatcgttggatggtgcaattaccgttctcttattcgtgtatacaatgctattcagcttcatttatggaataaggaacttatactggatacatcatttggtgaatataacatgcgcatggctactattttttgaagcaatacactga

SEQ ID NO: 833 - DNA, 2589 bp, Saccharomyces pastorianus
atgccgacaccttcgaacgctatagaaatcaacgatggctcacacaagtctggcagaagtactaggcgatctggctcgaggagtgcacctgaagacggcctagattcactggggaagggcgattccggtgctggcgccagtgctggtagtagtcggttcagacatcggaaaatatctgtcaaacagcatcttaaggtctatttgcccaatgatttgaaacatttggacaaggatgaattgcaacaaagagaagtcgtggagatcgaaactggtgtggagaaaaatgaagaaaaggaagttcatttgcatcgaatattacaaatgggtaccagtcatacaaagcagaaagattatattccgacaccagatgcttccgtgacttggagtgattttggtaagttttatactggcactttccaggagacaactagttacataaagttttctgccacagtagaagattgttgtggttcgaactataacatggatgaaagagacgagatatttctaaatgaagaagtgaataaagattcgtcagatattttaactgaagacgaatttgaaattctttgctcgagtttcgaaaatgccattcatgaacgtcaaccttttttgagtatggatcctgaaagtatactttcatttgaagaactgagacccacattaatcaagtctgatatggctaactttaatctaaggagccaattgaactatgagataaattctcatgaaactcattttatcacacaattcgatccttcctctcagatggatacaagaccttcaattcaactaattgaaaaatttggctctaagatttatgaatattggaaagaaagaaaaattgaggttaatgggtacgaaattttccctcagttgagatttgaaagacctggtgaaaaggaagaaatcgatccgtacgtttgcttcagaagaagagaagtcagacatccaaggaaaactagacgtatagatatcttaaacagtcagcgtttgaggtcgttacatcaagaattgaagaataccagggaattagctcttctggttgctaaacgtgaaaacgtttcattaaattggattaatgacgaattgaagatcttcaatcaaagagtgcaagtcaaaagtttgaaaagatctttgaatatcagtggtgaagatgatgatttgattaatcacaagagaaaacgtccaatgattttcactattgagcaaagagaagcagaattaaagaaagcagaattgaagagagctgcagctgccgctgccgctgcaaaggctaagaacaacaaaaagaataaccaactcgatgataaatcctccactaggctatccaaacagcaacaacagcaactcttacagcaacaggaacaacagcaacagaatgccatcaaatctgaaagtggaaagcaacttatgcctgtgtcttcctcggtatcgtcacagccaattacatctcacgtttatgttaaattaccatcttccaagatcccggatattgtattggaagaagtagattctttgctgaacagtaaagaaaaaaacgcaaggaagtttgttcaagagaagatggaaaaaaggaaaatcgaggacgcagatgtatttttcaatttaacagatgattccttcaatccagtatttgatatgtcactacctaaagatttttccacaaataacattccgttttcgtctattgcgtcatcgaacttccaaattgatagatccttttactcccctcatttaccagaatatatgaaaggcatctctaatgatatcaaaatttatgattccaatggccatcctaaaaatcaagataataacaacttgaacgctagaaagattaaaaaaactgaactgtacgatccgtttcaagaaaatttagaaattcattcgagagaatatccaatcaaatttaggaaaagaatcggtagatctaatatccagtacatcgatcgtaagcccaattatacaataacatccgccaagccaagcagttctttaatggattttgtggatttcgattcaatcgaaagggaacaatatccaaaagaagttaacgaaaataatgaatcgataaatgtttacgattccaaatatgacgaatttgtgaggctttacgacaaatggaagtacgattccccacaaaatgaatacgggatcaagttttcggatgaaccggcaaggttaaatcagatttctaatgacactcaagtgattagattcggtactatgttgggtaccaaatcctatgaacaattaagagaagcaacgatcaagtaccgtagggactacatcaacaggctgaaacagacccacatgcaacatttacaacaacagcaacaacagcaacaacagcaacaacaagcacaacaagcacaacaagcacaacaagcacaacaagcacaacaagcacaacaagcacaacaagcacaacaacaacagcagcaacaacagcagcaaacacaacaacagaagcagaagcaacaaaataatcatacaaactcgtcaaattccctgaaaaaactgaacgattcattggtaaatcccggggctaaacaaacctcttctataactcaaaaaaactcttcatga

SEQ ID NO: 834 - DNA, 1512 bp, Saccharomyces pastorianus
atgtccgattttcaactagagattttgaaaaagctagacgaattggacgaaatcaagtccacactggccacgttccctcagcacgagtcgcaagacgtgctttctgcgctcaactcgctgaaggcgcacagtaagctggagttctccaaggtcgacaccgtcacgtacgagctgaccaaggagggtgcccagatcttgagtgatgggtcgtacgagatcaagctggtcaagcttatccaggaactgggccatctgcaacttaaagaagtcatgtccaagctgggccctcaggtcggcaaggtcggccaggcaagagcgttcaagaacgggtggattgccaagaacaacggtaacgagctcgaactgtctgctaagctacagggcacggacctgaacgggctggtcgacgaaacacaggccgttctggcgcagatcaaggccaattccgacctcgagagcatcgacgccaagactttgaacgacctcaagaagagaaaactggtcgtgcagggcaagatcaccgacttccacgtcatcaagggcgcagacttctccaccgaactcaccaagttggaaaccgacctgacctcagacatggtctccaccaatgcatacaaggacttgcagttcaagccttacaacttcaactcccagggtctgcaagtgaactccggtgcgctgcaccccttgaacaaggtcaaagaagagttcagacaaatcttcttctccatgggcttcacggaaatgccctccaaccaatacgtcgaaactgggttctggaacttcgacgccctgtacgtcccacaacagcacccggcccgtgacctgcaagacacgttctacatcaaggacccgctcaccgcggacttgcccgtggacaaaacctacatggccaacatcaaggccgtccacgagcaaggtaagttcggctccatcggttaccgttacaactggaagcccgaggagtgtcaaaaactggtcctgagaacgcacaccaccgccatctccgccagaatgctgcacgcgctggccaaggacccaaagcccaccaggctgttctccatcgaccgtgtgttccgtaacgaggccgtcgatgccacccatctcgctgagttccaccaggtcgaaggtgtcttggccgactacaacatcactctgggcgacctgatcaagttcatggaggagttcttcgagagaatgggtgtcaccggtttgagattcaagcccacttacaacccctacaccgagccctcgatggagatcttctcctggcacgagggtttgcagaagtgggtcgagatcgggaactccggtatgttcagaccggaaatgctcgagtccatgggcctgccaaaggacctgagggtcctcggctgggggttgtccttggaaagacccaccatgatcaaatacaaggtccagaacatcagagaactcttgggccacaaggtctccttggacttcatcgaaaccaaccctgccgccagactggacgaagacttgtacgaataa

SEQ ID NO: 835 - DNA, 1500 bp, Saccharomyces pastorianus
atgttaagaatcagatcactttcgaataatagacgtgccttttcgtccaccgtccgggctttgactgtaaataagtcacatgatgtagtcatcatcggtggtgggcctgctggttatgtggctgccattaaggctgcccaactggggttcgacactgcatgtgtggagaagagaggtaaattaggtggtacctgtctaaacgtcggatgtattccctccaaggcccttttaaataattctcatttataccaccagatgcatacagaagcgcaaaagagaggtattgatattaccggtgacgtgaagatcaatgtaacaaacttccagaaggccaaggatgacgctgtcaaacaactaactggtggtattgagcttttgtttaagaaaaataaggtcacatactataaaggtaatggttcgtttgaagatgaaactaagattaaagtgactcctatcgaaggtttggaaggtactgtcaaggaagatcacatattagatactaaaaatgttcttatcgctacgggctcagaagtcacacctttcccaggtattgaaatagatgaacagaaaatcgtgtcttcaacaggggccctttcattaaaggaaatccccaagagactagccatcataggtggtggtattatcgggttggaaatggggtctgtttattctagattaggctctaaagtcactgtgttggaattccaacctcagatcggtgcctctatggacggtgaagtcgccaaggccactcaaaagttcttgaagaagcaaggtatggacttcaaattaaggaccaaagtcgtttctgctaagagaaacgacaacaaaaacgttgtcgaagtcgttgttgaggataccaagacaaacaaacaagagaatttggaagctgaggttttgttagtcgctgttggtagaagaccttacatcgctggcttagatgcggaaaagattggtctagaagtggacaagagaggccgtctagtcattgatgaccaattcaattctaaattcccacatatcaaagtggtaggagacgtaacatttggtccaatgttggctcataaagctgaagaagaaggtattgcagcagtggagattttcaaaaccggtcacggccatgtgaactataacaatatcccctcagtgatgtattctcacccagaagtggcatgggttggtaaaaccgaagagcaattgaaagaggctggtattgagtacaaaatcgggaaattcccatttgcagctaactcaagagcaaagactaaccaagatgcagaaggtttcgtgaagatcctgattgatgccaagaccgaacgtatattgggggcccacattatcggtccaaatgccggtgaaatgatcgccgaagctggtttagctttggaatacggtgcctctgctgaagatgttgcaagagtatgtcatgctcatcctactttgtctgaagcatttaaggaagctaatatggctgcctatgataaagctatccactgttga

SEQ ID NO: 836 - DNA, 234 bp, Saccharomyces pastorianus
atggtttccactcctgaactgaagaaatacatggacaagaaaataatgctgaatataaacgggtcccggaagatagcagggatcttgagaggctacgacatcttcctgaacattgttctcgatgacgcaatggagataaacggtgaagatcccgctagcaacttgccgctgggcttgcaaaccgtcattaggggcaattccataatatcgctagaggctctggacaccatataa

SEQ ID NO: 837 - DNA, 480 bp, Saccharomyces pastorianus
atgagcctgccagaggggttttacataagacgggtggaagagaaggatttcgaacaggtcacggaaacattgaaagtcttgaccaccgtaggcacaattgctcctgaggccttcagcaacctcctcaaatactggaacgaatccacagtgtggaatgacgacaatgacaagaagatcatgcaatacaaccctatggtgatcgtggacaagcgcactgagaccgtcgccgccacgggcaacatcatcatcgaaagaaaaatcatccacgaactagcgttatgtggccacatcgaggacatcgcggtgaacccgaagtaccaaggccaaggcttgggcaaactcttgatcgaccagctggtagccatcgggttcagctacggctgctacaagatcatcttagactgcgatgagaagaacgtcaaattctacgaaaagtgcgggttcagcaacgcaggtgtggaaatgcaaattagaaagtag

SEQ ID NO: 838 - DNA, 1545 bp, Saccharomyces pastorianus
atgagcttccagcaaggtgttttgtcgaggtgctccagtgtccttagacaccgtacagggcgtactcgccacatcaataatattctctatagacatgccatcgcgttcgcatccaccgctccacgaataccaaagacgcagttccacacctctgccatcagacaaaatgaggcattcaaggacccctacgatactctgggtctgaagaagtctgccaccggttcggagatcaaaaaggcctattacaaactggccaagaagtaccatccggatatcaacaaggaaccggacgccgagaagaagtttcacgacttgcaaaacgcatacgaaatcttgtccgatgacacgaagagacagcaatacgaccaatttggacccgctgcctttggtggcggcggcggtggagccgccggaggtcccggcggcggatctcccttcggctcgcagttccatgacttctcgggattcaccaatgcaagcggtggctctccctttggcggcatcaatttcgaagatttgttcggtgctgcgtttggcggcggcggcggcggtgccggtgctggccgtggtggcagatcttctccgatgtatagacagtataggggcgaccccatcgagatcgtccacaaggtctcgttcaaggacgctgtgttcgggtccaagaacgtccaattgaagttctccgcactagacccttgcgggacgtgttccgggaccggtatgaagcccaacacgcacaaggtcacttgtacctcctgccacgggtcagggtccacggttcacgtcaggggcgggttccagatgatgtccacgtgccccacttgcaacggtgaaggttccatgaaacatccgcaggataactgtacttcatgccacggtgaaggtgtccaggccaacaggagcaagacaatcaccgtggacttgcctcatgggctgcaagacggcgacgtcgtccgtattcccggccaaggttcgtaccctgacatcgccgtggaggccgatcttcaagactccatcaagttgtcaagaggcgatatcctcgtgagaatccgcgtcgacaaggaccccagtttctccataagaaacaagtacgacatctggtacgacaaggaaatccccatcaccaccgccgccctaggtggcaccatcgccatccccaccgtggacggacagaaaatcagaataaaggttgctccaggaacgcaatacaaccaagtgatatccatcccgaacatgggtgtgccaagaacctcgaccctgcgtggtgacatgaaggtccaatacaagatcgtcgtcaagaagccgcaatctctcgccgagaaatgtctctgggaggccctggccgatgtgaccaacgatgacatggccaagaaaaccatgcagccgggaaccgccacgggaaccgccatcaacgaagagatattgaaaaagcagaagcaacaagaggagaaacacgcgaaaaaggatgatgaaaacactttgaaaagactagaaaacttcatcacaaacacattcaaaaagatcaaaggcgacaaaaaaaactag

SEQ ID NO: 839 - DNA, 327 bp, Saccharomyces pastorianus
atgtctgacacaggtagaaaaggattcggcgacaaggcttctgaggctttgaaaccagactctcaaaaatcatacgccgaacaaggtaaggaattcatcaccgacaaggccgacaaggtcgccggtaaggtcgaaagcaacgacaacaagggtgtcttccaaggtgttcacgactccgctcaacaaggtaaggacaacgctgacagccaaggtgaatcttttgccgaccaagccagagactacatgggtgccgccaagtccaagttgaacgacgctgttgaatacgtttccggacgtgctcacgaagaagacccaaccaagaagtaa

SEQ ID NO: 840 - DNA, 594 bp, Saccharomyces pastorianus
atgggacaaagcaagagtaatccccctcaagtgccttctggttggaaggcggtgtttgatgacgagtaccaaacttggttttatgtagatttatcgacgaacagctcccagtgggaagcacccaagggtaccacatggtcaagacctacaggtcccccaccaggtgctagcaatgagaaaagtgcacgtcaacaggcagatcaagctcctccagcgtactcttcacagtcgcaacctcaggcgcaagctcagcaagctcgctactatcagccccaacaggctcaataccctcaacaacaacaagcctactattcacagcaaccccccatggcagcagcagcaccacagcaagcatactatggtgccgccccaaacgctaagaaaagtggtgggcgtagcaacgccatgatgggtggtctactcggtgttggtgctggtttattgggtggagccatgctggaaaatgcatttgataaccacgaccaagataatgtctatgtcgaaaacaactactacggtgatgacaatggtggtgacttcgacggtggctatgacggcggatttgacggcggatttgacggtggagatttttaa

SEQ ID NO: 841 - DNA, 3687 bp, Saccharomyces pastorianus
atggggcgtttggttggcttagagctgagtaatttcaagtcctacagaggaatcaccaaagtaggatttggtgaatcgaacttcacaagtattatcgggcctaacggttccggtaaatcaaatatgatggatgccatttcgtttgtgcttggtgtacggagtaatcatttgaggtcaaacatcttaaaggatttaatctataggggggtcttgaacgatggtaatgatgacgatattgacagtgctggtgacgatgatgcgattatctccaacccaaactctgcatacgtgaaggcattttaccaaaaggggagcaaactagtagagcttacgaggctaatttctagaaatggtgacactacttataagatcgatgggaaaactgtcacctataaggactactccatattcctagaaaatgaaaatattcttatcaaagccaaaaatttcttagtgtttcagggtgatgttgaacaaattgccgcccaatctcccacggatttatctagaatgtttgaagaagtatcaggttccattcaatacaaaaaggaatatgatgagttaaaggaaaaaatcgaaaagttaagtaaatccgcaaccgaatccatcaaaaacagaaggagaattcacggagagttgaaaacgtacaaagaaggtatcaataagaatgaagaatacagaaaacaagttgacaaaaaaaatgaattacaaaaatttcaaaccctatggcaactatatcatttagaacagaagaaggaagagctaacggataagttgtcggtatcaaactctgaaatatcatcgttgaaagaaagaataaataacgaaacaaaatcactacaacgctcaaaatcttcctttgtcaaggagagtactgttatttctaaacagaagagtaaactagactatattgtcaaggataaagaaaagctagtttcggatttacggctaataaaagtgcctcagcaagcagcaggaagacgtatatctcatatcgagaaaagaattggaagtttacagagagatattgaaagacaagaatcttatgtagagagatttgaaacacaactaaaagtaataaccaaatcaaagaaaactttcgaagatgaaatcaaagaatctgcgagaaactatgataagttcaagttgaatgaaaatgatttaaaagcctacgataatttgcatgaaaaatacttaactcaaggtgggtcgatcctagaagaaaaaatctcgctttccaataacgataaacaggaaattgtagatgaattagacagattcaacaaaagagctgacatatccaaaagaagaataacagaagaacttttcataacgggtgaaaagttggacactcaactgaatgatttaagagcgtctttgaacgaaaaaaatgcccttcatactgaacgtttaaatgaactaaaaaagctacaatctgacattgagtccgcgaataaccaagaatacgacttgaatttcaaattgagagaaaccttggtcaggatcgatgacttgagtgctaaccaaagagaaacaatgaaagaaagaaaattaagggaaaatatagcaatgttgaaaagattttttcctggggtgaaaggccttgtccatgatctttgtcacccaaaaaaggaaaaatatggcctggcagtgtccaccatcttgggtaggaactttgattctgtaattgtagaaaatttaacagtagcccaggagtgtattgcatttctcaaaaaacaacgtgcaggtaccgcatccttcatacctctcgacactattgaaactgaattacccacattatctttacctgattcacaggactatattctgtcaataaatgccattgattacgaaccagaatacgaaaaagcaatgcagtatgtatgtggtgattctatcatctgtaacacactaaacattgccaaagatttgaaatggaagaaaggcgtcagggctaagttagttacgatcgaaggggctttaattcataaagccggtttaatgacaggtggtatatcgggtgacactaataatagatgggacaaagaagagtatcaaagcttaatgtccttgaaggataagttactaatacaaatagacgagctttccaacaatcaacggtcttgttccattagggccagggaggtcgaaaacagtgtttcgctattgaattccgatatagcaagtttgagaactcaggtgacccaacaaaagcgttccttggatgaaaataaactagagataaaataccataatgacttgatagataatgaaatccaaccaaagataaccgaattggagaaaaaactaggacatttggaagagactaaaaatgaattagagaaagagaaagaagcgttacaaagtgaagttttcaaagaatttacagagaaaatcgggttctctattaaagagtatgaaagccattccggtgaactaatgagacaacaatcgaaggaattgcaacaattgcaaaaacagatcttaacggtggagaataagctacagttcgaaacagacagactgaacactacccaaaggagatgtgaaaaggcacaaagagatctggcgaatgttcaaattgaaatgaagtctttggaagaacaagaggaggcaacagaaacaaaaatcaaggcaatagagtctaagttggaagaaaacaaagcgcacttggaagagttgcaaaagaaattcatagccaaccaaactgacttgaattccagcgaggacattctggaagatttaaataataacttacaggcgttgaaaagggggagagacggtatcaaagaagatatcgagaagtttgatttggaaagagttacagcgttaaagaattgtaaaatttctaacataaatctacctatattatcggaaacgacaatagacgatctgcccatttcttccggagattctgaggcaatttcaatttctaataatattgatgtagattatcaaggtttacccaagaaatacaaagaaaatagtaacgactcagcaagaaaggagctagagcaaaagattgctgaagcagacgaaatattgaatgagttacaacccaatgcaagagctgtagagaggtatgacgaagcagaagaaagattcgatgtgatcaataacgaaacagaagaactaaagtcggaagagaaaaaaatactgaaccagttcttgaaaatcaaaaagaaaaggaaggaactgttcgaaaagacttttgactacgtgagtgaccatttagatgcgatctacagagagctaaccaaaaaccccaattccacggtggagttggccggcggcaatgcctctttgaccattgaagacgaggacgaaccattcaatgcgggcatcaaataccatgccactccacctctgaaaagattcaaggacatggaatacctttctggtggtgagaagaccgtggccgcgctggctctactattcgctatcaactcttaccagccaagtcccttcttcgtcctcgatgaagtggacgcagctctcgacatcaccaacgtccaaagaatcgcagcctacataagaagacaccgcaatccggacctccagttcattgtcatttcgctgaagaacaccatgttcgaaaagtctgacgccctcgttggtgtttacagacagcaacaagaaaactcctccaagaccgtaaccttggacttgagcaactacgccgaatga

SEQ ID NO: 842 - DNA, 648 bp, Saccharomyces pastorianus
atgtcaggtttaagaacggtttcagcttcctccgggaacgggaagagctacgactctattatgaagattttactgattggtgattccggtgttgggaaatcatgtttattggtccgttttgttgaagacaaattcaacccctcattcattaccaccatcggtattgacttcaagataaagaccgttgatatcaacggcaagaaagtaaagttgcaactttgggacactgcgggccaagaacgtttccggaccatcaccacagcatattatcgtggtgctatgggtatcattcttgtttatgatgtaacagacgaaagaactttcaccaacatcaaacaatggttcaagactgtcaatgagcatgcaaacgatgaagcgcaactgctgttggtcggtaacaagagcgatatggataccagagtggtgacagctgatcagggtgaggccttggctaaggagctgggtataccatttattgagtccagtgccaagaacgatgataacgtcaacgaaatcttcttcacattggctaggttgattcaagaaaaaatcgacagcaataaacttgtcggcgttggcaatggtaaagagggaaacattagcatcaatagtgggagtggaaacaattctaaatcgaattgctgttga

SEQ ID NO: 843 - DNA, 1821 bp, Saccharomyces pastorianus
atgtcaaaatcattagaatggaataatctagattattctctacttccctggataaggacaggactggacgttatgggctttgagagcatgactccagttcaagcgtccacaattcccatgctcgctggaaataaagatgtcgtggtagattccgttacaggatccggcaaaaccgcagcgtttgttatacctatattggaaaaaattgtacaagaggaggcaaactcacccaaattcaagaaagcgcactttcattccttaatcattgctccaacaagagaactatcacgtcaaattgaatcagttgttctatcatttctggagcattatccttctgattcattttctattaaatgccagctgttgattggtactaatgaagctacagtcagagacgacgtaagtaattttctacagaatcggcctcagattctaattggaacacccggtagggttttggactttctgcaaatgccggcagtcaaaacgtcagcatgtagtatggtaattttggatgaagcggatagattattggatgtgagtttcatcaaagataccgaaagaattctgagactactacccaagcaaagaagaacgggtctattttccgcaactatgcgtagtgccggctcggatatcttcaagacagggctcaggaatcctgttaggattacagtgaattctaagcaccaagcgccttcctctttgaaattaaattactgtgttgtaaatcctctggaaaaattgcaactactagtcagtgttttgaataattacaagttcaaaaaatgtattgtatacttcccaacatgtgtgtcagtctcttatttctactcatttgttcaatatttagcaaagaaaaagatattgacgagtgaagtagaagtattctcgttgcacgggaagcttcagacatcagcgagaatgaaaactttagcagcttttacagattccctaaataattctgtgctgtttactactgatgtagcagctagaggtatcgatataccggaggtggatttggttattcagctcgatcctccgaccaattcagatatgtttatgcatagatgtggcaggacgggtagagcaaatagggttggtaaagcaataacatttcttaacagaggtagagaagaggattttgttgcttttatgcaagtcaaaaatgtggaacttgaagaggttgattttaaaattaagagtatcacagagaatttttacgatatttttaaggattgggtgcttgaagatcgggatagatttgacaaaggtgttaaagcatacgttgcctttattaaatattatacaaatcattctgcaagttccatttttagacttcaatcgttagattatgttggtattgcaaaaatgtatggtctcttccgtttacctcgaatgcctgagataacgaaatatctaactactgaaaaccaggaaggagttttctcaggaaactggctggtggatcctccgattaatattaatgaatatagatacaaggacaaaaagcgtgaaaaggagaggcaagaagccttgaataatttaagtcttataaatgacaagaagaagttgaaaagtgagttaaaaaagaagaatttagcttggtcagataaaacctcaacaaaagagcgaaaactcgagaggaaggaaaaaatgagttcgaagaggaaggccatagaggaagaactcaaagcagaagaactcatcgaaaatgacgaggagggacatattcaagaggactggaaagagattgtcttgcaaaataagaggaagaaacattccaataatgccactcaaggcagcttcgacgatctttaa

SEQ ID NO: 844 - DNA, 1329 bp, Saccharomyces pastorianus
atgagcagttttcttcaaaaagtaatcaaaaatatgaaagcggtttctgcaggcactaatatgatgggcaagaaggaggactcagtttacatcagctggaccaaggaacaactaatacgaagaatcactgagctagaaaatgcaaataaacaacatcgtaatgagctccaacatattgatgataacaagaagcgcaaacttccacaagaagggatcatcaaaaccaagaccaaaaagactcaaaaaaagtttgattttaccaagcataatactaggtttgttgccttaagatttgcgtacttagggtggaattacaatgggctagctttccaaaaggaatacacacctttacccacgatagagggtgccattctagatgccatgaataagtgtagacttattccatctatggttctacaagattttcaatttagtagatgtggtagaacagataaaggtgtgagtgcaatgaatcaggttatctctttgaaggttcgctctaacttgacggatgatgaacaactagatccggccaacgataacaaggagattccttatgttcaaattttaaatcagttgttacctgacgacatccgtatatcagctgtctgcctcagacctcctcctggttttgatgcaagattcagttgcactagacgacactataaatatgtttttaatggaaggcatcttgacattactaaaatgtctaaagcagcatcatattttcttggagagaatgattttaggaacttctgtaaactagatggctcaaaacagcttaccaaattcaaacgtactatagtgagtgcagagattcttcccgtttctgatactttctactgttttgatctagttggttcagcattcctgtggcaccaagttcgttgtatgatggcgattctcttccttgtcggccaaacgcatgaagaaccagaaattgtcttgtgcctgcttgatattgagaaaacaccccaaaagcccgtttacgatatggcggatgaaatcccattattgttatacgattgcacctttcctccaatggaatggcaagagcctgcaaccgacgatcataaagcgattaagtttacgacggcggctgaggcgttaacattacactatgggttgaaggccactgtttccaacatttttagagatattttgcctacagcagatgctaatatcttcacgaaaaaagtcattaacttaggtgatggaaaaggcagaatcatcggcaaatatgtaaaattgaaagacagagacgtaatgaagtcagttgaagatgttaatgccaagtatcacaaaaaaaaggataaaaaggctaaataa

SEQ ID NO: 845 - DNA, 2520 bp, Saccharomyces pastorianus
atgttgggaacgatacgtggtaatcaggcacatgctaatacccagaaaggtgctaataaaaagttgaacgaacttttggagtcatgtgataatctaccatctgcatcgtctgaattgggttccatccaggtcagtattaatgaattgagaagacgtgttttccaattgaaaaataaaaagaaagtcaccaatgaccataccaaagcccattatttgctggctaacagcggcttgacttttgaggatgttgactcttttatcaaagacttgcaaacaaagcagtttttagagcaaaatgcccccaagaagatcgaaggtgaggagctggagttctatttaaagaccaaaaaggacgagaacattttgatgtccattgaacaacttttaactggcgctacaaaagattttgataattttatcaatcaaaatttgaatcttgattggtctcagcataaggatgaagtgatgaagaattttggtattcttgtacaagataagaagacccttgaccatagagaatctataagttctttggacccaaagcttccaagctggggcagtaaaggcaataacattttgaacagcaacgaatcaagattaaatgtcaatgaaaataatattcttagagaaaaatttgaaaattatgccagaattgtgtttcaacttaacaatagtagacaagcaaatggaagttacgatatagccactgagttcatctcgatattatcttctgcaaatggttcaaaaaacgtccaactactagagagctggagaattctagaatctatgaaaagtaaagatattgatgttgttgaagttggtaaacagtaccttgagcaacagtttctacagtatgctgataatttatataaaaagaatatgaacgaagggttggctactaacatcaataaaattaaatcctttattgataccaagttaaagaaagcagacaagtcttggaagatttccaatttgactgtgataaatggcgtaccaatatgggccttaatattctatttattgagagccggcctgatcaaagaagcattggaggttttagtagacaacaaggctaatgtcaaaaaagtggaacaatcattcttgacttatttcagagcatatgcttcttcaaaggaccatggcttaccggttgaatattccgccaaacttcacaccgaatacaatcaacacatcaaaagttctctagatggcgatccttatcgtttggctgtctataaattaatcgggagatgtgacttaagtagaaaaaacattcctgcagttaccttaagcatcgaagattggttatggatgcatctcatgttaattaaagaaagtgatacagataatgatccgatttatgaaaggtattgtttggaagatttccaaaacattgtaatatcatatgggccatcccgcttctcaaactactatttacaaacactattgttaagtgggctttatggattagcaattgattacgcatatacattcagtgaaatggatgcggtacatttagccatagggttggcaagcttgaagctattcaagattgacagttctacgcgtttggcaaaaaaaacaaagagagatatcaggtttgcaaatatactagctaattacaccaaatcttttagatactcggatccaagagttgctgtggaatatttggttttgatcacactaaatgaaagaccatctgacattgaactatgtcacgaggccctaagagagttagtactagaaactaaggagtttgctgttcttttaggtaaagttggacgtgacggggctagaataccaggggtaattgaagaaagacaacctttgttgcacgttcgagatgaaagggaatttctccatacaattactgaacaagcagcaagaagggctgatgaagacggtaggatatatgacagtatcctgttgtatcaactcgctgaagaatatgatattgttattacacttatcaacagcttactgagtgatacgctcagtgcctcagatttggaccagccgttgattggacccgatgataacagtgaaagcaactctgttttgctggccagaaggatggcttctatatatttcgataatgtcggcatatcgaagcagatccacattagaaataaagaaaattgcatgttgctcttgaacatttccagaattagggagctatattttgacaggcaatggcaagaaacattatcgcaaatggaattattggacttactcccctttacagacgaactgtccgctagaaagaaggcccaggacttttctagtctagacgataatattgtaaagaacattccaaacttgttgattattacgctgaactgtatatcgaatatggttcgtactttgaacggcagcaagtatcaaacttccacaaaaggccagcaaatcgattctttgaaaaatgttgctagacaatgtatgatttatgctggtatgatccaatacagaatgccaagggaaacctacagcactttgatcaatatagatgtctcactatag

SEQ ID NO: 846 - DNA, 468 bp, Saccharomyces pastorianus
atgaatagaaaccaaacgaacatgggatcggaacaacaacagactgcggggtcccggacgataagtgtggaagaggtaccggcagttttgcaactgcgagctacacaagaacctacgagaactcaagaggcaaggtccacgagacacaatgtgagatgggaggaaagtgtggtcgataatgagaatatggataaaaaaaaaaccaagatctgctgtattttccatccgcaggaagaggctgaagaggagtgcaaccatccgtcagatcatgatggatcttcatcttcatcttcgtcatcatcagagtctgaaaatgaaaaggatcttgatttcgacgaacgtagaagaagaagatcggaaagacgccatcgtaaactagagaaaaagagatcatatagccccaacgcctatgaattccaaccagattattctgaatatagacggaagcagcaagaaaagaaggattag

SEQ ID NO: 847 - DNA, 921 bp, Saccharomyces pastorianus
atggagagactacagagattaatgatgaacagcaaggtggggtcagcagacaccggccgtgatgatacaaaggagaccgtttatatctcttcgattgcacttttaaagatgctgaaacatggtagagctggtgttcccatggaagttatggggttgatgttgggtgagtttgttgacgattatactgttaacgttgtggatgtgtttgccatgcctcaatcgggtactggtgtttccgttgaagctgtggacgatgttttccaagctaagatgatggatatgcttaagcaaacgggtagagaccaaatggttgtcgggtggtaccattcacatcctgggttcggttgttggctatcatccgtagatgttaacacccaaaaatccttcgagcaattgaacagcagagccgtagctgtcgttgttgatcctattcaatccgttaaagggaaagtcgtcattgatgcctttaggttgattgacaccggtgcattgataaataatctggaacctagacaaacaacatccaacacaggtctattgaacaaggctaatattcaagctttgattcacggtctgaatagacattattattcattaaatattgattatcacaagaccccacaagagaccaagatgttgatgaatttgcataaagagcaatggcaatccggtttaaagatgtacgattacgaagaaaaggaagagtctaatttggctgcgacaaagagcatggttaagatagccgaacaatactcaaagagaatagaagaggaaaaggaattgagtgaggaggaacttaagacaaggtatgttggtagacaagatccaaagaaacatctttctgaaacggctgatgaaactctggaaaataacattgtttcggtgctgacggcgggcgtgaattcggtggcaatcaaatag

SEQ ID NO: 848 - DNA, 1605 bp, Saccharomyces pastorianus
atgtgtctagaaccaatcaccctcgttgtttcgggatccttgttgttctacttgtgcttcgtgaaatattttagacgtagagagaagttaagagcaaccaccgtagtacaaacagaagatagatacaagtgctgttacagcaaacaagaagaaaaaatgagcgaacttgctgatgttaacgacgtcccaatgaagataaggaaccacaagtatcctgccaaagagcataacttacgagtcaaggatttgctatttgaacgcaattcaaagctatctaaggggtctacggcatttttcattgctggtgaagagttagaaggaaacaagtactgtgacactactagggagtacagacaaaacagatatttctaccatttgtcaggtgttgacattcccgcctctgcgttattattcaactgtaatactgacagactgacgttgtttttgccaaacatcgatgaagaagacgtcatgtggagtggtatgccattgagtttggatgaagccatgaaaacgtttgacgttgatgaagctttatacaggtctgatttggagtcaaaacttcaagacttgcaagaatttaccatttttacgacggatttagacaatattcacgataaggacattgaaaaatatttgaccccatccgattccgattttttttatgccatgaacgaaactagagccattaaagattggtacgaaattgaaaccatcagaaaagcttgtcaaatttcagacaagagtcatttggccgtaatgtctgctttacctattgaactaaatgaactacaaatccaagctgaattcgaataccattccactcgtcaaggtggccgttccctaggatacgatcctatctgttgctctgggccagcatgcggtacattacattacataaagaactctgaagatatcgaaggtaaacattccatcttgattgatgcaggtgcagaatggagacaatatacaagtgatatcacgagatgtttcccaacttcaggcaagttcaccaaagaacatcgcgaagtttatgagaccgttcttgatatgcagaaccaagcaatgagattgatcaaaccaggtgctaattgggacgacttgcatgcattgacacacaaggttcttattgagcatttcttgagcatgggaattttcaagaaagagttctcagtggataaaatcttcaggagcagggcttcttgtgccttttatccccacggcttaggccatatgttggggcttgatgtccacgacgttgccggtaatccaaactatgatgatccagatccaatgtttagatatttgaggatccgccgtactctgaaggaaaatatggttattacgaatgagccgggctgctattttaatgagtttttaataaaggagtttttagaaaaatatccagaaagattggagcttgtcaacatggacatattaaaaaaatacatgtacgtcggcggtgtgagaatcgaagatgatgttcttgtgaccaaagatggctacgaaaacttgactggcataacttctgacccagacgaaatcgaaaaaatcgttcaaaagggtttggagaaaactcgttccggttttcatgttattgtctaa

SEQ ID NO: 849 - DNA, 1062 bp, Saccharomyces pastorianus
atggttgacacacataaactggcagatgaagtgcttcagttattggacaaccgtattgatgacaattacagggtttgtgttgtcctagtcggctctccgggctccggtaagtctaccgttgcagaagaactgtgtcaagtcatatataaaagataccatagcttcctatcggcacatccagacgctatccaaacaagtggggcgttagaaaccgcgcttgatttggcaggctctctcaaaacgctccttccaaatgaaatagctgctctgaatagaaatcaggggttgttcacagatcacgtcgaggatgtcgatttccaaccagtaaagtatccaggttttacatcagataataaggaatgtacgacagtagttggtaggggtggtactgcgaatgcaataaaaattgtggaagttcatgatccaattagttttgatcagtcggccctcgataatattaacatcgcacaaatagttcctatggatggattccatttgtctcgaagatgcttagacttattcgaaaatcctgaggctgcccataaaagaagaggttcgccaccgacttttgacagtaataatttcttgcaattatgtagaattttagccaagacatccctctgcaaggccccttcgtatgataaatcctgcgtaacggcaagtgttttcgaaaaagtatccaagacttttagccaagcggttcctgatatttttatcccagggttcaaccatgccttaaaagatccaactccggaccaatactgcatttcgagatttacaaggatcgttatcttagagggactgtatttactatatgaccaagaaaactggagccaaatctatgaaacactagccaacacaggagccctacttgtctacaagattgacatagactatggggttaccgaagaaagggtagccaaaaggcatctgaaatcaggcttggtgacaactcttcaagagggagaggaaaaatttcgcagtaatgatttgttaaacgccaaggatatagacagacatctcatcaaggttgataccgttgtccacatccgaaatgattag

SEQ ID NO: 850 - DNA, 2259 bp, Saccharomyces pastorianus
atgcctagtatcggttcccaagtgagaaaggctgcagcaagcattgatcctatcgtcactgattatgccgtaggatatttcaatcatttatccggtatcactttcgatgccgttcaaagtaagcaagtcgatttgcccaacgaagtcaagttcgtctctgatttgctggttgatgcaggcgctccaaggagcaaagtggatgaattggcccaaagcatattggagcaattgagtatccaactaaaggaaaatgaggccaaattggaactaactggtgatacatcaaagagactgctagacattaatgtcttgaagagccacaatagtaagtccaacatcaacacctccttgagcatgatgggtgtcaacggtgacattgaacatgctggtagaaatatggaaaccagagtggatttgaaaaaactagccaaggctgaacaaaagatcgccaagaaagtcgccaagagaaataataagtttgttcaatacgaggcttcaaaattgatcgatgacgaaaaggacgaagactacgattccttcttcttgcaaatcaacccactggaattcggttcatccgccggtaaatcaaaagatattcatatcgatactttcgatttgtatgtcggtgatggccaaagaattctttctaatgctcaattgaccctaagtttcggccacagatatggtcttgtgggtcaaaatggtatcggtaaatccactttactaagagccttgtctagaagagaactaaacgttcctaaacacgtttccattctgcatgtggaacaagaacttagaggtgacgagacaaaggccctgcagagtgtcttggatgctgatgtttggagaaaacaactgctaagtgaagaagtcaagatcaatgaaagactaaaggaaatggatactttgagaagcgaattcgaggaagagagtttggaagttaaaaaattggacaatgaaagagaagatttggacaatcatttgatacaaatctccgaaaaattagtcgatatggaatccgacaaggctgaagcgagagccgcttccatattatacggtttgggtttcagtacagaggcacaacaacaacctaccaactcgttctctggtggttggagaatgagattatcactggcaagagccttgttctgtcagccagatctgttgctattagatgaaccttccaatatgttggatgtcccatccattgcatacttgtcagaatacttgaaaacttatccaaacacaatcttgacagtttctcacgatcgtgcatttttgaacgaagtcgctacagacatcatataccaacacaacgaaagattggactactatagaggccaagatttcgattccttttataccacaaaggaggaacgtagaaagaatgctcaacgtgaatacgataaccaaatggcttacagaaagcatttgcaagagtttatcgacaagtatagatacaatgctgccaaatcacaagaagctcaatcaagaatcaaaaaattggaaaaacttcccgttttggaaccaccagaacaggacaaaaccgttgatttcaaattccctgaatgtgataaattatccccacctattattcaactacaagacgttttctttggctataatgaaaacaacctgctattgaaagacgtgaacttggatgttcaaatggattctagaattgcgcttgtgggtgctaacggttgtggtaaaactacattactaaagatcatgatggaacaattaagaccaaccaagggtttcgtatcaagaaacccaaggttgcgtattggttacttcacgcaacatcatgtggactctatggatttgaacacttctgccgtggattggatgtctaattctttcccaggtaagaccgacgaagaatacagacgtcatttgggttcgtttggtatcactggtactttgggtttacaaaaaatgcaactgttgtccggtggtcaaaaatcacgtgtggcgtttgctgccttgtgtctaaacaacccacatatcttggttctggatgaaccttctaaccatttggatactaccggtctagatgccttggtggatgccttgaagaactttaacggtggtgttttgatggtttcccatgatatctccgttattaactctgtctgcaaggagatctgggtctcagaagaaggtaccgtcaagagattcgaaggttctatttacggctatagagattatatcttggaatctgctgatgccgccggtgtcgttaaaaaacattag

SEQ ID NO: 851 - DNA, 258 bp, Saccharomyces pastorianus
atgctcaacgtgaatacgataaccaaatggcttacagaaagcatttgcaagagtttatcgacaagtatagatacaatgctgccaaatcacaagaagctcaatcaagaatcaaaaaattggaaaaacttcccgttttggaaccaccagaacaggacaaaaccgttgatttcaaattccctgaatgtgataaattatccccacctattattcaactacaagacgttttctttggctataatgaaaacaacctgctattga

SEQ ID NO: 852 - DNA, 513 bp, Saccharomyces pastorianus
atgggctcgaatacttccaaagtgggtacaggtgctgaacaacaacaagtatacactccacaaactcagatcgatttttcgcagtccttagtatctcaattggattcatcaaacgaatcagactatgtcaccaaacaaaacgctgagaagttcatcgagaaaaaggtcgctcaaaggctatctgacttagaagtcgaaacactgaagaagttcgagagtactttgaacaattccctattatcggatgatgataaggatgccactgatggagtgtcgtcaagttcattgaatggccagatcgagtctttaaataagaagctaaccttatttgatcaactagagttacagaaattggagaaatacggtggtgccaagagcaagtccgataccaagaaggacaaaggcgatatttctataaaggcaaaattaactgagtgccttttggccaatagaggcaaatcgttgaactgttatgaggagatggaggaattcaaaaaactcgttatgggttga

SEQ ID NO: 853 - DNA, 2424 bp, Saccharomyces pastorianus
atggattcccaacccgattctatccaaaattcgcagcaagaagctcaaggcgattcttccacaccggttgctgacctaaatcatgatcgcatacaattggatacttcttcacaaacagatttgaacgccactacttcgcagtcattggataatttaaggagatcaaggcgtgtcccaaagccaagatcaagtatttatgttgagtatgaggaagaactaaaggagagggctaataaacccaagaggaaaaggcctgcggcttctaagaagaagccatctgcaacacagaaggataagccgagcggtaaagtggagaaaaagaaggctaccacggctgataaggatggtaaacccactttgaaggctaatgacaaaaaagtgatgccgagacctaaacctgcacatgaacaggtagaacctgctttgattcctagcaattggacttcagcaatacccctacttacttcggactttaaaaaccaatacagtgtcatctctaggttgaaaaatccgaatatgaaacctgtcccatatgctggtgatattattaagctgatggcattcataaataagtttagttcattttttgaccacgacttacagaacttatcgttccaagatttcgaagttggtttggatttatatcctggtgatcccaagggaaatgcagcaggtatcgttaggagtcccgatgacacatccttgttgctatatcctgattttatggccatcaaggacatcgtccattgccaagacaagatgaactttctgtttttaaccttgttagatttgacatttgcagagaatttagatagtaagaatgcgaaaaaaaagggccctttgactacttgggataagttaaattcatcttccaaaaaagtgttttctagttctctttatcgattaaggcttgtggcccatgaatgggggtacccacgggaatggcgtcaacatcttcctagtgatcaagacatttccaaaccgagaaccgctcttttcgagcaagatgagcaaactccagtggtggatccaaggcgtccagaaattctaaccccaaatatttatacatggaataaaaatgaaccgcttccattagaatcggatcctctacaaaatcgagaaatggataagaacggtattttggcactcaaaccaatagatcgtattattatgttgagagctttggcagactggtgtgcttctcactctccagctgcccacaatgaaatttacaagctaacacatggtaaaaaagatcctgtctttggcattcaaacccagcaagtgcccaggtattctatcgaaggaattgataataccctcaataattttaaaaggctttgttcattaattcagtcaagatatgaaatcagaagcaagaaaaaacatttcgtcaaacaattaaaagaaggtaaaaaaccggatttgtcaaggaagttggaggttctaaaggaaataaaaacggaaatgaaaaatacggcgaaacccgagaaggatgaagtcttattttcactatatgacaaatgggctcaattatttgaaggagaattgcccgatcaaccactaggtaatccatttgccgaaagactctataaactacgattgcaagaattctttcttggtagaattcctcatataggggatttttatatcccaagattacacagctatggcgaatcattagaaatgagtacgtttactgatctaagaagcttgcaagagctactctcgaaattcaagaacaatgaatacaacgcatttacgttatttgaaaatgacggtcaatcaatgagtgcccaattcaaactcttttaccacgatacgccttctttggcgcatgatgtcgcgcagggtaaaaatacgctggggaaggtttactggtatgaaatgtgtcacgattcagcaacattgttggaattcctggaattcttagactgtaaaattgctaaacctaaagatgaaaagaaggaagaaaaggacggtgaaaaagaaagcgccgtggttaccgaagcaccaccggttgagcagaaaccaaattctactgctgattctaatccctctttaaatacgaatccactaccaaaagatgcaaaatacaactccgcgagaaagaagctacagattttaaaggagtttttgtgtgatttctatttcattcttcgtgaattggagcaaatgaaagtgcaatttgcagatatgaagccaggaaagagacaattgagaaggatgcaacgacaaaatgtgaactataatacagaatatgacagtgaggaatatgtagatgatgaggatgacgagcaaattgaggaagacgacgagcaaattgaggaagacgacgatgatgacgatgatgatgataataatgattatgacgagaatgattctttttcaagtaatggtaaaactaaaagacaacgtacttag

SEQ ID NO: 854 - DNA, 2130 bp, Saccharomyces pastorianus
atggctcgtgacttacaaaaccatcttctattcgaagtagcaacggaagtcgccaacagggttggtggcatttactctgtcttgaaatccaaggccccagttaccgtggctcagtacggagacaactatacgctgatcgggcccttgaacaagtccacgtatgaaggtgaggtcgaaaaactcgactgggaggacgaagaggttttccgcgaggacctattgcccattcaaaggacgttgatgtcgatgcgcgaaaagggtgtgaatttcgtctacggtcgttggttggtggagggagcaccacgtgtcattttgtttgacctggactctgtaagacacctcctgggcgaatggaaggctgatctatggtcccttgtgggaatcccgtctcccgagcacgaccacgaaacaaacgacgctatcttatttggctacgttgttgtgtggtttttgggagaggtatcgaaactggacaacaaacatgcaatcatcggccacttccacgaatggttggccggtgtggccctaccattgtgtcggaagaaaagaattgacgtcgtgacaatttttaccacgcacgctaccttattgggtagatacttgtgtgccgcgggtgatgtggacttttataatcaattacagcttttcgatgtggaccaggaagctggcaaaaggggaatttatcacaggtactgcatcgagcgtgccgccgctcacactgcggacgttttcaccactgtgtcacagatcactgcattcgaagcggagcatttgttgaagaggaagcctgacggtatcttgcccaatgggttgaatgtcgtcaagttccaagccgttcatgagttccaaaacctgcatgcactgaaaaaagagaagatcaatgaattcgttagaggtcatttccatggctgtttcgatttcgatctagacaacaccgtttacttctttatcgctggtagatatgaatacaaaaacaaaggtgccgacatgttcatcgagtccttggctcgtcttaattacagattgaaggtttccgggtctaagaaaactgtggtggcatttttgattatgcctgctaagaccaattctttcactgtggaagcactaaagagccaagctattgtgaaatccttggaaaacacagtcgacgagatcactgcatccattggcaaaagaatattcgagcatacaatgagatatcctcataacggtctagagacagaattgcccactaatctagacgaactattgaaaagttctgaaaaagtgttattgaaaaaaagagttttggcattgagaagacctcacggcgaattacctccagtggtcacacataatatgtgtgatgatgctaacgatccaatcctgaatcaaatcagacacgtcagattattcaacgatccaagcgatcgtgtcaaagtcatattccaccctgagtttttgaacgcaaataatcctattctcggactggattacgatgaattcgttcgtggttgccatttgggtgtcttcccatcctactatgaaccatgggggtacacgccggcagaatgtaccgttatgggggttccctcaatcacaacaaacgtttccgggtttggtgcctatatggaggacttgatcgaaactgatcaggctaaggactacggtatttatatcgtggaccgtcgtttcaaagcccccgatgaatctgtggagcaattagccgactacatggaagaatttgttaacaagactagaagacaaagaattaaccaaagaaacagaaccgagagactatctgatctgttagattggaagagaatggggttggaatacgtcaaggctagacaattgggtcttcgtagagcttacccagaccagttcaaggaattgataggtgaagatattagcgacgccaatatgaatacccttgccggtggtaagaagtttaagattgccagacctctaagtgtacctggatctcccaaggtaagatccaacagtaccgtttacatgactccgggcgacctgggaaccctccaagacgccaacaatgcggatgattactttaatctaagcatgaatggaggcgttgcaggtgatgatgacgacgacgatgacacttctgcatactatgaagataactga

SEQ ID NO: 855 - DNA, 627 bp, Saccharomyces pastorianus
atgccgaacagtcacctgaacgcaccccagctgggcacgtctgcaagctacgccaggtcgcaggacttcctcaacattgacgagccgccctctgcgcaggaaacgcccagcgtttctacgttcaacctcccgggcccaaccacgcccgcccccatgctcagacggcggtccactaactacatggacgcactcagttcccgggcacaagcccgggaacgcgagagcagcatcggcgagcacgctccgatcccgatcccggccccggccccggccccggtctcggagtcttcctcgggagcagtctccgctgctgagcgcaggggcagcggacccatggacttccagaataccatccacaacttgcagtaccaaaccaccaacgactcggacatgagccacgcgggcgtggacatgggcgactccatctcgcacacgccggccagctccggaacaagtgaccagccaatcttcaagagctcgttcctcaacaacggcagcggtaacaacactaggattcctcgcgacgccgccttgcaacccgatccgccacgcaggaagtcgtcctttaagtacgaggacttcaaaaaggacatctacaacaagcttcacatgttcgaggacaagtaa

SEQ ID NO: 856 - DNA, 6948 bp, Saccharomyces pastorianus
atgccatccgaagaggtccgcgaacccgtccacttcccggacggctcgcacgcacgatcgccgccctcaaccgccacgtcctccatacacgccaccgatgttgcgcagccccggccaaactacatcaagaaaccgtccctccacataatgtccacgtccaccacgtccaccaccacggacctggtgaccaacccgatcctgagcaacatctctataccaaagatcagcccgcctgcgtcgttgtcgggcgccagcagtgccagtaccagtgctagcgcgggtaacgtgaccgtggatcgcactgcgcacgccaaggccagctccagtaagaagggcacgcccgcacaggccaccggtagagtgccccccaacgccatcaagaggcaccctagccgcttcaagcccgcgcacgcgctgcagctgcccatcaagaacgactccaacctgaaacggtccagcatctatgcgtccaagtccaccgtcaccgccatccccatcaggaatagccgcccaatgtccatgcagaactcgtacgcacgcaccccagacagcgaccacgatgacggtgacgaggcctcctccataaagagcgcctcttcttcgctgaccgcgtccttgtcgaagagctttctgttcgcgttttacaacaaccgcaagaaggacaagatcgccaacaatggcgtgctctcgaaggagtactggatgaaggacgagagctccaaggactgtttcagctgcggcaagaccttcaacaccttccggaggaaacaccactgcaggatatgcggccagatcttctgcagcaattgcactctcctgatagacggcaaccggttcggctgccacgccaagatgcgggtgtgccacaactgctacgagcacgcagacacgtatgaggactccagcgacgaggagaacgactccgccgtccaattgaacgagccggcctcccgctctcgctcccgctcctcgaactccaattcatattcgcattcgcattcgcacctgcacctcctgtcacaagagacccacatcaacgccgaccaccatcttcaccaccaccaccaccaccaccatcttcatcatgacccggtgacagcagccgccaaccctcagcagcagaacgaggtctacttgttgaacgacgatgacgtgcaaagcatcatgacctcgggcgaggactctaaactgttcatttcgacgccgcccccgccacccaagatggccatcccggccaccaagcaaggcggctcgttggagatctcgttcgactcggaaaacaatagacccctgcatcaccaggacgataaacccgcgcgtcatcatcatcatcatctcgagtccgcattcacgaggtacaccatcagagacatggacaacatgtcgcactacgacgcaaactcaaactctaccctgaggccccactatagcaccaacaacagcaccatcactgtcaataacgccggcaacaccagctccatcaccacccccaacaaccacaacaaccccgcgcattctttgaggagatcactcttccactacgtaagtagcagtagcatcaacaaggacagtgccaatagctctgctagtctcactaaacccgcctcgtccacccaatcctctcctatgctggactctgccaatcgtattatcggaaactatgctcatagaaactacaagtttaaattcaactacaacgccaaggaccgctcgcaacaaaacagcactggcaacaacagcaacgagaacaataacgttatcaatctcaacagcaacaacaacaacaacaacaacaacaacaacaacaacaacaacaacaacaacaacaacaacagcaacagcaacggcaacagcaacggcaacagcaatagcaacaacatcatcatcagtagcagcagtggtggcggtgatggtattgatgacagcagtaataccacctcaaacaacaacagtaccactttcgcacttaacagaaagaaaaaaaatccgttgacaaagtccaaatctacgtccacttatcaggaataccccctgaacgaggaagactcttcggaagacgagggctccatgtccatatactcagtccttaatgacgtccataaaacagataacccaatcagatcgatgaggaattctaccaagtccttccaaagagcgcaggcctcactacagagaatgagatttagaaggaaaagtaaaagcaaacatttctccagtaactccaaaagttccatttacagagaccttaattttttaaccaacagcacgcccaatttactctctgtggtgagtgacgacaatatatacgattgctcttcacctttgcaagacaagggctcttcatcggccatcagcggaagcaatgataggaaatttagcaatgactgcagtagtaacaacaacagcactagtagtagcaatgtgaactctgatccttggaaaaggatcgctagtatatccgggttcaagttgaaaaaggagaagaaaagggagttgaacgaagtgtctcttttgcatatgcatgcactactgaaacaacttttgaacgaccaagagatttctaaccctcaagaatggatcactctgctggatggcgccttgcgtaaagttctaagaacaattttgaatgcaagagagctgaatactctggactacagacaaacgtacgtgaaaataaagagaatcagtgggggttcccctcaaagttcggaatatattgatggggtggtcttttcgaaagcattgccctcaaagaccatgcctcgtattttgaagaatccaaggattctattaatcatgttccccttggaataccaaaagaataacaaccacttcctcagtatagattcggttttcaggcaagagcgtgaatacttggataaactcgtttctaggttgaaatctctaaatccagatattatttacgtcggcgccaatgtaagcgggtatgcgttggaactattaaatgattccagaattgtcgtacagtttaacatgaaaccgcaagtaattgaaagaattgccaaactaaccgaggcagatatcgccatttctgtggataagttggcaaccaatatcaagatgggtgagtgtgaaacattcgaagttaaaagctatatttacggtaatgttagtaagacttacacttttcttcgtggttgcaatccagaactgggcggcacgatcttattgagaggtgacaatctagacaacttaagaaaaatcaaacaggtttctgaatttatggtctacgcaattttttcattgaaattggaaagttcgttttttaacgataattttattcaactttccacagacgtttatttgaaaagaatggaatctaaaaaattgcaaactgtcaaaggttattttgcagatttcttgattaaattcaataatagaattttgactgtgtcaccaacggtggatttccctattcccttccttttagcaaaggccagagggttagaaaataatctactgcaaaggctcaatcaatatgagagtgaagctgatttggatccgcaaactcgactggatatgctacaaggtttggaatccactatcacgaaaaaacatttaggaaacttgataaaatttctgcacgaaacggaaatcgaaactttggagctagaattccaaaaaagaagtcgtcaatgggaagtttcatattcttcatcgtataatttgctcggtactggatcacaccaatccataacggttctttattcaatggtttcgacaaagaccgccacaccttgcgttggccctcaaattgttactattgactatttttgggatagtgatatttccattggacagtttatcgaaaatgtcgtgggcaccgcatggtatccctgtcagcaaggttgtaatggtttgtacctagatcattacagaagttacgttcatggctcagggaaagtggatgtcctgatcgaaaaattccaaaccagattacccaaattaaaagacataattctcacttggagttactgtaagaaatgcgggacgtccactcctattttgcagatcagtgaaaaaacctggaattattcctttggaaaatacttagaggttatgttttggagttacaaagatagtgtggcagggattggaaaatgtccgcatgattttaccaaagatcacgttaagtacttcggctacaatgacttggtagttcggttagagtattccgatttggaggtccatgagttaataacaccaccacgtaaaataaaatggaaacctcatattgatataaaattgaaagtggaattatattataaaattttggaaaagatcaacaatttctatgggagtgttttaaaccgtttggaacgtattaaactggacagtatgagtagagataaagttctaagtggacaggctaaaattgctgaattgaaaaataatgccacagaggagcaaaaactaatgctgcaggacttggatactttctacggcgatagcccttgtgaccaacatttgccactcaacttagttatcaaatctctatacgataaagctgttaactgggactctacgtttgcaatattcgcaaaaagctatttgccttctgaaactgatattagccgtatcacagctaaacaattgaaaaaactattctatgactcttcaagaaaggaaagcgaagacaaaaaatccctttatgatgaaaagatgaagactatcaaacttgaaaggatcgaacccccttctgacgaattaaaagatattgggaaattcaaaacggatgacaaggacgagagtgacaacaccgatacgaagaatgatacgaagaacgagccacagattgaagttatcccagccatttcgaaagatgctatcccaactattccggtaagtggtactaaccatgtgccagttacaccctccgcatcttctatttattcttcttcgacccctcaagcagatgatcgtccgtcaatgaacagaagtggaacaggtacatctgtgacctatgataaaactaataggcctaatttgaggaaaatgagcagtgatagcagtttatttggattagcatcgctcgctaccgaatacagtaaaaataacaaggtaggcaagctagccacatttttcgatcaaatgcatttcgatgctctatccaaggaatttgaactggaacgtgaaagagaaagactacaacttaataaggataaatatcaagccataaggctacagacatcgacaccgatcgtagagatttataaaaacgttaaagacgctgttgatgaaccacttcactctagaagttcgggcaatattgtggcagctccgaatgtaaaaggttcagaagttccaacaggagaacattcccggaacagccactccaatcctcccaatttggatcaaaatttggaaactgaattagagaactctatcagccaatggggagagaatatattaaacccttctgcaaagactcactctactacgcaaacgatccctaagccgatggttagagaaacatcagataatccaaagtcggaaccccttccgcctgtaataacagcaacaactgtcaataaggcgcaatctacgccacaaccagaaaagtcgctattgatgaaaactttaagcaatttctgggctgataggtctgcatatttatggaaacctcttgtttatccaacctacctcacagaacatgtctttactgacagcgacgttatcattcgggaggacgaaccaagctccttgatcgcattttgtctgagcacttcggactatagaaataaaatgacgaatttgaatgctcagcaacaacatcaacaaacagcagaacctgtcacgtctaagttgggagaaaacacgggagggaatgtccaaaatttggatccttctgccaatatttccccatcagtttctcgtacttcccgtaataaaggaaaggattcagagatttcctcggttgccaccggaaaggatggtttgattagctcttacaccattgacggtgcgcatgataaaacaccacaagcatcacaaacacactcacagcccaatcttgatgatcttcaagaattggaaagaaccatgactaaaaagacggccacacatttaagatatcagtttgaagaaggattaagagttatgtcatgtaagatctttttcaccgaacatttcgacgttttcagaaagatttgtgattgtcaagatagctttattcaaagtttatcaagatgtattaaatgggactccaacggtggtaaaagtgggagtgggtttttaaaaactttagatgatagatttatcataaaggagctgtcacacgcagagttagaagcgtttattaagttcgcgccaagttattttgaatatatggcacaagcaatgttccatgatttaccaacaactttggctaaggtgtttggattttatcaaattcaagtgaaaagttctatatcgagctctaaaagttataagatggacgttatcattatggagaatttgttttacgagaagaagacaacgagaatatttgatttgaaaggttctatgagaaatagacatgtcgagcaaacgggcaaagccaacgaagttttattggatgaaaatatggtggagtacatttacgaatcacccatccatgtccgtgaatatgataaaaagcttctgagggcctctgtctggaatgacactttattcttggccaagatgaatgtcatggattactctctagtcattggtattgacaatgaagggtatactttgacggtgggtatcattgatttcataagaacctttacgtgggacaaaaaattagaaagttgggtcaaagaaaaaggcttagttggtggagccagtgtaatcaaacagcctacggttgtaacacctagacaatataagaaacgtttcagggaagcaatggaaaggtatatcctaatggttcctgacccatggtatagagaaggaaattga

SEQ ID NO: 857 - DNA, 1503 bp, Saccharomyces pastorianus
atgtctgattcaacgcccactatcaactttattaattttaatcaaaccggaacatgtatatcccttgggacatcaagagggttcaagatattcaattgtgagccctttggtaaattttactcggaagacagtggtggttatgctatcgtcgagatgcttttctccacgtcgttgttggcccttgttggcataggtgaccaacctgcgctttcgccaaggaggttgcgtataataaatacaaagaaacactccgttatttgtgaggtaacctttccaacgtctatattgagtgtcaagatgaacaaatctcgattggtggtgctcttgcaggagcagatttatatttatgacattaatactatgagattattgcatactatagaaacaaactccaaccaacgtggccttatggccatgtccccttcagtcgctaatagctacttagtgtacccatcgccaccgaaggtaattaactccgaaataaaggcacatgccactacaaataatatcacactatcagtgggtggcaacacagaggctggtttcaagagagatcagcaggacaactgcaacgatgacatcaatgactcggatcagtattcaagttttacaaaaagagatgatgctgacccagcaagcaacaacggcggtaaaagtagcataataaagaatggggacgtgattgtgttcaacttggagactttacaacccacaatggtcatcgaagctcacaagggagaaattgctgcaatggcgactagtttcgatgggacgttaatggccacagcttctgataaaggaaccatcatcagagtgtttgatatcgaaacgggtgctaagatctatcaatttagaagaggtacgtacgcgacaaggatctactccatatcattcagtgaagacaaccactacttggcggttacaggttcctccaaaaccgtgcatatctttaaactggaacactcgatgggcagcaacagattggacagcgatgagagcaacatggaagaagtcacagctgatgactcgtcgttggacactaacagtttcgacgcattaagtgacgaggaaaactcaacaagactggcaagagaaccgtacgtggacgcgtcaagaaagacgatgggtcggatgatacgctactcttctcagaagctatcccgaagagccgccagaacactgggacaaatcttccccatcaaagtcacctcactcttggaatcctcgcggcatttcgcgtctttgaaactccccattgagacgaattcccatgtgatgaccatatctagtataggctctcctatagatatagacacgtcagaatacccggaacttttcgaaacaggcagttccgtaggtacagagccccatcgcgaccccataatgaagatgattcccatcagagttgtttcgtcggacggttacctgtacaacttcgtcatggaccccgaaagaggcggtgattgcttaatactttcgcaatactctattttgatggattaa

SEQ ID NO: 858 - DNA, 2175 bp, Saccharomyces pastorianus
atgggcttcagtaatagtaaatcaggcaagaagcctctgcttttcgatatcagactaaaagatgttgataacgacgtaattctactgaagggtccaccagacgaggccccgtcagtgcttctatcaggttgtatcgtattatccattaatgagcccatgcacattaaaagcatatcattgagactgtttggaaggatacaaattgatgtcccattggaaaaccatcaggatttgaaggctttgtcttcatcttcaccaccaccaaggatcagaaagtataacaaggtcttttacaaccatacatgggacaacgttaacctccaagactatcttagtggttcaaggggacaagcaggtctcgcgggtagcaactcatcaagtaatatcttaaacattaatcaaagagctcagtcctcaagctctttgaaatctttaaagggatcctcgacgccctcctcgcacactttgggcaaggggaactatgatttcccatttagcgctattttgcctggttcgttgccggaaagtgtagaatctttaccaaattgctttgtgacatatagcatggaatcggtcattgagcgtaccaggcactatagcgatttgacttgtaggaaaaatattcgaattttaagaaccatttcacctgccgcggtagaattatcagaaactgtctgtgtagataattcatggcccaataaagttgattattctatttcggtgcctaacaaagccatagctatcggttcagcaaccccgattaatatctctattgtacctctttcgaaaggtataaaattggggcccattaaagtcgtattattggaaaactatcaatattgtgatccgtttccccctgtgacatctgcaagtagacaagtaacagatttaactcttgaaaatcccttaaatgaatcgtctgaagacttcaatgtggacggtcgctacataaataaccctttttatgaggctgatcattcgttccaggataaatgggaagttgatacatttttacagattccaaacagtttattaaattgtgttcaagattgcgatgttcgttcaaatattaaagttcgtcacaagcttaaattttttatcatgctgattaacccggatggtcatcaatctgaattaagagcatccttacccattcaactttttatttcgccatttgtagcactttccatcaagccggtatcatcatccaatttatattcatttactggcgcaatcaaccaagatgaaaatctgcaaaacggagatgaagaggagtacttattctcgagatctggatcagccacagggctggaattgatggcagaaatgcgtaatggtactgcagtccccaccgtttcagacttaatgacacctccaaactatgaaatgcatgtatatgatcgtctttatggcagttcttccaatctaacgcacgctgaaacaccagagacatgtactccattagaaagcgaatgttcagcttctgatgatcagcaagatctagaagatctacggataagactgaccaaaatcagaaaccaacgtgagaatttggggctacctgcatctgcttcatctgctgctgtttccagatcattatcgccgttattaaatgtcccggtacaagaagacgggacagatggaagttcacctcagaacacttctagcctcaacaacagtttaacttcaggaatacatagtaacgtatcacccgttttgctttcaagatcacgagctggtagtactctagctaatgacgtgctaccagtacctccgagcttgaattatctggagactcaaaatttgaacaaagtcccatcgtatggtaaggcaatgaagtatgacattattggtgaagacttacctcccacttatttctgttcgatacaaaacgtgcaacctagaaaacctagtagagtgcattctagaacttcattggcaacactatcatcttccatcccaactagtttccattcttccagttttaggagtggcactgcttcccctatctcgataatcaatggctccaggtgtagttctagtggaacatctcttaatacgcttggtgaatcaacagtatcgggtagtagctttaaaagatcaccttcaaggcagaggtctagatctttagctgggttcatggggggacttctctcgaagggtaataaacggtaa

SEQ ID NO: 859 - DNA, 1845 bp, Saccharomyces pastorianus
atgtattctatctcaaacaaaaaaccctccatactaagtatggttcccttaaatattctgaaaaaccatgatataaaattgaaaaaagatcaagagaaaaagatatcttttaacccggtggtcactcccataaggtcggatgactaccacgacaaaacttccagatcttcaagttcaagtcattctgattcacctgaatttttgagaatcaacaacaacaaatctagttacaaagacggggatttgaaggtttttgaaagtaaaaaattggttccactcttcattggtgaccttcatgaaactgttactgaagaaactctaaaagatgtttttggaaaattcccatcttttgtttctgccaaggtgtgtcttgactcggtaactaagaaatcattgggccatggttatttaaattttgaagataaagaagaggctggaaaagccatggaagaactgaactacactgaagttaatggaaaagaaattaggattatgccatcactaagaaatacaacgtttaggaaaaattttggtactaatgtgtttttctccaatttgcccttaaataatcctcaattaacaaccagagcattttatgatacgttttcgagatatgggaaaatattatcctgtaagttagactcgaggaaagatatagggttcgtgtattttgaggacgaaaaaaccgcaagaaatgtgattaaaatgtacaataatacaaatttttttggaaaaaagattttgtgtggaatacattttgataaagaggtcagaagtgttccaaattttgaaacacagaagtcacgattggattcggaaacaatcatcgagaaggagcaagccttgaacgataaacaatcaaaacgtaataacggtgaatctaagagtaacctgccatcatctcaaaactccatctttatcaaaaacttgccaataataaccacaagagatgatattttgaatttctttagtgaagtaggtccaataaagtcaatttatttatctaacgctactaaagtaaaatatctctgggcttttgttacgtacaaaagcgatgatgactctgaaaaggcaattaaacgatacaataacttttacttcagaggcaaaaaactcttagtgagtagagcccaaaataaggaggaaagagccaaatttatagagtcccaaaaaatgtccacacttttcctggaaaacttgagcgctgtttgcaacaaagaatttcttaaatatctgtgtcatcaagaaaatatcaggcctttcaagattcaaatagatggctacagtgaaaacacttccgcttattctgggtacattaaattcaagaattttgaagaagctacaagaatattcaattttttgaataaccgtttagtaggagggagcatcgttataacatcctgggaaagacaaactaatacatcgaagcagtatcacgatgattacgggatccggaataaactttctccttcccacccacaagttaccccatactaccattattcacaaaccagcgatttgaactcctcacagtatgctgcgagagctccttcatcaatgagtaacattacaagatcactgatgaaaaataaaaatttcaacaagaaagttctggaaacgttcgaaaaacaagtgagaagaggaatagatttcatgagatttccaagtgcaactagagaggaaaacatacacggaatatctgagtatatttttgacacttattggaatcgagatattttagtcctggataaatttttatcattattaaagagcagtccctatcacgaaggtgttttgcaaaaacaaattgaagaagcagcaagctcgttgggatttaaaagataa

SEQ ID NO: 860 - DNA, 1008 bp, Saccharomyces pastorianus
atgcattcacaccattcccattccggtgactactgtgcccatggcgcagaccctctgaattccatgattgaccgagtggtccaattgggcttccacacatactgcctcacagagcacattccaagacttgagtccaagttcatatacccggaagagttggaactaggcgatacttccgatgagatcataaccagtctagaaacatcattcaagaattttttgagtcatgcacgagaaattaaggctcgttatgctgctacgccagaagttcgaactagattcattatcgggacagagatcgagagctgtgacatggaccatatcaagtacgccaaaagggtgatgacggagaacagtggcatcctgcagttttgcgtgggttcggttcaccacgttaacgggatccccattgactttgatcaagagcaatggcacaattcgttgcattccctcaatgacaactttagacttttcttgctgtcttacttccattcgcagtatgaaatgctcaccaacgtcaagcctttggtcgtgggccatttcgacctgttcaagttgtttctacccagtggcatgctggtggatcctaaaacgggtctatgcgacaaagaagccggagttccaattgcctcgttagacgtcatcaaccaatggccggacgtatacgacgcagtggtaagaaatttacaatttatagactcctatggtggcaccattgagatcaacacatccgccctaaggaagggtctcgaggagccgtatcctggtaaggccgtttgcgacctggtcaagaagcattgtggatccagatttgttctaagcgatgacgcacatggcgtggcgcaggtgggcgtgtgttacggcaaggtgaagaagtacatagtagatgttctgcagcttaaatacctctactatctggaagagggtgtaccaccgcagaaagtgccatctgtaaggaaactacccatctcgcaattcgttaacgatcccttttgggcgaatatttaa

SEQ ID NO: 861 - DNA, 843 bp, Saccharomyces pastorianus
atgaaagcaaagaaatctcaaagaaaaacaggcaaaaaacagaaccttatccagtctacattgcaggtcaatggcggttcaaaatcaaataaactggtcaagtgtgataaatgtgagatgtcatattcctccacgtcaatagaagatcgtgccatccacgaaaaataccacgcattacaactgcatggacgtaaatggtcaccgaattggggctctatagcatacacgaagcgggaccactcgagtacgatgcatttatcaagatcaatggggacgatgactccattgaactcctcgcctttaaaaaatggctcgtctattgtccaccaggaggagaagattgtgtctgtgagaccagataaatccaacggcgaagttcgagccatgatggagataatgacgctagtgaacaatgagcttaatgcgccacacgatgagaatgacatttggaacagtaccacagaagagaaaggtaaggcatttgtatacataaggaatgacagggcgattggaatagtaattatagagaatctgcatggaggcaatggcaaagcatccgatcgtggacgctggatggtctatgattctaggagattggtacagaacgtgtaccctgattttaagattggcatatcgaggatctgggtgtgtaggacagcacgaaaccttgggatcgcgaccaaattaatcgatatcgccagggaaaatattatttatggcgaagttgtccccagaagccaggtggcatggtcacaacccactgatagcggcgggaagctggctagtaaatataatggtatgatgcacaagtcgggcaagttactactgccggtatatatatga

SEQ ID NO: 862 - DNA, 1659 bp, Saccharomyces pastorianus
atgcgcaagagtgtatatctcgacaacactatcgagtttctacgaggtagggtgtacctaggtgcctacgactatacgccagaagatactgatgagttagtgttctttaccgtggaggatgcgattttttataatagcttccacttggatttcggtcccatgaacatcggccatctgtatcgttttgccgttattttccatgagatcttgaacgatcctgaaaatgctaataaagccgtggttttctactcttctgcatctaccaggcagcgtgctaacgccgcatgtctgctttgctgctacatgatccttgtgcaggcatggactccgcaccaagtgcttcagcccttggcgcaggtggaccctcccttcatgccatttagagatgccggctattccaatgcggatttcgaaataaccatccaggatgtggtttatggtgtttggagggccaaggagaaaagcttgattgatttgcattcgtttaatctggaaagttatgagaaatacgaacacgtggagtatggtgactttaatgtcttgactccggatttcattgcatttgcgtctccacaagaggaccacacaaaaggccatgtggccaccaagtcgtcccatttgaatcagccatttagatccgtcttgaattttttcgctaataatgatgtccaattggtggtaaggttgaattcgcatctatacaacaaaaagcattttgaagacatcggcattcagcatctggacttgatatttgaagacggtacttgcccagacctgtccatcgtcaaaaactttgttggtgctgctgagacaataatcaaaagaggcgggaaaattgccgtgcattgtaaagctgggttgggcagaaccggctgtttgattggtgctcatttgatatacacctacggattcaccgccaatgagtgtattggatttttaaggtttgtaagaccgggcatggtagtcgggcctcaacagcattggttatacttacaccaaaacgacttcagagaatggaagtatacgactagaatttctttgaagcctagtgaggctattggtggactttaccccttaataaatctagaagaatatcgtttacaaaagaaaaaactcaaggatgacaaaaaagttgctcaaaataatattgaaggtgatttaagagatttgacaatgacgccgccacctaacagccatggagcgcttaataccagaaattcgagccaaccttcaacagcgaatagcggcagtaatgcatttaaaagtttgggtgtgccacagacttcgcctggtcagccgagaaagggccagaacggttctaatactatagaagatatcaacaataacaacaatatgacttctcatgccggcaggaaagcagtaatagaaagcaataactcggatgatgaatccatgcacgataccaatagcataagcaataattactctaagagtccacgcagaagaaacgacatcttgtctgcttcatcgtcccgaatggaagataatgaaatcaacgcaacgaacaacatcaacaatgcggcggatgataccatactaagacagctattgcccaagaatagaagagtaacgtcagggaaaaggacaacgagcgccgcaggtggtataagaaagataagtgcttccatcaaaaaataa

SEQ ID NO: 863 - DNA, 2031 bp, Saccharomyces pastorianus
atgcacactcattcacacatgtgggagcatgagacggacatactgagggtgctcgacgatatagagcacgacctgtttctaccgcaacggctctcgcgtgatgctgctgacgttgacgagtcgcacgtccaatacggtatagttaaagactgttcagtactcacatgtgggtgctgcgtatctgagtcgctgtttcatacactgtgcgatgcggctccgaacaagcaagtcatttgtcccgtttgccattgtggagacgttaagctgctctctgccatcaagccattgcggcagttggctcgacagattgatttcttcaggagtactgttgcacaggctgaaaccgagagtgaggagtttccggctatggcaaaggcatcgttttcttcgtcgtcactatcgctgtcacgatcgccgtcttcctcttcccctggatccgaaaccgataacaagacgctttctagtatgacgacaaaggagaaatcatcattgctacagattttccacattgtggcctcgaagatacacaatttaaatacagaggagaaatcggaccaaccgctcactgcgggaaagccccaagaacaagaagaacacaccgtaaaggagaactacacaagcagcctactcgagcctgcctatgacgaccgcacgaactggaaggtactggataacgtttccaacacgaggacggtgccaatagacaacaactcctccttggtgtctgcagacgttactataccctccacagcgacctaccaggcaaacagcacgcatgatctggacgaagaaagggaatacttctttgccaactgctttcctatgtacaggaagagattccagttcaatacgcataccaagtttctcgggaccaaatccaaactgtttatcaaccagactatttcccctgactgcaccaaattcgccttgatcaccgaacacaagtgggaaatatactcgatcaatccgaaggacaactctccccagcttatatcgtgtggcaagtccagcggagagtatgggcccgactttaaccaactgaccgagcccacacagttaccagtcaccgctcctcaatcgtcgaagaagaagaagaaaaactggagccagcgattttgcaaactgtccaatgacttcctgataatatcgggctcgcataatattctcaatattcacgacatcaaccaaagcggcaaactgatatatacatacgtctcaaacttccccatccggtgcatagacatcgaccctcggtcgcagataatagcgtacgggattacagggaaagataggcacacgggtgcagagcaagcattaatagtaattcaacagatcaccagaaacaaagtcacccaagagcccgagtttcctccgccgatcacaataacactcccttacagggaccccatcaataccatacaactgtcgcacgatgccaagtacctgacgtgctccaccgcattggagtctcgcttcttgatcatctccctccagaaaacaaacgaaccaagactgataatgaaaagcgtccggtccattgacacgtcgttggaatcagaaggaatcaccgatacaaaactcttcccggggaacccgaacctgatgtgtatcacgtctacagcattcaactcgtcccccctggtgataaacaccaagattacccaaatcaacggcgtacggacagtggcccagccgtccatgctgatcagagtggacgaaatcggatgcaagatccacaagtgcgaaatctctccaagaaacgacgctatcgcctttctcgaccgcaatgggtccgtctacattatgtgtgcgcccaccatgatggacaacaacgagaagagaagaaccattcttgttgaaaccgtcgccaacgcctacagagcctacgaatcggccatcttgcggttcaacccggaaggcaacaagctatacatcctggacagaaagggggccttcttcgtggaggactttgcgtttggcctgccccagtcgcgtgagatcaccaagtgtaagcaaatatactacaagtaa

SEQ ID NO: 864 - DNA, 3108 bp, Saccharomyces pastorianus
atgtcggtcgagtttgctacgaatccatttggccagaccaaaaacgcaaccgagttgcccagctacgggacacccgtaactgcaatctcctccgtattgttcaataacgtggactctatatttgcctacaagtccttttctcaagctgacttgttgcaccaagacttgaaaaaatggtcactgcagaatagtaacgggtcacgtggcaagacattcttccaagagctagatattagatctggcgctgggttaacccccttgggattctctcacggattgaacaataccactgcgattgttgctcccgggtttgcgctaccatatttcattaactctttgcagactgtcccacatgctggtaagtttattttaaatgttggtgccttgaactacgacaacaccagcggttctgtcaccaacgactacgtcacagcattggacgctgcttccaagcttaactatggtgttgtgaccccaatttcaaccaacgaggtgcaaaacgtcgctctgctagcgttggcggttgccactttcagtaaccgttcgggtgccatcaatttatttgatgggctgaattactcaaagaccgtagtaccattggttgaaactgctgcagaatcctccattttgggaaagttgtccaaagtcattgctccaaacgctgcgtttgatgatgtcttggacaagtttaatgaattatcagggttgagactacataattttcaatatttcggcgcccaagatgctgagactgtctttgtcacctatgggtctttggaatctgaattattcaactccataattagtggtaacaatgctaaaatagggttaatcaacgttagagtgccattacccttcaacgtggctaaatttgtgacccatgtcccatccacaaccaaacagatcgttaccattggtcaaactttagatggctcttcaccttcttttttaagatctcaagtctctgccgctttgttctatcacggccgcaaaagtatctgtgtatctgaatacatttaccaaccaaatttcatctggtctccaagtgctgtcaagtcaattgtttcttcattcatccccaacctaactttcgacaccgattcgtcatctagtgaagggttcatttattgggcttctgataaaagtgccaatattgatgttgcttcaaaattggtaaaagctttatctttggaggatggaaaatatgtatctcttagaaccaaattcgacaatctggccaacgccggtactttccaagctcaattcgttacctctggcgaacaggttaccacttcaaacatcgatattacaaagttggccattgtggaaaatattagtttactgaaacatttggatgtggttactaccgtcgaagaacaaggttccattgccttaatttctcaaacaacaaccaaagatttggatttggactcagtagaatcttatgttaagaaactgggaattccagaatcatttttgatttctgttgcaaagaaaaacatcaagctgtttatcatcgatgctgaagctattaacgatgaatccaaattatctttgttgattcaagccgttttctggaagctagctttcgatcttgatgtggcagaatctacgaaccgtatctggaaaagcattgatgcagatgccgacatttctgctgcttctatctctgaattcatcactgctgcgttgaaagactccattaaggaagttccatcaactgcctacattggattttctgaaatcaccattgaaaagaaagatgaagacgaagaacccgttgctttgccaatctttgtcaatgaaacatcttttgttccaaacaaaagtagtattgaagagatcccactagcccaaacatctgaagtatctgatattgctaagaaattgtcgttcaaagaagcctacggagtggaaaacaaactgagacctgacttaccagttaagaacttcgttgtcaaggttaaagaaaacagacgtgtcacaccggctgattatgatagatatatcttccacattgaatttgacatttctggtactggtatgacttacgacattggtgaagcccttggtattcacgcaagaaacaacgaagctttggtaaaagaatttttaaaatcttatggcttaaatgaaaccgaaattgtttcggttcctaacaaggacaaccatcatttcttggaaacaagaacagttttgcaagccttcgtcgagaacttggatattttcgggaaaccaccaaagagattttacgaatcattgatcccatacgccactaatgaagatgacaagaaaaaattacaagacttggtcactcccgcgggtgcggttgatctgaaaagatttcaagatgtggaatactttacatatgctgatatcttcgaattattcccatctgttcgcccatctcttgaagagcttgttaccattatcgaaccattgaaaagaagagagtattctattgcctcttctcaaaaggtgcatccaaatgaagttcacctgttgattgttgtcgtcgattggctggataacaagggtagaaagagatacggtcaagcttctaagtatatctcagacttggctatcggatcagaattggtggttagtgtcaaaccatctgttatgaaactacctccatctccaaaacaaccagttattatgagtggtttgggtactggtttggccccatttaaagcaatcgttgaagagaaattatggcaaaagcaacaaggtcatgaaattggtgaagtcttcttatacttgggttcaagacataaaagagaagaatatttatatggtgaaatatgggaagcttacaaagacgccggtatcatcacccatatcggtgctgcattctcaagagatcaacctcaaaagatttatatccaagatcgtatcaaagaaaacttagatcaactaaagactgcaatgatcgataacgtaggttccttttacttatgtggtcctacttggccagttccagacattactcaagctttgcaagacattttatctaaagatgctaaagaaaggggtgtcaagattgatttggatgccgcaattgaagacttaaaggaagcttcaaggtacattttggaagtctactaa

SEQ ID NO: 865 - DNA, 3513 bp, Saccharomyces pastorianus
atgaaggtggaggaactgattatcgatggtttcaaatcatacgctacaagaacggtcattaccgactgggaccctcaattcaatgccattacgggtttgaatgggtctggtaagtcgaacatcctggacgctatttgctttgttctgggtatcgcatcgatgactacggtgagagcatcgagtttgcaagatttgatctataaacgtggccaggctggtgtaacaaaggcaagtgtaaccattgtttttgataataccgataagtcaaactctccaattggattcacaaactctccccaaatatctgttaccaggcaagtggttcttggtggaacttccaaatatttgataaacggtcatagagcacctcaacaatctgttttgcaattgttccaatccgtgcaattgaatatcaataatccaaactttttgattatgcaaggtaaaattacaaaagttttgaacatgaagcctacggaaattctgtctttgattgaagaagctgccggtaccaaaatgtttgaagatcgtagagagaaagctgaaaggacaatgtctaaaaaggaaactaaattacaagaaaatagaactcttttgactgaggagattgagcctaaactggaaaaacttcgaaatgaaaagaggatgtttttggaattccaatctacgcaaaccgatttagagaagaccgaaaggatcgtgtcatcttgtgactactataatattaagcataagcatacctccataaaagaaaccttggagaatggtgaggcacatatgaaggaattgaatgagtttattcaaaagacctcccaggaaattgaaagtttaaacgaagacgtcaaagaaatcaagcttcaaaaacaaaatgaattgcacaaggatggtaagatttccaaattggaaactgaggaaagtactcttttgaatgagatttctcgtttgaaaacctcattatcaataaaaggagaaagtttaaatgacaccactgaaaagctgaaagccttggaactcgaaattgcaaattcttctgcaagacttaatgaaaaaagaattgaatataccaagaccgaggaagattataaaactgtacaggaaggactgagtaaacaaagggagctttacaaaaagaaagaagaattagtgtccactttaaccacagggatttcatccactggtgctgcagatggtggttacaatgcgcaattgattaaggcaaagtcaggattgagcgacgtctccttggcgataaacaaatcgaacatgaaaatggatttgctgaagagagaactatcagttattgtacccaaattaaatcaagctacaaaggacaacgagctgaatatcaagcatgtcaaagagtgccaagataactgcaataaattacaagcgcaactgaccgagtatgggtttgacccatcgcgaattaaggatttgaagcaaaaggagaatgaattaaagagtcaatactaccaaatatctaatgactctgaatatctgaaaaggcgtgtggcgaatctagaattcaattataccacaccttaccccgattttaaatccaacctggtttatggtgtggtgggtcaactctttgaattagatgatgataagattcgttactccaccgctctacaaacgtgtgctgggggtagacttttcaatgttgttgttcaagattctcaaacggctactcaactgttggaaaaaggaaggctgcgcaagcgtgtgactattatacctctaaacaagatttccactagacctataagtccacaagtgctcgagctggccaagaaaattgctcctggtaaagtggaactagctataaacttgataagatttgatacgtccgtcactaaggcaatggaatttatttttgggaatagtctaatttgtgaagatcctgagacagcgaaaaaaatcactttccatcccaaaattcgtgctagaagtattactcttcaaggtgatgtatacgatccagaaggtacgttatccggtggtagtagaaatacttctgactccttgttggttgatattcaaaaatacaatcaagttcaaagaaaaattgaaattattcaagccgaccttaaccacgtaacagaagaattacaaaaacaatacactacttcgcaaaaaacaaaaactattcaaaacgatttgaatgcttcatcgcataaactggatttggcaaagcgtaatttagaagtaaacccttcctctcaaataatggctagaaatgaagaaattctcagggaaattggagaatgtgaaaatgaaataaaaaataggcaaatggatttggaacggtgccgacaagaagtattaagtattgaaaaagacatgaaggaatacgataacgataagggatcaaaattgaatgaactgaaaaatgaattaaaagtgttggctaaaaatttggaaaagcaagaatcagaatcggaaggtaaatatgatttgttccaaaatctagaattggagacagagcagttaagttcagaactagactctaataaaactttattgcaaaattatttgcaatctattgaaaatttaaaatcagaaaatatcgaattagaggagaaaatacgaagtattgaagataatctagcaacaacccaggcaaacctaaacgaagaaaagaaaaggttgatgaatattgatgatgaactaaccgaactagaaacattaatgaagaagaaacaggaaaaaaagaaaagcagtgagttggaattacaaaaattgagtcatgatttgaataaatataagtccaatacggataatatcgagaagaaaattgaagaactacgacagaaacacgagtttttggaggattttgatttagtgacaagcatcgtaaaacaaaatgaaggtattgatttagaaacttacagggagagaagtaaacaattgaacgagaaatttcaagagctaagaaaaaaagttaatccgaatatcatgaatatgattgaaaatgtagagaaaaaggaagcagcattaaaaacaatgatcaaaactatcgaaaaggataagatgaaaattcaagaaactatatccaagttaaatgaatacaagagggagactttaattaaaacttgggaaaaggtgacactcgattttggtaatatttttgccgatcttttaccaaactcattcgccaaattggttccttgcaaagataaagatgtcacgcaaggtctagaagttaaagtgaagcttggtagtatatggaaggatagtttaatagaactatcaggtggacaacgatctctgattgccttagcattgattatggcattattacaattcagaccagcgccgatgtatatcttagatgaggttgacgctgctcttgatttaagtcatacccaaaacataggtcacttaatcaagacaaggttcaaaggatcgcaattcatagtcgtttctctaaaggagggtatgtttaccaatgctaatagggtttttaggactagatttcaagatggtacttctgtagttagtataatgtga

SEQ ID NO: 866 - DNA, 180 bp, Saccharomyces pastorianus
atggctaagtctaagaaccataccgctcacaaccaaaccaagaaggctcacagaaacggtatcaagaagccaaagacctacaagtatccttctttgaagggtgttgatccaaagtttagaagaaaccacaagcacgccctacacggtactgctaaggccttggctgctgccaagaaataa

SEQ ID NO: 867 - DNA, 441 bp, Saccharomyces pastorianus
atgggcgtgttggaacttgctggtgaatactgggaacagttgaaggagaccgttttgcccgtcgtggccgcggctgaggatgatgacaacgaacagcatgaggaagaagggggagaggaaaaagaagatgaagataagggagacgaagaagaagatgaagatgaagatgaagatgacgatgaggacgacgatgaggacgacgaggatgaggaggccgtcaccgatcaattggaagatctgagagaacacttcaagaacacggaagagggaaaagtgctcgtacaccactacgaagagtgcgccgagcgtgtcaaggtacagcagcaacagcccggctaccaggacctcgaccacaaggaggactgtgtggaggagtttttccacctgcagcactacttggacacgtgcacatcccccagactgtttgacaagctgaagtag

SEQ ID NO: 868 - DNA, 360 bp, Saccharomyces pastorianus
atgatcagaagggcccccactactctgcagctcagccaggacgatgtgtcttccctggtcgatgatctcaacgagcagaaactcaaacaacaactaaatatcgaaaagatgaagttcttccaaagcaaaaacagcaactctctacgctccaacacggacgtccaagacgtatcacaaaacgttgtcgacgacgacgatgacaacgacgacgacgacgacgatatggcttcttgcaacgacaaaacggcctccgttgcacacaacaggatcctatcctctctgcatctgtctaccgacaacaataccgcccacgaaacgtcgaacacaaacgacaaccccttctacatccgcgaggaataa

SEQ ID NO: 869 - DNA, 1674 bp, Saccharomyces pastorianus
atgagcgacacagagaaggatacggacgttcccatggtggactcgcgcgaagcgaccgaggaaccagcgacaacaaccgtgacaacgccatctttcccgcacctgcaacaggaacaggccaaagaggagtcagcctctttgggagtggaagtggctcataagaaggtaaactacgagcaggaggcacagaaacttgaggaaaaggctttaaggttcttggccaagcagacacatccggtgattattccctcgtttgcctcttggttcgatatttcgaagacccacgagattgaaaaaaggtccaatccggacttcttcaacgactcatcgagattcaagacgcccaaggcgtataaggacacaaggaattttattatcaatacatatcgtctttcaccatacgagtatttgaccattaccgccgtgagaagaaatgtagccatggacgttgcctcgatagtgaagatccatgcgtttttggaaaagtggggattaatcaattaccagattgacccgaggaccaagcctagtcttatcgggccaagttttaccggccacttccaagtggtgctggacactccgcaaggtttaaagccgttcttgccagaaaatgtgatcaagcagaaagttgaagaagaaggcgaagacgagccacacgtcaagaaggagttccccgtgaacctttcgattaaaaagaatgtttacgattctgcgcaagacttcaatgcattacaagatgagagtagaaactcgagacagatccataaggtttacatttgccacacgtgtggtaacgaatcgatcaacgtgcgctaccacaatctgcgtgcccgtgacacgaatctatgttctcgctgtttccaagagggccacttcggcgcgaatttccaatcgtcggatttcatcagattggagaatggcggaactgccatcaagaagcactggtcggaccaagaaatgcttttgttgctagagggtattgaaatgtacgaagatcagtgggaaaagatcgctgaccacgtgggtggccacaagcgcgtggaggactgtattgagaagtttttgagtttgccaatcgaagacagctatattcacgaggtggttggctcgcaactaaataacaagagcgaccacagcagtggcgcgtctgggtccaaactgatggggtgtgtgaacgatgcggtcgttgcgttgttgcaaggtaacgacaaactggataaggtttctgacaagtctaaggagatctcgcagaagtacattcaggaaagtcaggtgataattcaagagctggtgaaattgaccatggacaaactggagaacaagttcacgaagctgtgtgatctggagacgcaactggagctggaaaagctgaaatacgtgaaggagtccgaaaagatgctaaacgaccggttatcgttgagcaagcagatcctggacgttaacaagtcgctggaggagctgaacgtgtcgaaaaaactggtactgatctcggagcaagtagactcaggcatacagctggtggagaaggaccaggagggcggccacgaagacggcaacacggtcacgggacatggcgtgaagcgtgtgggcgaagaggatgagggcaacgaggcgggcgagggcgactctattgcccagctgcagccccaggtgtacaagccttggtcgttgtaa

SEQ ID NO: 870 - DNA, 888 bp, Saccharomyces pastorianus
atgaacgggtatctaaaaccgacactgctagtactaggattggtgtctctggcgtatgctttcaccactattgaaacagagatttttcaattacaaaacgaaataaatacgaaatatggctcagaaatgaacttctataaatttttgaagttacctaaactacagaaatcgagtgcaaaggagatcaccaagaatttaagaaggctgtccaagaaataccatccagataaaaatcctaagtatcgcaaattatacgagagattgaacttggctacccaaattctttccaatggttccaatcgtaaaatttatgattattatttacaaaacgggtttcccaactatgattttcacaaaggtgggttttattttaccagggtcaagcccaagacgtggtttatattggctttcatatggatagtcatcaacattggacaatatatcatttctattatacaatatcgttctcaaagatcaagaatcgaaaactttatcagtcaatgtaagcaacaagacgataccaatggactaggtattaaacaattgtcgttcaagcaaaacgaagaggacgaggggaaaaacttggttgtgaggtttagtgatgtctacgttatagagcctgatggaaatgaaacattgatctctccagacactttaaacaagccttcattgaagaactgttggttttggaaaatacctgcctcggtatggaacgttactttgggtagatttattggcactaccgtggaagaagaaatattaaaaaatgtaaaaaagactgacggtgaccaaacaaagaaggtaagcaaggtaaaaaagacctctgtgaagaagggccaaaaaaaaatggaactgcctaacggtaagacaatttactcacgcaagtaa

SEQ ID NO: 871 - DNA, 603 bp, Saccharomyces pastorianus
atggcaggtattcgattggtgcataaactataccaatattatcagttagccacaagtttcctatatgcagcattattcacgcggtggctgatactaatgcccttggtgggatcccggttcttacctggggggatccacgaatttttgatatacttgatgctttgctcgagcatcgtggaaacactttggctgcttaaattttacggggtcaagaatggcattttatctaggactttattaaaagatctaaatttcatctaccttgtagtggtaattcatttccatgacgattacgaacacgcattgatcttaaagaattcatcctattccagcttcatcatttgtttgtcgttatcgcaagcatactgtcattggtgcaaacttttcaaacgtaagggtgccaaggaaagaaccttgatctggaaagccaacacctttatcacgttgcccattttatatttgagtgaatttgcattattgctcttaaacattcaagtcaagaactatcattctactccaacattagacataattaatagggttgttctactagcatacttccctatattgttatcagcatacaaaatactgttaacaaagtaa

SEQ ID NO: 872 - DNA, 1125 bp, Saccharomyces pastorianus
atgagtaccccaaggaaggccaccagtgataaagaagacgcggaagtctcagagatcagaacgccttttcgagaaagagcgcttgaagaacaacgtctcaaggatgagatactgatcagaagtacaccaggctataggaaactcatatccacctctgtcaagtcccatgatattctcaacaaagaccccaaagaagtacgaagtttcttgcaagatttgagccaagctctagcacgcgaatcgcaagataacgatacaaattcaaacgagaatcgagctcgtaacctgatagatgaattaacgtacgaggaaaaccgaatagaagatgacaatttcctccagagtagtagtgggaagaccacagatagcaacaatgattatgacacgcatgcaggctacacttcgttatcacaaactgtgtttgcacaactacaagaaagagataaaggcattaaaagcaggaagattgatccgatcattatacaagatgctctaatggcagaagaagagaacgagttccaaacaactccctcacgggatggtaaaagtatctctatgaatgttttggagacgccacctggctttgggagggatcgcacagatgaactgtcgatgcatggtcagaagtcgatccctataacagaacaagatgaaggactgtctgaaccattgcccgatccatcttcaatgaatagagaagaagaagaaggggaggaggaagaagaggaagaggaagaagaggaagaggaagaagacggtgcgttcaaggatacaaataacgaggacgcagacaatccggtacatgatcccacgcgtttgcatgttccgacaataagacatgctacggtgaaaccgttagaaataagggacttaaagcatttaacaagacaatttttaaacgaaaatgaaataatattacccaaccaatcatggtccgccatacaggaagagtctttgcacataatggactttttaaatcagaaactggggtcattgcaaaagcaagatcttgtggattcatttattgacatgggtattattcaaaacgttgacgatatgttcgagctcgcgcatgaattgcttcccatggaacaccaatcaaagatcgaaacttacttattctga

SEQ ID NO: 873 - DNA, 888 bp, Saccharomyces pastorianus
atgcctgtatacgaacacttattacctgttaacggagcatggagacaagatgtcaccaattggcttagtgaagacgtgccctcttttgattttggtggttacgttgtaggttccgattcgaaggaggccaatctatactgtaagcaagatggtatgctgtgcggggttccctttgcccaagaggtctttgaccaatgtcaagtgcaagttgaatggtttttcaaggaaggttgcatcttggaaccttcgaagaatgactctggcaagctagtcgtagccaaaattattggacccgctaaaaacatcttgctagcggaaaggactgccttaaacatccttagtagatgtagtgggattgccaccgcttcgcacaggattatttgcttggcacgttctacaggttacaagggtaccattgcgggaacaagaaagactacacctgggttacgtcggttagaaaagtattcaatgctcgtaggtggatgtgacacccacaggtacgacctttcctctatggtaatgctcaaagacaatcacatttgggctaccggttccataacaaaggctgttaagaatgctaggtctgtgtgcgggtttgccgtgaagattgaagtcgaatgtttgagtgaagaggaagccatggaagccattgaggctggcgcggatgtcatcatgttagacaacttcgaaggtgatggtttgaagaagtgtgctcagagtttgaagggcaaatgggatggtaaaagacattttctcttggaatgtagcggtggcttgaaattggacaacctcgaagagtatttgtgtgacgacattgacatttacagcaccagcagtattcatcaaggtaccggtgtaatcgacttctcactgaaacttgctcattga

SEQ ID NO: 874 - DNA, 372 bp, Saccharomyces pastorianus
atgattgctacacctattagattagctaagagtgcgtatgagccaatgatcaggttcgtcggtgcaagacaccctgcagtgaaacacgctcccgagatcattgttcatccatgtgctaccaatggtatgttacctggtagtaaagactgtatttcagtgagtaaattcatggaaaactataaacctttccgtgtggtaccagtaaaccggagtgtcagcgctagtcccagcgctgcaaagacctccgcgttcgtaaacagagcattgggtaaagatgagcttgcatccattttcgaattacctgccaggttccagttcaagcccattggtgaaaaggaattagaaactataaacagtggtggagcatggtga

SEQ ID NO: 875 - DNA, 801 bp, Saccharomyces pastorianus
atgaaccacgatccttttagctggggcagaccctcagacgccacttacggcgcttacaacacacaaattgccaacgcaggcgcttctcccatggtcaatactcagcaaccaatagtaacaggtacttccgtcatatcgatgaagtatgacaatggagtaatcattgctgcagacaatttgggctcctacgggtcccttctaaggttcaatggtgtggaaagactcattcctgtgggtgaaaacaccattgtgggtatatctggtgatatctctgatatgcaacacatagaaaagctactagaagacctggtcactgaaaatgcatacgacaatcctttggcggattctgaggaagcccttgagcccagccatgtcttcgaatatctagctactgtgatgtaccagcgaagatcaaagatgaacccactttggaacgccatcatcgttgccggtgtagaatcgaacggtgatcaattcctaagatacgttaacctactaggtgttacatattcctcccccactttagccacagggtttggggcgcacatggctaatccactgttaagaaaggttgttgaccgagaatccgatatccccaagacaactctacaaactgctgaagaagccatcgtaaatgcgatgaaagtcctttattatagagatgctcgttcttcaagaagtttctccttggctataatcgataagaagacaggcttaactttcaagaaaaatttacaggtcgaaaatatgaaatgggatttcgccagggatatcaagggctacggtactcaacaaatttga

SEQ ID NO: 876 - DNA, 1638 bp, Saccharomyces pastorianus
atggtcgtgttggctgcttctatcactacgcgtcaggggaaaccccttctatcgagacaattcaaggatctgtccaaggaccgggtcctggagctgctgtccaacttccagaacctggtggccgagatctcgtcggaccacacgttcgtcgaggacaagcacgtccgatacgtgtacaggcccttcgacaactactacattatcctgatcacgaaccgccagtccaacatcatcaaggacttggccacgctgaacctgttttcgcaaacgatcaactcctatttgtccagtttccacgaccaggagatcttccacaacgccttcgagatcctgtcgtcgtttgacgagatcgtgtctatgggcgggtacaaggagaacttgtccttcacccaggtgcagacctacttgtccatggagtcgcacgaggagagaatccaggaaatcattgagcggaacaaagagatcgaggccaccgaggagaggaagcgtcgtgccaaggaaattgccagaaaggagcacgaaagaaagcacgggttcgtgtccgccaacggtgacttcgacggtgccaacaggttcatggccagtaaggatccaaacgcctcaaacgccatcaatagttactactcgcacgcctcgcccgcggcacaacagtcttatctccaaagcgccaacgctgctgctgctgcggcccaagtagcctccccactggctaccccccaccgtacgggaccttcggtcactggtggtatgaagttgggtggtagtgcaggaagaaggtctggcaccatgctacgtccaagcggggtctcttccgcctcctctgccacgcctcctcctccggaggaggacgctccagagaacaacggtattttgatctccatcaaagaagtaataaatgcggagttctccagggacggcaccatccattcctcggaattaaagggtgtcctagaattaagaatcaacgaccatgacctgtctcactctaacctaaaactagccgactccatcgacgtccgcgatagatccttccaattcaagactcacccaaacatagataagcagtctttcctatccagtaaactgatctctctacgtgataaatccaaggcctttcccgccaatgatcaaagcctgggtgttcttagatggcgtaaaattgcccccgcagacgatgattcactggtcccattgactttaaccacatggatctcaccctccgagtcacaacagggcttcgatgtcaccattgaatacgaaaatatctccgaactggaacttactgatttggtcttcaccattcctttgttccctcaagaaccagtcgacataaatacagagtcttccacgtccgcggaggccgaagtcatcaacatggaccaagaaacaggaacttccatcagtgtcagccaaatcggcgccaacgactcaggtgtgctagcattctccatcgaggctccgtacgaggacgcgttgtacccaatgaccgtttctttccaagaatcaagcagggacgtatccgctaagagcttcaccggcatggccgtcgattctgtcgtcatggccgctgaccacgaccaagagttgccttacgatgtcatcacctctttgaagtcagacgaataccttgtccaatag

SEQ ID NO: 877 - DNA, 825 bp, Saccharomyces pastorianus
atgccttcgttagccgaattgaccaagtcattgagcatagcatttgaaaacagcgactacgccacgtgcgagaagctgttgccccccaccaagatcgagctcatcaagaacaaccttttaataccggacctgtccatccagaatgatatctacttgaacgatctgacgatcacgaagaagatcctggaagtgggcgcgctcgccaacatctacacgtttgacttcgacgttttcgacagctacttcaaccaattgaagccttattacttcagtagcgaccacaaactgtccgaatcggataagaagtcgaagctgataagtctgtacctgttgaacctgctggcccagaacaacacgaccaagttccactcggaattgcagtttctagacaggcacatcaagaacttggaggatgactcgctcttgtcgtacccgatcaagctggacagatggctcatggagggctcgtaccagaaggcttgggatcttttgcagtctggatcgcagaacataacggaattcgactccttcaccgacattttgaaatcggccataagagacgaaatcgccaagaacactgagttgtcgtacgacttcctcccactgtccaacataaaggccctgttgttcttcaacaacgaaaaggaaaccgagaagttcgcgctggaaagaaactggtccgtcaccaactcgaaggtctatttcaaaaaccaaccaaaggaagcgcttgacgaagaagacgaaaccatgcatgaagacggccaaaagacaaagattattgaaagggcaatggactacgctataagtatcgaaaatattgtgtaa

SEQ ID NO: 878 - DNA, 1458 bp, Saccharomyces pastorianus
atggttcatttaggtccaaagaaaccacaagctagaaagggttccatggctgatgtgcctaaggaattgatggatgaaatcagcgaactggaaaaaatgttcaccgccgactctgaaaccttgagaaaggtggtcaagcactttatcaatgaattgaacaagggtttgaccaagaagggtggtaacattccaatgattccaggttgggtcatggaattcccaactggtaaagagtccggtgactacttggccattgacttgggtggtacaaacttgagagtcgtcttggtcaagttgagtggtaagcacacttttgacactactcaatccaagtataagctaccacacgacatgagaaccacacagcaccaagaagaactatggtccttcattgccgactgtttgagagacttcatggtcgaacaagagctgctgaacaccaaggaaaccttgccattaggtttcacattctcatacccagcttcccaaaataaaatcaacgaaggtattttgcaaagatggaccaagggtttcgacattccaaacgtcgaaggccacgatgttgtcccattgctacaaaacgaaatctccaagagagagcttccaatcgagattgtcgctttgattaacgacactgtcggtactttggttgcctcatactacactgatccagagaccaagatgggtgtgattttcggtacaggtgtcaacggtgccttttacgatgttgtttccgacattgaaaaattggaaggtaaactagcagacgatattccaaaggactccccaatggccatcaactgtgaatacggttcctttgacaacgaacatttggtcttgccaagaaccaagtacgatgttgatgtcgacgaacaatctccaagaccgggccaacaagcgtttgaaaaaatgacttctggttactacttgggtgaattgctgcgtatggtgttgatcgacttgaacaagaagggcttgatgttgaagggccaagatctaaccaagttgagcaagccatacatcatggacacttcgtacccagcaagaatcgaagaggatccatttgaaaacttggaagacaccgacgacattttccaaaaggacttcggtatcaagacatccttgcccgaacgtaagctgatcagaagactttgtgagttgatcggtaccagagccgccagacttgctgtctgtggtatcggtgccatttgccaaaagagaggctacaagacaggccacattgccgccgacggttccgtttacaacttgtatccaggtttcaaagccgctgccgccaagggtctaagagacatctacggatggaccggtgatgccaccaacgatccaatcaagattgtcccagctgaagatggttccggtgccggtgctgctgttattgctgctttatccgaaagaagaattgccgaaggtaagtctcttggtgtcatcggtgcttaa

SEQ ID NO: 879 - DNA, 1281 bp, Saccharomyces pastorianus
atgcatctgggacggtatttcgtaacaatgacatcgaaagctgtatttgacactaaagtcttaagagtaaatccgctctcaatccacttctctccaacagcacatttagatggatccttaccaacaataactgaccctgaaacagaagcagcactactagaggcagcaaagattataagagatactgacgaaactgtagcctttccaacagaaaccgtttatgggctcgggggctctgcgctgaatgataattcggtgctcagcatatataaggccaagaataggcctagcgataatcctttgatcacacatatttcatccattgaccagctaaacagaaagatttttaatcaagcggattcatccagcgcatctctgtctgataatataccagcaatttatcgcccattaatttcgaacctttggcccggtccattaactattcttttgcctgtaccacctccaaaccacaatacgctatcgaaactaacaaccgcagatcagtccacatttgcagtgcgtataccagctaatccagtcgctagagcattgatcgctttgagtgatacaccaatagctgcaccgtcagcaaatgcgtctaccaggccatctcctactttagcgtcccatgtttatcacgatttgaacggtaaaatccccatggttcttgatggtggtgcatgcaaagttggcgtagaaagtactgtggtcgatgggctatgcaatcccccaatgctactgcgacctggcggtttcacttatgaggagatcattgaattaggtggcgaagcttggtctctttgtaaggtcgaaaacaaaaaatctgttgaaaaaggtgaaaaagtaagaacacctggtatgaaatatagacattattctccctcggccaaggtcattttgttagtgcctaacacaagtgacaccaataacaacataacggagacgcagatggaaagtctgaacagaatgatcaaaaatgaaatacaagctgataaaactgtgaaaaaaatcgctattttgacttcactgaaactgcaagattcggatctacaatccaagatcgtggatgactctgatttttcttctaaaagttttgtcattgaaagacttgggcggacaggggaagaaatacaagctaacttatttgctgctttgaggaaagtagacgaaacggataacgttgacttgatattcgttgaaggtacgaatgaagatggagaagggctggctgtcatgaacagattgagaaaagcagctgcaaataattgtatactgttctaa

SEQ ID NO: 880 - DNA, 2853 bp, Saccharomyces pastorianus
atgagtgataatccatttaacgcgagtcttctcgatgaagactcaaaccgcgaaagagaaataatagacgctaccacagaggctctttcgaagccaaatccttccttagaatactgtaccttatcgatagaggaaacccttgaacaactccagactgatgggaacaatggtttaagctcttcgagcgaggccactagcaggagagcagttcatggccctaatgaaataaccgtagaagatgatgagcctcttttcaagaagttcctgtccaatttcattgaagatagattgatcctattattgatcgggtctgctgtcgtctctttctgcatgggtaatactgacgatgctatcagtatcacactagccattttcattgtggtcaccgtcgggtttgtccaagaatatagatctgaaaaatcgctagaggctttgaataaattggtgcctgctgaatgccatttgatgagatgtggccaagaaagtcatgtgttggcttccgctttggttccgggcgatttggtccatttcgggataggtgacagaatccctgctgaccttagaattattgaagccaccgatttgaccattgatgaaagtaatttaactggtgagaatgaaccggttcataaatcctcacaaacaatcgagaaatcttcctttaacgaccaacccaactcaattgtaccgatcgctgaaagaacctgtatcgcttatatgggaactttggtcaaagaaggtcacggtaagggtattgttgtgggaacaggaacaaacacttcatttggtgcagtgtttgaaatgatgaataacattgaaaagccaaaaactccactacaattaacaatggacaaactggggaaagatctgtcactggtgagtttcatcgttattggtatgatttgcttagtaggtgtcatccaaggcagatcttggttagaaatgtttcaaatatcggtttcattggcagtcgctgcaatcccagaagggttgccaatcattgtcacagttactttagcattgggtgtcctaagaatggcaaagcgtaaggctattgttagaagattaccaagtgtcgaaactttaggctctgttaacgtcatttgttctgataaaaccggtactttaacttcgaaccatatgactatatccaaactctggtgcttagatagtatgtctaacaaattgaacgttttgtcattagacagaaataagaaaagtaaaaattccaatgggaatttgaaaaattacttaactgaagacgttcgggaaaccctgaacatcggaaacctttgtaacaatgcctccttctctcaagaacatgcttcatttttggggaacccaactgatgttgcccttctagaactattaacaagctatgaaatgcctgatattagaaacacagttcaaaaagttcaagaacttccattcaattccagaaggaaattcatggccaccaaaattcttaatcctgctgacaataaatgtacagtatacgttaaaggtgcgttcgaaaaaattttgcagtgttctacaagtcatttgaaatcaaaggataaaaaaactgaaaaactgactgaaactcaaaaagacacaattattgagtgtgcaaattcaatggcttccgaaggtttacgtgtccttggcttcgctaaactggtattatccgattcatcaactccactaacggaagacctaatcaacgatttaacatttactgggttgatcggcatgaacgatcctccaagaccaaatgtcaaatttgctattgagcaacttctacaggggggtgttcatattattatgatcaccggtgattccgaaaatactgctgtaaacattgcaagacaaattggtattcctgtcattgatccaaagctttctgttttatctggtgataaattagaaaagatgtcagatgatcaattggctaatgtcattgatcatgttaatatttttgctcgtgctacccctgaacataaactaaacattgttcgtgcattaaggaaaagaggcgatgtcgtagcgatgaccggagatggtgttaacgacgctcctgcgttaaaactttcagatattggtatttcaatgggcaggatcggtacagatgtagccaaagaagcttctgatatggttctaaccgatgatgatttcagtaccatcttaaccgctattgaagaagggaaaggtattttcaataatattcaaaactttctaacttttcaattgtctacctctgtggctgcgttatcgttggtcgccctgtctacggcattcaaactacccaacccactaaatgcgatgcaaattctctggattaatattctaatggatggtccaccagctcaatcattgggtgtggaacctgtagatcatgaagttatgaagaagcctccaagaaaacgtactgataaaattttgactcatgaggtgatgaaacgtttacttactactgcaacttgtatcatcataggaacagtttacatttttgtcaaagagatggccgaggatggtaaagtaactgctagagatactactatgacttttacttgctttgttttctttgatatgttcaatgctttggcatgtagacataatacaaaatcaattttcgaagttggatttttcacgaataagatgttcaactatgcagttggactttcactattaggtcaaatgtgtgctatatatataccgttcttccaaagtatctttaaaaccgaacgtttaggggtgtctgacatattactgctattactcattagtagtactgttttcattgttgatgaattaagaaaactgtggatgaggaaaatgaacgaaagagacccaacgtactactccaatgtttga

SEQ ID NO: 881 - DNA, 699 bp, Saccharomyces pastorianus
atggtggtgattaacggggtcaagtacgcctgtgaaacgtgtatcaggggccatagggcggcgcagtgcacccacacagatggcccgctgcaagtgatcaggcgcaagggtaggccatcgaccacatgtggtcattgtaaggagctgaggaggaccaagaatttcaacccttctggcggatgcatgtgtgcttccaagcgacggctggcggtgggcagcgaggaagatgagtcgcggtgccgttgcgacgaaggcgagccctgtaagtgccacaccaagagaaagactagtaggaagcagaaggcagcatcgtgccatagctcagtcagtcctgaagcggcgaccgttaaaaatcttcgggtattagacttggaggcttctctgggcctgaacagcgtcgatcttattgacctgagcccctcgtcgtatgtggacatgacaacgactctgtctagcttggagtcacccctacaaagcgatggcgccaagacggacgacatagacgagctagggttgcctcttcttgacacgttccaacaatgctgcgattcggctgcaaccccccatagtgccaatgcaggcgcggacacaaatccaattgctgacactcatctaaacgatgttgacattccgttttctattaatgagttgaacgagctttacaagggagtattgccgcacactccacattcgaaataa

SEQ ID NO: 882 - DNA, 1344 bp, Saccharomyces pastorianus
atggatgagatccttgccaaagcaggctcacaggccgttacgtttgctataaaatccggcatatcgatagcatcaacctatgcattaaagacaatagcgaactttgttattcaaatccctaaggatgatgcgagaaggatagatcatttgaagttcaaattggaaagtcgtatagctattgtatccagtgccattgatctaataaaattggtggccgcaagagggaacacgaatttacagatcacgttgagattaactaaggatttgaaggaagagattgataggtttgatgaaaagataaatgaaatgacagaaaaggtggagggttcaagaagtgcgaaaacacagaatgaagctatcaaagcggtggagaactatatcaaagacttgttactaaggatagaagaaatcacaccatttattaatctctctttgaccacatcaggcgccaacctaaatagtgcacttcctcatcaaatctcgccaggcttattgttacaagcttctgattttgttaatgaaagcaatagaaaatacgacgacgccatgaaaagcagtaaaaagacaaaagatgaccgaaaagaactaaaagttcaagtggggcctatatttgaagtaacgttgttttccattttctataatttgacctcagaaagcaatggacaatcggggatagtttggaaggaagatatgaaacgagcacgaattaggatatgtagacaatactcttcagaaaaggaattcgattattttatgaaaatcgagcaagactttaatgatggcaggtatcatgaaaatgacgacaaggaggatacaccacaggaacttactatagatttgaaccatatgaaaaagttattttttagtgtttccggcaaacttcttcgattggaagaacaagattcaccggtgttggtgttgaaaataaactctcacggtgatcaagagaacgcgactactggagcagagaagccgcctatcgaagacattacttggtatgcggtaagtggatatgaagaagtagaaaaagacgacgacgaagaagaagaaaaagaagaagaagaagaagaagaagaagataatgaggaagggggcgaaagtggggaagagggggaaagcgaggaagaaaaactattggaagacaaaacttcatcgatcacgctactcgagtacattgtccggttgacgtctttgcaaagcaacgaccaaaaaagtatactggaggtcagcgatgaaagattgtccatttacctgaacgatgaaaacaccaactcaagaaaagaaggtatcagcaattctacaattaaagaaactgaagagaaattacaaaacctaatactctag

SEQ ID NO: 883 - DNA, 2697 bp, Saccharomyces pastorianus
atggcaagacgtagactaccagacagaccaccgaatggaataggagccggcgagcggccaagactggtaccgcgacctatcaatgtacaggactctgtaactcggctgacgaagccattcaaggttccctacaaaaatacccacatccagcccgctgctggtaaaatcgccaccgggactgacattatcgtgggaggaagatgcctgaggaaaaggtcatctactgtgtcgtactccggactggacgtggacgcagatgcggagcagatggagtatggtcaggacatcagtttggcccaactgactaaacgacggaaggatgctctcagtgctcaaagactgattaaggacccgacaaggctaactcacatcgaatacactttgagaaggtccttcactgtccccattaagggctatattcaaaggcacagtttgcccctaaccttagggatgaaaaagaaaatcacgccagaaccaagaccattacacgatccgacggacgaattcgccatagtgctgtacgatccgtccgttgatggtgaaatgattgttcacgacgctaccatagacaccaaggaggaagagctgaaaaatgtggccaagagcacccaggaaaaggagaacgcaaacaaagaagagagcccagaacaaaaaaacacacaaaaaatagggcatcacccttcattaatgacaaatggggtgagaaataaatccttacgtgaactgctgggtgattctggggactctgccgaaaacaacaagaagtttgctaatgtccctgttgtcatcgatccaaagctggccaagattttgagaccgcatcaagtggaaggtgtcaggtttttgtatcgttgtgtcactgggctagtcatgaaggactttttggaggcggaagcctttaacacttctagtgaagacccgttaaaaagtgacgagaaggcgcttgtgcagtctcaaaagactgaagggaacaatagaggtgcgtacggctgtatcatggcagatgaaatggggctaggtaagaccctgcaatgtatagcactgatgtggacactactaagacagggcccacaggggaaacgactcattgataagtgtattatcgtttgtccatcctccttagtcaacaattgggccaatgaactgatcaagtggctgggccccaacaccttgtctcctctcgccattgacggaaaaaagtcctcgatgggcggaggtaacaccacagtgtcccaagccattcatacctgggcccaggcccagggcagaaacattgtcaaacccgttctgatcatatcgtatgagactctgcgccgtaatgttgaccaattaaagaactccgacgtggggttgatgctggcagacgaaggtcatcgtttgaaaaatggcgattccttgactttcacagcgttggatagcatcaattgtcccagaagagtcattttgtccggtacgcccatccaaaacgatctttccgagtattttgccctgttgagcttctccaatcctggcttattgggctccagagcagagtttagaaagaatttcgagcttcctatcttgagagggcgcgatgctgacgctaccgataaggaaattacaaagggtgaggcacaattacagaaactgtctacgatcgtttccaaattcatcatccgtcgtactaatgacattttgtccaagtatctaccttgtaagtatgaaaacgtgatttttgttaacttgaagccattgcaaaacagtttatacaataaattaatcaagtctagagatgtgaaaaaaatggttaagggcgtgggtggcagccagccattaagagcaattggtatcttaaagaaactatgtaatcatcctaaccttttgaattttgaagacgaattcgaggaagatgaagacttggagttacctgatgattacagcatgcccaattcgaaagcgagggatatccaaaccaagtattctgccaaattctctattttggaaaggtttcttcacaagattaaaaccgaatccgatgataagattgtcctgatttctaactatactcaaacgttggatctgattgaaagaatgtgtagatacaagcattatagtgccgcacggttagatggtacactgtcgatcaacaagagacagaagttggtggatagattcaatgatcctgagagtcaggaattcattttccttttgagttccaaagcaggtggttgtggtattaacttaatcggtgcaaacagattaattttaatggatccggattggaacccagctgctgatcaacaagccttggcgcgtgtatggagagacggtcagaaaaaggactgttttatttacagattcatatcgactggtacgatagaagaaaaaatttatcaaagacaatcaatgaaaatgagcttgagttcatgtgtggtcgatgcaaaagaagatgttgaaagattgtatagttctgataacttaaaacaactattccagaaaaatgacaacacaatatgtgaaacacacgaaacttaccactgtaaccgttgtaatgcgcagggaaaacaattaaaaagagcacctgctatgctttatggtgatgcgactacttggaatcatttgaaccatgacgctttggaaaagacaaacgaccacctgctaaaaaatgagcatcattacgacgatataactttcgcatttcaatatatttcacattag

SEQ ID NO: 884 - DNA, 939 bp, Saccharomyces pastorianus
atgccgtccaataatagtagctttttggatattgatgacgatctcgaaggcgtggatgattttgccggtgaaaccaacccattcgatgatgccactgtgccagacagaccaagcatgaataagtcgaaggctggtgaagggaatggattttatggcacagcagacagtaagggcgagtctgcaccacttcagggccaaatggacccaccagcctatgaccaagtgataggggaaaacacgaacgagaacggtgggcgtgacgggttgaggccgggactaataaactactattcaagatactttcaacttaacttgacgcagttcaagaaaagattatctgcggtaatgacattcagaaatgatcacaatgccggggataacgacaacgactgcgatttgtacggtgctgtgtggatcactgccacagtagtgatgattaatttcaccatgagcggtgggctgagcttcatcataaacgaagtaattaaaggcaccagggccggtggagatgttgatagagccagtcagttcaagaagctgctccattcaatctggctgttttacgggtataccttcggggtgccattcatcacgatgcaggttttgcaaagggatgagcattcggaacgcaacagaagtttcaagagtgtccccgaattgatttcagtttacgggtactccaatttgatttggatacccgtttgtgttattttaaatatcttggatatgtctaaacgtttgagaacggtgcaggccattcaatgggcgatcgtagctcttgggtgggcacaatcgtcgtatttcttgaagtcacagatgtccaagaataatggcgaagacggtgagactcaagcgggtggcaagttatctttatctgttattgttgccattgccctgcacgctttattctgtttattatttaggtttataatattttga

SEQ ID NO: 885 - DNA, 3252 bp, Saccharomyces pastorianus
atgtcatctaggggtatcgtctatgatcctcagttcaaacctgttcaggggatttacgaaaatagattaagacaatttattgatacaggcggagattaccatgatttgaatttgaccaagttttacgacaagaaacgtatttcgttagatcatgaccatgtcaaagtttggtggtaccaggttccctttgaacgtggttcttctcccgtctctcccgataaaagaccgtcttggaagtctatcattgaacgtgatcaaaagggtgaattggaatttagagaggctaacaaaaatcagcctttcgggcccagttggtctacaacgtggttcaaagtaaaaatttccctacctgaagactgggctaaatctggtgagcaattactctttgaatgggactgctccaacgaaggaattgtcatagacccaaccactttgattcccgtgactgctttctcaggtagtgagaggaccgaatacgttttaccgaagtcatcggatgggaaacattttttttacatcgaagctggtaataatggtatgtttggttgcggcgcaggatctactataaatccgccagatgataatagattcttccacttgaggaaggcggatcttgtgtggcccgacctggatgctcgtgggctgtacattgatttttggatgctgggagatgctgcgagagagttgcctggagactcttggcaaaaacaccaagcgagacagctaggtaacgccgttatgaatatttttgaccccaatgaccgctcaagcgttcgtaaatgtcgtgacttacttcaaaaggagtattttgatccactttcagaaagcagtaaagtttatgaacaaggggactctcaagttttgacaaatgtttatggtattggtaattgccatatagatacggcctggttatggcccttcgcggagacaagaagaaaaatcgtgaggtcttggtcttctcaatgtactttaatggatcgtttccccgagtacaaatttgttgcttcacaagctcaacaattcaagtggctattagaagatcatcctgagttcttcaataaagtactgattcctaaaattcaacaatcccaattttttgctgttgggggtacatgggttgaaaacgacactaatattccctccggagaatcgttggctaggcagttctttttcggacaaagatttttcttaaagcactttggtatcaaatcaaaagttttctggttacctgatacgtttggatattcttcacaaatgccacagctttgccgcttatcaggaattgataaatttttgactcaaaaactttcttggaataatatcaacagtttcccacatagtaccttcaactgggcgggaattgatggctctcaactactgacacacatgcctcctggtaatacctatacagccagctcccactttggtgacgttttgcgtactgctaagcagaataagacacccgaatattacggttccggtttaatgttatacgggatcggtgacggtggcggtggaccaactgaggagatgctgcagaagatgagacgtattagatctatgagtaacaaaaatggcaatgttattccaaaactacaagtcggcatcactgttgatgagttttatgatgacattttgaaaagaacgaatcaagggcatgacctccccacttggagtggcgagttgtatttcgaattccatagagggacatataccagtcaagcccagaccaaaaagtttatgagactatctgaaatcaaactacatgatctagagtggatagcggccaagacctctgttctatatcccgactcgtatgagtacccagctaaggacattaatagtctatgggaaaatgtcctattgtgtcaatttcacgatgttctacccggttcttgtatcgaaatggtttataaatatgaggccatccctatgctgcataacgttgtcaagcagtctacctcaatgatagaaaagacaatccaatttcttcaaagtcagagtaaagctgatcttgttgagatgggaacgctaacctggtcaaaacccgaaacggtttctgagcagaactctctagatggtagttatacttcctcagtgacaggatacgatgactacatagttcttgctaatgggaaattgaaagctattatttgcaaaaaaacaggtgtgataacgagtattacggatgaaactttaggagtggaatatttggatacggagaacggaaggaacaaactgggtgctaaccagtttgttatctttgacgacaaacctttgggctggcaagcttgggatacagaactttattccgtaaaccagtatgagtatattactaagccaaagaaagttcaggttgcctgcaataccaaagagacatgcgctgttgaggtcattttccaagtttctgaaaaatgcaaaatcagatcagtaatatcacttaatgcaaccacgtctagcgatgccaacttgagtaaaatcgatattactactaccgtagagaactgggatgccagaaacaaatttttaaaagttgaattccccgtcaacgttcgtaatgaattcgcatcatatgaaactcaatttgggattacaaaaagaccaacgcattacaacacatcatgggatgtcgcgaagtttgaagtttgccatcataaatttgctgactattctgaatatagcaaaggtgtttcaattttaaacaattgcaaatacgggttttccacacacggtaacttgatgagactatcgttgttaagatctccaaaagctccagatgaacatgctgatatgggaacacacgagataaaatatgctatctatccacatagaggggcgttatccagtgacaccgtcaagctagctcacgaattcaattacaatttcaactacaagctccccaaagacattggccagagttttgatgacatcgtaagcatctccggcgatgagaacgttatcttgtccaacataaagaggggagaagaagatcgtgccatcagatccaattattctataaagccaaaggatgaacaaagcattgtggtaagagtttacgaatctcttggaggggaatcctttgcttcattgaataccacgctaaatttgaagcgtattgaaaaagtcgataatttggaaatgcaagtctataagaatttgacggcaacacgagatgaatcgaatcatacaattaataggattcccataaaattaaggccttttgaaattgcttcgttcaaattatacttctag

SEQ ID NO: 886 - DNA, 1131 bp, Saccharomyces pastorianus
atgtgtcaagtcgccaatgacctaaggaaagtcgtgtctaataagcatgagaagttttttgaacgtcatttacaattgctcccttcttcgcatcaaggacatgacgtgaacaggatggctatcatattttattccatggtggggctctcagtatttgacgttgacgtgcctgctaagtataaagatcaccttggctggatgcacaaacactatatcaagaaaactctcgatgatgtagacaatactgaaatatcaggatttgtcggaagtttggttatggacgttcccaatgcaataactattaatttagccaatacactttttgcgttgttatcatcgatcatgttgaaagactatgagttttttgagacaatactagacaaggagagtcttttgaggtttgtctccaggtgccaattgcccaaccgagggtcatttgtatcttgcttagactacaaaacaaactttgcttctcctgttgattcagacgatttgagattttgctatatcgcggttgccattttgtacatatgtggatgtcgatccaaagaggactttgacagatacatcgatacggagaaattacttgaatacgtaatggaacaacgatgtcgtagcggggcttttggtacccacaatgaaccgcatgcagggtatacgtcttgtgcactttctactctagcattattatctagtcttgaaatgctatcagatgagtttaaagaggacactataacgtggctagtgcataggcaggtttcaaaccatgggtgcatgaagcttgaagacaactcgaatgctacatatgaccaatcggatgacggtggtttccaaggaagagaaaacaaatttgccgatacatgctacgcattctggtgcttgaattctttgcagttactcacagacaattggcaaaaactttgccaaatcgaactaacagaaaattatctacttaatcggacgcagaaaactttaactgggggtttcagcaaaaatgacgaagaagacgctgatttatatcatagctgcttggggagtgctgcattggcattgattgagggtaaatttaacggggaactatgcatacctcaaaagatattcaatgatttttgcaagaggtgccatttctag

SEQ ID NO: 887 - DNA, 1026 bp, Saccharomyces pastorianus
atgagtgacgtagtcagtgaagatcgtaaggcattatttgactcggcaatttccttcttaaaggatgagtccatcaaggatgccccacttttaaagaaaattgaattcttgaaatcgaaagggttgacggaaaaggagattgaaatagcaatggcagaaccgaagatcaatgagaagctggataacggaataacgaagaggagtgacgtgtctgagaacacgacaaacgcgcaggatatgtacttttatgaggcgatgccaccggccctaccccacagagactggaaggactactttgtaatggctaccgccacggctggattactgtatggtgcgtaccaagtaactagaaggtacgtgataccgaatattttaccagaagcaaagaataaattggaggaggacaaggaagaaatcaaggatcagtttgccaaaattgataaagtcctcaatgccatcgaaacagaacagacagagcttagagagcaagaaagcaataagttgaaagagctaggtgacacaatttccgaactgcaacaagtactagtgcaaactacgagaaacaaagaaaagatcgaagacgaatttagactagttaagctcgagatgtccaacctacaaagcaccattgacaagtttgtttcagacaacagcaacatgcaggaactaaacaatatccaaagagaaatggattcgctcaagagtttgataaaaaaccgggaaccaactgacatgcatgacaatagaccattttccatgtctcctaatggcatacctggtatagacgcgatcccatctgcgtccgaaatcctagccaagatgggcatgcaagaagagaatgacgaagagaaggagaacggtgataatgctgccaacgaggcaaacaccgttccggcatggaaaaaagtgagagagcaaactgtcgatagcaatggctccatcccggaatggcaaaaaaacaccactgccaatgaaattagcgtgcccgactggcaaaacgcacagcttggggactctaccccatag

SEQ ID NO: 888 - DNA, 3396 bp, Saccharomyces pastorianus
atggaaaaggaatctgtatataacttagcgctgaaatgtgctgaccgacaactgacctccacggattttctgaacctttacaaggaattcttcaatgaaaagttctcatcattggttcaagaggaggtagatggtactgctaatgctgccacaatcagtgatatcaagaaggaactgtccttgacggatacatccggtagtagtgggtctacagatgttacacgcttggatgaagctctagatatcgtttgctctgattttgtcaaggttttaaacctagagaggcctttgatcctggcggattatatcgttgaggtgttgtttgtgaattacaactcggatatgataaaatgttttttgccgaaattgaactctgttaccaactcgttaattttggtgcatttcttctccaagtcttgttcatttttcgctaaactatcagatactttggtgattggccaagtacgcaaggatttgggtagtgttgtggtaccgagtattttaaacctcgacatgaactctttgaataaagaactcattgttgtaatatcgaagtttttgcatactgttttgaaactcgcaaccgccccaatccttttaacttctgtcagctgtaagaatggatcatttacacttctcaatcagctgtcacaaactaacaagctgctttttagaaagatctcacagacttttgaggcaaaattacacttcaaagacacgaagccgtttttaaacaaagattcaaccaacgaatatgtaggatctccttcattgacttctccccaatatattccaagtcctctctcttcaacgaaacctccaggctctgtgaattctgcggccaaatataaagacatgaagcttatacgttattataaaaatatctggcttaataacaaaataatcaactgggaaatagccaattcagatttcttgtcaaagtattctgcaataagctcctctattttccgagagggcctaaactctgttcacaacctggaccagttactttccgacttaattgagacatcatttacttgttttgctcaattcgtcagtaataaacaatatcatcaagcgaactccaatttaacgctgctagaaagacaatgggttatatttatctccaaacacttgccactgttgatccttgagaattcttcaagaagtcctcgtgtagtaacgaatgccttagataatatcgatgagaaagtcattaaagctattagaatatactttaccgaaaaggatgatatcaagtccactaatgaagatttgtttgatgattatccgtctactagtttagatataaggcatgatttcattaagggtttaattatgttgaatttacaacctgcttctatcatcaacaattatttgagagaagatcaaatgatcgacaccagtatactacctacaaatgatgatttggttgttcgtaatttgcaaggcatccaagaagtggttcataacactaacagtttcatcatttcatctttggacactttggagctagaatcaataactgattctaataataatgattccagtaatgggttattccaagtactacacaactttgaatctgttgcgcccacaaaacaacgtgagatagtaaggggcattttatccatctttaatgactcaataaaagaattaaactataatagaataaccaaaatttccgctctgttatttttcaatttttcacactcattgacaacaattctctcgttttcttcaccaacaacattggtggagaccttaatgaaattcatcgactcttcgaaaaatgatagaagtaactcaaatatcaatgatgaaagttcggaatacgaaacggtcaatatttcattatccctctcctgggcaatattactgctaataaatgtaacacaaacgtatggtatatccgtggttgatgtagcactcaaatcatccaacttatctctaaaggattccttcataattaattttatttcaaatctgcctaatgtgtcggataaatattatttggaagagtcaaatatcaacgattctgatatgctaactaagtcgcataataccgttcaaagctggctctgtgatctttttgtcaatgggtccatcaccgatcaattgattcaaaatattgaaaccaggcaattggctaatctcataccattcatcgtcaaacaggtcttgctttcagttgaaataggggctctgactgacatttcgagtttgataggtggattcgagtacttcttacagcctttgttactgatcggattagtcaaaacatttttttggctagaacaatttctttcatgtgtcaagaacgatactgtatcagaagatatcttacagaaattattcaatttattaaacacccttttcaacccaatcactcttaatgaagactcaaaagctttccatacggcagttttgaggttaaacgcaatcccattactaaaggttcttcgcaaatttagagttcaaagtcaatctaattatggtatatattcatctgatgcgcagggcgatccaaacctagagcctttgattgcaaaattgatttcggttttaaacatatcaccggtttatgatgttgatccaagaattatcaacgcggaaaatgattactctagaaagcagttgggttatggtaaatttctaattttgaatgaaaatccagtcaacaaaataatgactaaccaaatcaattcattttggagtcttcatagtagcacatattacaacttagattacttgtttgaattaattgaattggtgacgccaaagaattttctttttgatgtgttgaaaaccttggaatataaactagccacctatggagttccaggctctaaaaataaaagaggatctttagaatcagagcatgttttcgattactttttttattttcttgtactacacgatgtaaaaacagcagaggaagctactcaattaatagaatatatggaagatgacacgaagaaaaaaaacgatgacgctgacaagaaatgtgagtatccacaggaaaaagctaaggaagctgttgaggtgaaacaagaatcccaaccaaaaaacgaagttgctcaagacgatgattttgatatgctttttggggagaacgatacaagtgctcaagcttatgaggaagacgaagaggatgaaaacagctgtgataatgacaagcctaacgacatatcgatgataaaggtagaagaaggcctagccaagactaacaaaataggtattttgaagagggactcctttgcagtacttcttcatgaactaaaattgctgaacgattcggccttagcaattggtgagataactaagacggaacacgaaaagtttatcaaatatcataataaatatttatgcatgttgaaaacatgcgtcttttaa

SEQ ID NO: 889 - DNA, 1242 bp, Saccharomyces pastorianus
atgtggctttcaaagttccagttcctcccaaggccgatagccaagggtatttcgttaagatataactcgcccttgcttgtacgattgacatcaactgcttccaactcccaaagcaatgagaacatcacaacacagtactcggagctatccccactgctcgttaaacaggctgagaagtatgagactgaactaagggaactcgataaggatctctctagtggcattcacttcgacgtgaataagcagaagcatcatgccaagttatcggccctaaccgacacatttagtgaatacaaggaaaagctaagtgaattgaaaggtctaaaagagatgatcgcgttcgatccatcattaagggtcgaggctgaacaagaatacatggagctggtcccgaaatatgaaacaacttcgtcaagactaataaacaaacttcttccgccacatccgtttgcagagaagccaagcttgttagaacttcgaccaggggtaggcggaatcgaggccatgatttttgctcaagacttgttggatatgtatattggctatgctaataacaaaaattggaaatatcaaattatatcgaaaaacgaaaacgaaagtggatcaggcattatcgatgctattcttagtatcgaagaacctggatcttatgatcggttgaggtttgaagcaggcgttcatagagtacaaagaatccccagtacagagaccaagggaaggacgcatacatccacagcggccgtgattgtactaccccagatgggcgacgaatctgccaaatccattgatgcctatgaaagaacattcaaaccaggtgaaattagaattgacatcatgcgtgcaagtggcaaaggggggcagcatgtgaataccacagattctgcggtcagattaacccacatcccctcaggtatcgttgtttccatgcaagacgaaagatcgcaacataaaaacaaagctaaggcgtttacaatcttaagagcaagacttgcggaaaaggaaaggttagaaaaggaagaaaaagaaagaaatgctcgaaagagtcaggtttcgagcacgaataggtctgataaaatcagaacgtacaatttcccacagaacagaatcactgaccacagatgcgggttcacgttattggacctgccaggcgtattatccggggaaagattggatgaagtcatcgaggccatggctaactacgacagtaccgaaagagcgaaagatctgctagcaaatagctaa

SEQ ID NO: 890 - DNA, 1032 bp, Saccharomyces pastorianus
atgtatatttttcaccaactttttttcctttccatagcatattatagtttgtttgcaaacattttggttgaagggaagaaggcatctctaggacaaggtgtttgtagatttgaagatcaaaattttcaaacagagttttttctgaatgtcctcaaggaaaacaagttagaaaatttaaaagaggagtatgacaagtacaaaacgcaaagtgctttgtatactggctttgtaatcgagaaacagtatgaataccaaatatttcccttccaaattagtaatttacttcgagtaacattttgtagagggggtaaaccggtttggtataactctcttccttttcagaatgatttagattggtcgcaaccgctatgcgttccaactgtagaagacgacgctgtctcacaaaaccattccatatgtttcaaatttgcaagggtacaaaaatatacgcaaagaaacgtgacactttattttcccaataaattcgttgggttcgtatttttctgcaactcctctggtacattccctaattctagtgaaaattatggcacggttccattgacacctattatatctgataatattagggattacaagacttcttggaggataaaaggcaccgtcacaaaagtgattccctatttacatactttaagtatcccaatgtatcgatacgagatgctaacagaccctgatcatcataatccagagcaattggaatacaagtccttaacttcagaattcttggggagctataaaagccttgaaaagcttgggagcaaaggaatgtcttggttaaatgggatagatcccatggaaaaatacgacagaattaaaagcgagaacgtttggcattttcataaaaactttgaaaagacattaaacaaaattggacgaaacattgagaagcctcgtgctgctttgataagaacaataaatgcacgatccaatgatgaacgcatgacaaggaggaaatatttgaaaaagaaggtttctagaatgctacgaagcagaatacctttgcagaattga

SEQ ID NO: 891 - DNA, 654 bp, Saccharomyces pastorianus
atgtctaagatcacctcttctcaagtcagagaacacgtcaaggaattgttgaagtactccaacgaaaccaagaagagaaacttcttggaaaccgtcgaattgcaagtcggtttgaagaactatgaccctcaaagagataagcgtttctctggttctttgaaattgccaatctgtccaagaccaaacatgtctctttgtatcttcggtgatgctttcgatgttgacagagctaagtcctgtggtgtcgacgccatgtccgttgatgacttgaagaagttgaacaagaacaagaagttgatcaagaagttgtccaagaagtacaacgctttcatcgcttccgaagtcttgatcaagcaagttccaagattattgggtcctcaattgtctaaggctggtaagttcccaaccccagtttctcacaacgatgacttgtacagtaaggtcaccgatgtcagatctaccatcaagttccaattgaagaaggttttgtgtttggctgttgccgtcggtaacgtcgaaatggaagaagatgttttggctaaccaaattttgatgtccgttaacttcttggtctctttgttgaagaagaactggcaaaatgttggctccttggtcgttaagtcctccatgggtccagctttcagattgtactaa

SEQ ID NO: 892 - DNA, 1377 bp, Saccharomyces pastorianus
atggttttagcaatggaaggtagattggcgccagaaattcctgggcttatccaaccaggaaatgtcacacaagatttgaaaatgatggtttgtaaattactaaattctccaaaacccaccaaaactttcccaggtgctcaacccatatcatttcagcattctgatgtagaagagaagctgctttcacatgattattatgtgtgtgaaaaaacagacggtctgcgtgtattaatgtttatagtgataaatcctgtaacgggagagcaagggtgctttatgattgatagagagaataattattatttggtcaacgggtttaggtttcccaggctgcctcagaagaagaaagaagaactgttggaaactttacaagatggaaccctgttggatggtgaattggttattcaaactaatcctatgacaaaactgcaagaattacgttatttaatgtttgattgtcttgctatcaatggtaggtgccttgttcaatctcccacaagttcgaggttagctcatttaggtaaagagttttttaaaccatattttgatctaagagctgcgtaccctaatcgttgtaccacttttccattcaaaatttctatgaagcacatggatttcagttaccaactggtgaaagttgccaagagtctagataaattaccacatctctctgatggtcttatattcactcccgtgaaagcaccatacactgctggcggtaaagattcattgttattgaagtggaagccagaacaagaaaatactgtggatttcaaattaatattagatatcccaatggtggaagacctttctttacctaaagatgatcgaaacagatggtattacaactacgatgctaagccagttttcagcttatatgtttggcaaggtggggcggatgtcaattcgcgtttaaaacattttgatcaaccttttgatagaaaagaatttgaaattctggaaagaacatatagaaaatttgcagaattgagtgtctctgatgaagaatggcaagatttgaaaaacttagaacaaccactaaacggcagaatagtagaatgtgcaaagaaccaagagaccggggcatgggtaatgttaagattcagagatgataagttgaacggtaatcatacgtcagtggttcaaaaagtcttggagagtattaatgattccgtttcattggaggatcttgaggaaattgtcagtgagatcaaaagtcgttgggatgagagaagagccaatggcggtgacggtgtaagatcactaccgcagcatacccaaaatgccatgccaccacttcctaaacaaatgcaaccaccacctacaacgaacaatgatgagccaaaatatgtagatgaggatgattggtcggattga

SEQ ID NO: 893 - DNA, 1935 bp, Saccharomyces pastorianus
atgaatctcaatgagaactaccttgatactgacgtacctaagagacagttgagaccaagtaaaagtggcaatttcgatagtattcccatcgtagctgcaacgtcagagccaaccacgtccgttaacctggatgaaacattttttagaaaggctgcctcaccagtattaataaccgacgaacgttccgtgagtaggtccacatccataaattctttaaacactgcatatttggcatcttcaagacctttttcgcaagtgaggaaatttcaagctagaaataacttattatcagcggatctgataagcaacaatgatgataaatctcaaccgccaaaaatccaaaaaaagaattctgatctttattcagactggggaaacgatataagaagccgcgtggcggaaagtatctattccatggaaacatctgtaaggggatctgaaatacgaagacgaccttatgtgagtaacgaaattcccaacatattcaagctccccaaccctaatcatgttaacgaaccagatgcaagtcaagttttacgtgacaaaaactttcttatattcacatcagcgggtaaaccagtatattctatgcatggtaaagacgaacaaatcatgtcatatactgggcttgtcaatactgtaataagttacttccaagttaatggaccctctgacctgaaaactatatccacatttgcgtctggtcaaaggctcactttcctagataaatcgcccatattattaatggcacagtccgaaagaggcgagtcctcgaatgaactattgaatcaacttgattttctatattcgtatatcctttcttcattaagtgaacgccaactactaagattattttctaaaagggagaattttgacttaagaaactatttagaaactacggatttcgagaatttgaacgaaatttgttcattaatctgtaatagaatgtttcccgacctgcttttgaactcattacaatgcttaccatttcgccattcttcaagattgaaattacaagatttaatgcttcaacaattggataaaaggcaggatatccccaggggcaccttgttatatgggttaataattgcgcctcaaaataagctatgctgcgttcttcgacccaagggccatacattgcacaccacagacttgcatcttttgttttgtttaatatcccatcaatttcaaaatttggacgaaactcaagaactttgggtgcccatatgtttccccaaattcaattccagcggatttctttattgctatatcaaatttttaccaaatgatgctgataacaatgagaaatcggcattagtcttaataagtgcacaaaaagatgcttttttctctttaaaaacattcagcgatgagttagttgctaaactcgaaggcgagaggctattgaaaaaaataaatgcttcaaaagggttcaaactaagcgatatcccagcacccatggtccatcattttatatacaaatcgaaacaaaacgttcagtatgtcatgccgcatttcgaaatcaacagcagcatttcattggattcgccgcagggattagaatatgaattgaaattgaagacgtattatcagcaattgcatggcacggtggtaagagataacggaaatcttttgagtaggtccatattaaatttcgttaaatggagctccaaagacaaagaagacacaacagtggacggaatgggaatgactttttctgaactggacgaatacatcatcggaaactcgtcatttgaacaggaatccgtcaatatgctaggaatggcatgggtgacgcccaagtttgagttatatctcattggtaacaacggagttgttgacaagaaagttttattcaagagtgcgagaaaggtagtcaattggtgtcaaaaacacgagtcaaggctgtttatcagcgacggggccgtcttttga

SEQ ID NO: 894 - DNA, 381 bp, Saccharomyces pastorianus
atgctttatttaagtgacatcgaagaggaaggtacatctgggaacgaaacaaagtatagcttctcagaggttttgttgttttccaacacacaggaaaatctcatgaccatagttggagaattacatacgctttcggatcgtgtagatcattataaaattgatcctgtatcaagggaagttacagtcacaacacttccatctttattggctcttttgtcagaaaagagagaccaggcaagacgcgtttacagagatgttctctcaataaaaatgtcagaactaaactgggacgtggacaagctcttcgcgcagttgcaagaagagttaacgagaactgacgagtccctttccatgtaccctagaagaaggtcattatactag

SEQ ID NO: 895 - DNA, 2301 bp, Saccharomyces pastorianus
atgggttccaaaagaagattttcgtcagagcatccagatccagttgaaacttctattccagagcaggctgctgagattgctgaggaattaacgaaacagcatcctcctccatctgcagaagcgctagtgcaccatgatgccggtgagtttaaaggaatagaacgtcatcacactaccgcagagcaagcccaaaatttggaaaatggagtggtaaatccgtttactggcagagagttcacaccaaaatatgtcgatatcttaaagattagaagagaattgcctgtccatgctcaaagagatgagtttttgaaaatttatcaaaacaaccaaatcatggtcttcgttggtgaaaccggttccggtaagactacgcaaattccccaatttgtcttattcgatgagatgccccatttagaaaacacgcaagttgcatgtacccagcctcgtcgtgttgccgcaatgtctgttgcacagagagtcgcagaagaaatggatgtcaagctgggtgaagaagtcggttactccattagattcgaaaacaagacctctaataagaccatattgaaatatatgactgatggtatgttgttgagagaggcaatggatgatcacgatttatcccgttactcttgtattattttagatgaagcgcacgaacgtactttagctactgatattttaatgggtcttctaaagcaagtaatcaagagaagacctgacttgaaaatcattatcatgtctgccactttagatgctgaaaagttccaacgttacttcaacgatgccccattacttgctgttccaggtagaacttatccagttgaactatactatactcctgaattccaaagagactatttagattcggccattcgtactgttttacagattcacgcgacagaagaagctggtgatattttgttgtttttaacaggtgaagatgaaattgaagacgcagtaaggaagatttctttagagggtgaccagttagtcagagaagaaggatgcggaccattgtctgtgtaccccttatatggttcgttaccaccacaccaacagcaaagaattttcgaagcagctccagaatcacataatggtagaccgggtagaaaaattgtcatctctaccaatattgctgaaacttccttaacaattgatggtattgtctatgttgtcgacccaggtttctcaaagcaaaaggtttacaatcccagaatcagagttgagtctttgttagtttctcctatctccaaggcctctgcccaacaaagagctggtcgtgctggtcgtacaagacctggtaaatgtttcagattatacactgaggaagcatttcaaaaagaactgatagaacaaagttatccagaaattttacgttccaatttatcttctactgttttagaactgaaaaaactgggtattgatgatttagtgcatttcgactttatggatccaccggcccctgaaacaatgatgagagctcttgaggagttgaactatttggcctgtttagatgatgaaggtaacttaacatccttgggtaggttggcgtctcaattcccattagatccaatgttagctgtgatgttgattggttctttcgaattccaatgttcccaagaaatgctaaccatagtggccatgttatcagtaccaaatgtattcattcgtccaacaaaggacaagaaacgcgcagatgatgccaagaacatattcgctcacccagatggtgatcatatcactttactaaacgtatatcacgggttcaagtcagacgaggcttatgaatatggtattcataaatggtgccgtgatcactacttaaatcacagatctatttctgctgcagataacatccgctctcaactggaaagattaatgaaccgttacaacttagaactaaacactacagattatgatagccccaaatatttcgataacatcagaaaggctcttgcctctgggttcttcatgcaagtagcaaagaagagatctggtgcaaagggatacatcacagtgaaagataaccaagacgtcttgatccaccccagtacagttcttggtcatgacgcagaatgggtcatttacaatgaattcgtcctcacgtcgaagaattacataagaacagtcacatctgttaggcccgaatggctaattgaaatagcacctgcatactacgatatggacaatttccaaaagggtgatgtcaaattgtcgctagaaagaatcaaggaaaaagtagatagattgaacgacttgaagcaagataaaaccaaaaagagcaagcactctaagaaataa

SEQ ID NO: 896 - DNA, 798 bp, Saccharomyces pastorianus
atggaactagcctcaataaaggacttggaaacggatcaagcaaaaatttgcttggttaaggcattaaaggaatccgtatgtaagactcttttagaattcgtggatattcaaatcgagtgttttatgtatcccaatgatccaaagcgttttacgagaatattcaaagacaataaaatgttaaatgaaacatgcaataaagaaggtaaagcaaaaaactacccatcatcaatgggtattggtcattcagccctattttctttgatctacataagacagaaaacaaactcactacgatcgttgaacgaacaggaacggtccccaaccgagcttgttgaagatctaaataaaaagctaaaaagcatcggcgaagtctataatcacctcaatgaactatatcattcttacttaatggtaaagtacaataacataggccatcaaaaactactaggtgatttcgtcatccaaagtgacttcatgtttgacatcctccgcaggtacgctacgattacatcttcagtagcgaagagcagcgagaacaacagccgtctggtaggtattactaatcatttcatcgaagataccaatatattttataaacgcataatcagtaattccaacgcatacgcggaatatgatctcgtgaaacatggtgtaaatagaaattcaagtgaagaaacattagtcgaacttgaattcaaaaaactggacgtttcaggcatgcatctcgacgatgaatttgatgattttctacagaataggaaagtgtctctgaaaattacccataggagagtcatatag

SEQ ID NO: 897 - DNA, 1839 bp, Saccharomyces pastorianus
atgccagagaatcccagagataagagcagtgcagcgaacagcggcaatcgttctgtactttcaattgcgtctccaacaaaactgaacattttatcttcggattggtctagaaatcaaggtaaagtttctaaaggatcactgaaacgatcaagttcactaagtattagaaaccccaaacgaactagtttacaagcatctacgggttctatctacgcaagacctaagattaccattggagcaccaccattggtcagacgagattcttcattttttaaagaagagttcgaggctaaaaaagacaaaacaaatttttctacatatttgtcccgttcatattccacaaatggactagacagtacaactctccaaacatccttatctcaaccggcaacgtctagagattctgatgagcaatttacggtagcagcagacagatatattccaattctacagggcgcttcccaaaacaaggtcgatcctgaaaccttgcatgaagcactacctcctccgaatgcttccccaatcacgcatttgagggctcaaactaaaatagtctttaaacaaagcgtagccgaggcatgcggactagatatgaatagaagaatactacaatatatgcctgagccaccaaaatgctcttcgtcaaggcaaaaaagttatattatgaagaaaaggacacattatagttaccagcaagaacaaaagattccagacttaatcaaattaagaaagatcaatactaatcctgaaagaatccttgatgctcctggtttccaagacgacttttatttaaacttgttaagctggtctaagaaaaatgttttggctatagcattggacacggcactatatctatggaatgccacttctggggatgtgtccttgttaacggattttgaaaataccacaatatgtagcgtcacttggtctgacgatgattgccacatttccatcggtaaggaggatgggaacactgaaatttgggacatagagaccatgtctttgataagaactatgagatctggcttaggggtacgtattggctccctgtcttggttagatactctagttgcaacaggcagccgtagtggggaaatccaaatcaatgacgtcaggatcaaacagcatatcgtatctacatgggaagaacatactggcgaagtctgtggtttgagctataaaagtgatggattgcaacttgcttccggtggtaatgacaacaccgtaatgatttgggatacgagaacatctttgcctcagttttcaaagaaaacgcacaccgctgctgtgaaagcactgagttggtgtccatactctccgaatatcctagcctctggaggtggacaaacggataaacatatccatttttggaacagtattacaggcgcaagagtaggttcaatcaatactggatctcaggtgagctctttacactggggccaaagttatatgtccaccagtggtggcacaatgaataaagagattgtcgccacagggggcaatcccgagaatgcaatctctgtctataactatgagacaaaattcaaagtagctgaagtagttcatgctcatgaagcaagaatatgttgttcgcaattatccccagatggaaccacattggccacggtaggtggggacgaaaacctaaaattttacaaaatattcgatccaaggagcactgaaagacccagggaaaaaggcagcgtcatggatggtatgttaggtatgattggcaaagaagaatgtggcggaaatgacaaagagaatcgctccaagaattcaaatgagatccatacaggacggccttcttcaagcaccagccagttcttgatcaggtaa

SEQ ID NO: 898 - DNA, 969 bp, Saccharomyces pastorianus
atgaagcctgtgcaggactctcaagaaaagatatctattgaacagcaattggctgtagaatcaatcagaaagttcttgaactcaaagacctcttatgatgtgctacctgtttcttaccgtctaattgtcttagacacttcattactagtgaaaaaatcattgaatgtacttttgcaaaacagtattgtctccgccccattatgggactctaagacgtcaagatttgctgggctactaactaccagtgattttatcaatgtaattcaatattacttctctaacccagacaagtttgaattagtggacaaactacaattagacggattgaaggatatagagcgggctctcggagttgaccaattggatacagcttccattcatccatctagacccttatttgaagcgtgtcttaagatgctagaatcaaggagtggtagaataccattgatcgaccaagacgaagagactcatagagaaattgttgtcagtgttcttacccaatatagaatcttgaagtttgttgctctgaattgtagagagactcatttcctaaagatcccaattggggatttgaacatcattacacaacaaaatataaaaagctgtcaaatgacaaccccagtcattgacgtcatccaattgcttactcaaggccgcgtttcttctgtccctatcgtcgatgaaaacggttacttggtcaacgtatatgaagcatacgatgttctgggtttgataaaggggggcatctacaacgacttgtcactaagcgttggagaagcccttatgagaagaagtgacgatttcgaaggtgtctatacatgcaccaagaacgataaactatctactattatggataacatcagaaaggcaagagttcatagattttttgtagtcgatgacattggacgattgattggtgtcttgacgctaagcgatatcctcaaatacattcttctgggtaacaactga

SEQ ID NO: 899 - DNA, 2178 bp, Saccharomyces pastorianus
atgccacaatctgcaccaattcaagaagtacagcgcgtatcatgggataacaaacctgctttgaagcaaataactctccgagcgaccatagcaggtatcattataggatctttggtgctaacatcaaactttcaatttggcctacagactggttgggtttctatgatgtcgttgccatcggcattattagcatgcgcattcttcaagaacatatggcctctgatttttccaaatgacagaccattcagtgatgtagagaatgtatatgtgcaaagtatggctgtagctgtcggaacaggcccattggcctttgggtttgttggtgttatacccgccattgagaagttccttactaaccacgagagtggtggactaagggaacaaggacaatcattcagctttagagaattattgatatggtccaccgcattagcatttttcggcattttctttgcagttcctcttagaaagcaagtaattgtcagagagaaactgccctttcctagtggcagcgcaacagctactttaatttcggtgttgaatgggacagagattttacaagaggtttccaaatcagagctattggaaatgagacaaaggagattgaacgaatgtcctgaggtgttacaaccgaacagcgatccagaagaggctgattatttaataaactcttctattagtgatcttggcgattactcggcaaccagccaggacaatggctccgttctctccgctggtgctgaaaactataaggcaaacattcttattttattcaaaactttcattgcttcatcactctataccatggtgtcatattttataccagtgatacgatccattccagtatttgggaaatacctctcgaataattatctctggaatattcaaccatcgcctgcatatataggtcaaggaataataatgggtcttccaacagtgtcatacatgctcattggctgctttttaggttgggcagtattagctccgctagcaaaatataaagggtgggtgccaccggacgctgatgttcatgactgggaaaagggcgtacaaggatggattctttggtcgtccctttccatcatggttgccgacagtgttgtcgctttcattgttgtgactgtaaaatccatcgtaaagttcattctcattgatgataaagctactttgttgaacactattatcgatgacacatttcaatccatgctattagaagaagagcgtgccatcaacagcagtagaagaaatacaaatgtagatggaagacaagatacagtaagattagtaagtatagataacgatattgaagtagactctaagcatctagttcgttatactaccgttatcagtggatgcctaatatcctccattatatgcataggatccataatatatctgtttggaatagaagtcatccctctctatgccattattaccgctttgatacttgccctgtttctatccattcttggtattcgagcacttggagaaactgatttgaatcctgtgagcggaattggtaagatttctcagctgatatttgctttcattatacccaggaatagacccggatcggtattgatgaatgtggtatccggaggtattgcagaagcttccgctcaacaagcaggtgatttaatgcaggatttgaagacagggcaccttctcggcgcctctccaagggctcaattctgcgcccagttgatcggagcctgttggtctgttattttatccagtttcatgtacatgtgctacaataaggtttatacaatccccagtgaacagttcaggatacctacggcagtggtatggatagactgtgcaagacttgttactggtaaaggccttccagataaagctttagaatgctctatgattcttggggctatatttgctgtactatcgctgatcagaaacacttacagggattatggctatggatggattatatatattccttccggagtagcagtcggtgttggtatatttaattcccccagctttaccatcgcaagattcatcggtgggttggcttcacatctttggttaaaaaaacacaggggtgatttgaatgcgaaaaccaaaatgattgtattcagttcaggattggttctgggcgagggtatatttagcgtagtaaacatggttttcacttgcttgaatgtcccccattattaa

SEQ ID NO: 900 - DNA, 1551 bp, Saccharomyces pastorianus
atgtccacacaacagcagtcatacacaatttggtctccacaagacactgtgaaggatgtcgccgaatcgcttgggttagaaaatatcaatgatgatgtcttgaaggcgcttgccatggatgtggaataccgtattctagagatcattgaacaagcggttaagttcaaaagacattctaagagggatgtgttgactacagatgatgtatcgaaggcactgcgggttttgaacgtggaacctttatatgggtattatgacggctcagaggttaatagagctatatcatttagtaaagttaatacatccggagggcagtcgatctactacttagacgaagaagaagtggattttgataagctgataaatgagccattaccgcaagttccccgtctaccaacgtttactacacattggctcgctgttgaaggtgttcaacctgccataatccaaaatccaaatttgaatgatataagagtatctcaacccccattcattaggggtgctattgtcactgcgttgaatgataatagttttcaaactcctgcatcttcatctgctacaaacgcttccgtgacagataccagtgcctctcagcatctgtctaacgtcaaaccaggacagaatactgaagttaaaccattggtgaaacatgtgctatccaaagaattacaaatctactttaacaaggttatttcaactttaacagcgaagaatcaaaacgatgaaagcgtacagcatatgaagcaagcagctctgacatctttgaagactgatagtggtctccaccaattggttccttattttatccagtttattgctgaacaaatcacccaaaacctttctgatttgcaactactgacgacaatcttagaaatgatatactctttgttgagtaattcctctattttcttggacccttacattcattcattgatgccctcgatattaacattgctcctggctaaaaaactaggcggatcaccaaaagatgaatcgccgcaagaaattcatgaatttttggaaagaacaaatgcactacgtgattttgctgcatccttactagactacgtattgagaaaattcccacaagcctataaatcattaaagccaagagtaaccagaacactattaaaaacattcttggatataaatcgtgtctttgggacttattatgggtgtttaaagggtgtgtcagttttagaaggtgaatccataaggttttttttaggtaacctgaataactgggcgcgtttagtattcaatgaaactggtattactttagaaaatgtagaggagcatttgaacaaggaagcgaattcgactaggacaaaatttactaaagaagagacccaaattttggtggatactgtcattagcgcattgttagttttaaaaaaggatttgccagacttgtatgaaggtaaaggtgaagaagtcacagatgaagataaagaaaaattggtagagaggtgcggtgtcaccatcgggtatcatattttgaaaagagatgatgcaaaagaattaatcagctccattttcttcggtgaataa

SEQ ID NO: 901 - DNA, 1872 bp, Saccharomyces pastorianus
atgttgtcgagatacaatcgagttattgacatcgagggcggtaacgctgaaatttcgttacccattgtcaacttcccaccatttagacttagagcccagctgattgaaaaagatcccgttgtttggttgcatttattagagacatatgtaacttacttggagtatttgatgcaaggaactaacattgaactattgaatgattctacacttgatcatttccgtctatttttaagaagttatctacatgaaattgcggatgaagaagggaagttattaagtctcggtatcaatcatgatgtgtctgagcagttgcatctactgaagggctggatattctcattggttaagaagtgtggcctgctgcatcttcaaatatttggtgattctctttgggacatggttaagatatacgtcaaacgcaaccctgattctattcgtggtttgattgacggttcattgaaaccacaaattaacacgcaacgtgtacagttggacaaaacttaccaacttcaacagcatctaaaacagttgatagaatccggaaaattcaaaaagctagatttaaaatgtgtcgaagatctactaacagctaagtctatacaaccaaataaattcgcggaaaacttctttacagcgagctggattgaagttttagaggcattatggtcgaagggccaaggcagggcccatgaaatttctaaaaaattaattatcattaatatattttctgtttctgccaaccatttactgaaaataacccaagaattgggtataagtaatttggaaactttagcactatacccactattaggaacaatacttataaatgataatatccacaaaagacttcctgatttgaaaagcaagctccttttcttaaattttggatcactgtcaatgaataatggaaccagtactgaacatccatcatcaacaagtaacgaaattaatgaggatcatgtattgtcattaatggaattgtttccccaattctccaaatatcaattatcacaaacccttcttgcatatgatgataacattgagctagtgacgaataaaatatttgaagatcctactattattgaagcattccccagagaatccggagaagaagaaacaagaccaatttcgagcggaaacaacactgcttttacggatgaactaagcttatcaaacagagttcctaactctaagaataaggacttagataagaagattatctcaggacacgttccagatgaattaagaaataaaactctaacaagggcattgaaacttttatatgaaggtgatgaagatgaaagggatgatacttatgatgaagctgatgtgagccgatctgatttatcgaaaagaatcaacgttcaagaagacgagggaaaaagccaaaagcaggatgacacaagtgaagagaaacaaccttcgcagtacgatgctgttgaagcttacttatgggaattattaaaacaggaccgaaccttgtttgaaagatctaagagaggttcaaaagtaaggaaatctatgaaagaacacacttcatggtcagatgaacaaattgaaggctggtcgcgaatgttggagagatcacctcaacgagccaggcttcttgaagaaaaattcatgtttaagggtaatttcaaatctggtaagacgtcgtacgttcataaccgtgatgataattccaaagaatctactaaggaacaaacgaaaaagaaagcaccaaaggttatcaagaaggatgaaccacagtctgttgaaaagacaaaaagacaacatgccaaaaatgaaaagaagaaaggagcaagagctaatcacaatcgtaagggaggtcatgataagaagttagctcgtgttggaggtaacggcgtttga

SEQ ID NO: 902 - DNA, 426 bp, Saccharomyces pastorianus
atggggttgtgcggaagtaaatctcaaccaatgccctcgcaaaccacaacagtaacaccgagaacaagaacaaaaccagtcaatcgtggtactacgaacgcaaaagaacaacttcgacaaaaagagaatgaaagtggaaagaagaaaaagtcacctttaaaaagcacaacaggccagcctgtaaaaaagagagaaggtagcaaactcagtggcgcaagtgatacgagcaaagataaagtaagtcccaaagaagctgcaagactagcagccgagaaaagatttcaagaaacaaatgagaagtataataaaggtgagttgggtaagaaactggcgcaagaacgtgccaagtctcacaagactcgtttgatagaagagactgaaaaaaagcatgctgcacaagaaagagaaaacatgatatatgattga

SEQ ID NO: 903 - DNA, 450 bp, Saccharomyces pastorianus
atgtcagctaccagggccaacaaggacattttcacactattcgacaagaagggccagggcgccatcgccaaggactcgttgggagactatttgagggccattggctacaaccccaccaaccagttcgtgcaggacatcttgaacgcggactccagcttgagagatgcctccagcttgacattggaccagatctccagcctgattgaggccaacgggaaggaattagacgccaccaccagtgcaaagactgaggacttcatcaaggcgtttcaggtgtttgacaaggagggcacaggaagggtctctgtcggtgatttgaggtacatgcttacaggcctgggagaaaagttgactgacgctgaagtggacgagctgttgaagggcgttgaagtggacaacaacggccaaatagactacaagaagttcatcgaggacgtcttaagacaatga

SEQ ID NO: 904 - DNA, 1053 bp, Saccharomyces pastorianus
atgcaaccttttgatagtgggcacgatgatctggttcatgatgtcgtttatgacttttatggtagacatgtggcaacctgctcttccgatcagcatattaaagttttcaaattggataaggaaacaagcaattgggagctaagtgactcctggagagctcatggcagtagcattgtcgccattgattgggcaagtccagaatacgggcgcattattgcatcagcctcgtatgataaaacagtaaagttatgggaagaagaccctgaccaagaagaatgctcaggtcgtcgttggaacagactgtgtacattgaatgattccaaaggatcgctctacagtgtaaaatttgcacccgcacatttaggtttaaaattagcatgcataggtaacgatggaacgctcagaatttacgatgctttagaaccttctgacttgagatcatggacattaacatcagaaatcaaagtgctatctataccaccagcaaaccatctacagtctgacttttgtctctcttggtgtccttctagattttctcctgaaaagcttgcagtatcttcattggagcaagcgattatttaccaaagaggcaaagatggtaaactgcatattgcagccagacttcccggtcataaaagtttaataagaagtgtaagctgggctccttccattggcagatggtatcaactgattgccacaggttgcaaagatggtaagattcgcattttcaaaatcacagaaaagttattaggtgctatgacttcagaggagtcttctagcaactcaaacctattcgacaacggtactgatgtcgacatggatggacaaataaggccaagttcaaacaacgaagagaagggcgaactacaatcaagcttggaggttgaactattaagtgaacatgatgaccataacggcgaagtctggtctgtgtcttggaacttaacaggtacaatactaagtagcgctggcgacgacgggaaggtgcgtttatggaaagcaacctattcaaatgaatttaagtgtatgtctgtaattactgcccagcaatga

SEQ ID NO: 905 - DNA, 1923 bp, Saccharomyces pastorianus
atgccaccaaaagaagctcctaagaaatggaaggcgccaaaagggccaaaacctaatcaccgcaagaataagaataagcttgagttgggaagagccattaaatatgcccgtcaaaaagaaaactctatcgaatatttacctgatggtgaaatgaggttcactaccgataagcatgaagctaactgggtcaaattaagatctgtgactcaggaatcggctttggatgagtttttaagtacagctgcactagcagataaggatttcacagctgataggcactcaagtgtcaaaatcattagaatggacagtggtgatgattccgcaacgtctcaaggattttctctaactaatgagcaacgtggtaccctaaatgcaaagcagagggcactctccaaagatttaattgttccaagaagacctgcctgggatgaggacatgacaaagcttcaactggatagacaagaaaaggaggcatttttggagtggagaagaaaattagcacatttgcaagaaagcaatgaagatctgctgttaacacctttcgaaagaaatattgaagtttggaagcaattatggagagtggttgaaagatcagatttggttgttcaaattgtggatgctagagatcctttattgtttagatctgtcgatttagaaagatatgtgaaagaatcagatgaaagaaaggaaaatttactgttagtcaataaagccgatttattaacaaaaaaacagcgtatcacttgggccaagtactttatttcaaaaaatatctcgttcacattctattctgcattgagagccaaccaactgttggaattacaaaaggaactgggagatgattaccaagagcaagaaattgaagaagctgatgaagaagaattagatgttgatgaagaaattttggaaaaagttaaaattttgtctattgatcaattggaagaactgtttttatcaaaggcaccaaaagaacctttactgcaacctttgcctggccaatcctctttgattaatattggtttggttggttatccaaatgttggtaaatcttcaacaatcaattcccttgtgggtgccaagaaagtttcagtttcatccacgcctggtaaaaccaagcatttccaaaccatcaaattatctgattcggtcatgctatgtgattgtcctggtcttgtctttccaaattttgcctacaacaaaggtgaacttgtatgtaacggtgttttgccgatcgatcagttacgtgattacatcggcccagcaggtttggtagcagaaagaatacctaagtactacattgaagctatctatggtattcacattcaaaccaaaactaaggatgaaggtgggaatggagaaattccaactgctcaagaactgttagttgcgtacgcaagagcacgtggttacatgactcaaggttacggttcagccgatgaatcgagagcaagtcgttatatattgaaagattacgtcaacgggaaattactgtatatcaatcctccacctcatcttgaagacgatacgccttacaccagagaagaaagtgaagaattcaacaaggaactgtatgtctttgacaggctaccggaaaccagaaaagagcaagtgcaaagtgctgccaaagctaaaggtatcactgttgtggatttagctcgtgatttgaatcaactgacattctctgctcatactggtggtgacattgagaaggaagctaaatctgtcacacatggtggtaagcaagccgcgttatacaatgcggctgaagacttggatagagattttttcaggatgaacaacgttgaaggtagattaagtacgccattccacaaaattcaaaataatacggatggtaagagacacaacaaaaaaaataagagcaaaaatgccaagagcaaggttttcagcattgataacaactaa

SEQ ID NO: 906 - DNA, 1449 bp, Saccharomyces pastorianus
atggctaaaagaacgaacatcgcaaatgggggttcccaggatggccaccgagttaagaaaatgtcgaagactcacgcctctcacatcataaacacccaagaagactacaagcatatgtacttgagtgttcagccgttggatattttttgttggggttctggttctatgtgtgaacttggcttgggcccactcgccaagaacaaggaagttaaaagaccaaggttgaatccatttttgcctcgcgatgaggcaaagatcatttcttttgcagtcggcggtatgcacacattagcactcgacgagaacagcaatgtgtggtcatggggctgcaacgatgtgggcgccttgggtagggacacttctggtgttacggagcaactaaaggacatggatgctgataattcaagtgatgacgaagatggtgatctgaacgagtcagaatccactccagctacaattcctagagagcttttcccgcctttagcaaaaggttacagtattatacaattggcagctacagataacatgagttgtgccttattcagtaatggtgaagtgtatgcatggggtactttccgttgtaatgaaggtatcctagggttctaccaagaaaaaattaaaattcaaaacactccatggaaagtgcctactttttctaagtacgatattgttcaactggctcctggcaaggaccacattcttttcctagacgaagaaggtatggtatttgcttggggtaacggtcagcaaaatcaattaggaagaaaagttatggaaaggtttcgcctaaagactttagatccaagaccgttcggattaagacatgtcaagtacattgcatcgggggaaaatcattgttttgctttgacaaaggataacaagttagtcagttgggggttgaaccaatttggtcagtgcggtgtctcagagaacgtggaagatggtgcacttgttactaaaccactaaaggtagcattgcccgagaatgttgtagtaagaagtattgctgctggtgaacaccattccctggtcttatctcaagacggcgatttgtactcttttggtagattggacatgtttgaaattggtattccaaaaaacgatttacctgaatatacttataaagacgttcacaataaggcccgttccgtgccacttccaacaaaattgaaaggtgttcccaagttcaaaactgttgcagcaggttctcaccattcggttgctgttgcccaaaatggtattgcctattcttgggggttcggcgaaacctacgccgttggattagggccttctgatgaggataccgaaattccaactagaatcaaaaataccgcaactcaggatcataacatcattttggccggatgcggcggtcaattttctgtatctggtggggtaaaactgtctgacgaagaagccgaaaaaagagccgacgaaatggatgactaa

SEQ ID NO: 907 - DNA, 1734 bp, Saccharomyces pastorianus
atgaacctttttgatgttgctgattactatataaacaagatcgtgacgtcccggtcaaaattgagcgtggctaaagtcaacgagcaccaacgaattaaggttttactgctagataacaacaccactcctaccatatccttatgtgctactcaaagtgacttgctaaagcaagaaatatacttagttgataaaatagaaaacgaagagcgtgaggtctcgaggcatttaagatgcttggtctacgttaaacccacagaaggaacgttgcagtgcctcttgcgtgagttacgaaatcctcgctatggtgaatatcaaattttcttcaataatatagtttcgaaatcccaattggaaaggctagcggaatctgatgacatggaggcagtcaccaaggtggaagaaatatttcaggatttttttattttaaatcaggatttattttcgttggatttgcaaccgaaggactttttaagtaacacattggtttggagtgagccagggctgacagaatgtagtaatagtctagtatccgtgcttttgtctctaaaaattaaaccagaaattaggttcgaaggtgccagtaaactgtgtgaaaggttagccaaagaagtgtcttatgaaattggcaagaatgagaggacatttttcgatttcccagtgatggactctactcctattttgctgattttagaccgtaaaactgatcctataactcctttattgcaaccttggacttatcaatcaatgatcaacgagtatataggtgttaagcgaaatattgttgatctatcaaaagtacctaaaatcgataaggatctagaaaaggtcaccttatcctccaaacaagacgctttcttcagagacaccatgtacttaaatttcggggagttgggtgacaaagtaaaacaatacgtgaccacttacaaagataagacacaaacaaatagtcaaataaataccattgaagatatcaaaaacttcattgagaaatatcctgagttcaggaaactgtctggaaatgtggcaaagcatatggctatagttggcgaactagataggcaattaaagataagaaatatatgggaggttagtgaaatagaacaaaacttatcttcacatgatgcgaacgaagaagatttttctgaattgatcaagctacttcaaagtgaaactgtggataagtactacaagctaaagcttgcatgtatttactctctaaataaccatgccaattcagataaaattcgccaactggttgagcttttaacgcaggatttctctccggaagacgtcaattttttccacagattcaaatcgctcttcaaccgtcacgataaaaaggcccaaagtaatcatgacaaagacgatatactaagtgaactggcaaggagatttaacagtaaaatgagctctaaaggtaacacagctgaaaatgtatacatgcaacatatcccggaaatctcatcattgctaacagagctctccaaaaacacactgtccagagatcgttttaaaacggtagatattcaaaatcatgggatgactcaaactcagctcagaaatgatatacctcaggatgtcattttattttttgttggaggtgtaacttatgaggaagcaaggttggttcatgaatttaatgaaacgatgaatagcagaatgagagttgtcttaggtggcacatctatagtgtctactaatcaatatatggactcccttcgggcaatgaaatag

SEQ ID NO: 908 - DNA, 825 bp, Saccharomyces pastorianus
atgaaggagagtaattctgatttgaggaaaccttcggatgttgcggcactatcaattatccttacaggttcggccttaactttgatctatacatataaaaggtatctgactcaatttaaaaggacaaacgatattccacaacgcattttccacaaacgatggctttatggtaaagtcacatccgttggcgacggtgataatttccattttttccacatgcctggcggtataagaggcggatggggttggttacgatccatccctcaaatggtcaagaacgatcctaccgcagaaaaacttattagcggtgacgagaacttgagctttttcaatttgaattggatcatacatagaggatctagtaaaagccaaatacaaaaaactaaaagtcagtttttgaaattaaatgtaccctacaagaatagaaaaaacctaccgacgattcccattagattatgtggagtcgatgctccagaaagagcacatttcggtaacccagcgcagccgtttggcaacgaagcgttaatctggttacaaaaccggattttaggtaaaaaattatgggtgaaacctttgtctatagaccagtataatcgttgtgtggctcgagtgtcgtattgggactggctaggtggttggaaagatttgagcttggaaatggtcaaggatggattagcggttgtctacgaaggtaaggtaaatgcagaatttgacggtagagaagataaatatcgatattatgaatttttggcgaggtctaggaaaaagggactatggatccaaagaaaagttgaaacgcctggtgagtataaaaaacgtatttaa

SEQ ID NO: 909 - DNA, 1683 bp, Saccharomyces pastorianus
atgtcgctggttagcatattggctcccctagtcacttcagaaggtttagattcgaggatcaaaccctcatcgcaaaagggtacttctcccccaaccaaaccatcgctatggaaaaccaccgaattcaaattctactacttggtgtttttagttgcagtgcccttaatgttccgtgctggactgcaggctagttctttagacaatccaaattacactcggtatgaacgtctcttgtcccaaggctggttatttggtagaaaagtggataatagcgattcccaatataggttcttcagagacaattttgtgctgttatcgactttaatgatagctcatacctccataaaacgtattgtgatttattcaaccaatatttcaaaattaagatttgatctaatatttggtttgatttttttagtggctgcacatggtgtcaattcaatgagaatattagcccatatgttgatactgtatacactttctcacatgttgaaaaaccatagaaaaatagccacaattagtatttgggcttacggtatttccactcttttcatcaacgacaatttcagatcctatccattcggcagcgtttgttctcttttgagtccactagataactggtatagggggattattccaagatgggatgtttttttcaatttcactctcttaagagtcttgagttataatatggactttttagaaagatgggagaattttaaaactaagaagagttcaacttacgaatcaaaagaagctaaatcagccattttgcttgacgagcgtgccagattaaccgcagctcacccaattcaagattacagtttgatgaactatataggctatgtcacatacactccacttttcattgctggccccattataacttttaatgattacatttaccagtcaaaacatattctaccatcaatcaatttcaagtttatcttctactatgcagtgagattcgttattgctatcctatctatggaattcatcttgcacttcctttacgtcgtggcaatttcaaaaacaaaagcttgggaaaatgacacgcctttccaaatttccatgatcggtttattcaatttaaatattatttggctaaaacttttaatcccatggagattgtttagactatgggctcttattgatggaatcgatacacctgaaaacatgatcaggtgtgtggataacaactacagtgcattggcgttctggagagcctggcatagaagctacaataaatgggttgtccgttatatttacattcctctcggcggctcaaaaaatagaatcctaacctctttagccgttttttccttcgtggccatatggcatgatattcaattaaaattattattctggggttggttgatcgttctcttccttttgcctgaaatttttgctactcaatttctctctcattattccgacactatctggtacagacacgtttgtgcgattggtggtgttttcaacatatgggtgatgatgatcgccaatctatttgggttttgtttgggctctgatggtactaagaaattgctaagcgatatgttctgtaccgtttcaggttttaaatttgtcattttggcaagtgctagtttatttgttgctgtgcaagtaatgttcgaaattagagaagaagaaaaaaggcacggaatcgtcttgaaatgttga

SEQ ID NO: 910 - DNA, 1152 bp, Saccharomyces pastorianus
atggacgtctcgttcttaaccaaaattgttcagataaatggaactcagttcaagatactacttcagaatggacaaggtgcgtgtgcgctgattgcattggctaacgtcttattgatctcaccggtccatgctcgctatgctctggggctctccaatctggtgagaagcaaagaaacggttacgctaaatgagcttgtgcaaactctagccgatatcggtgttcaaaatcccaacggctccaatgttgatagagaacagttattacagattcttccccagctatatagtgggctgaacattaacccggaattcaatgggtctttcgaagatggaatggaaatgtcaatttttagactgtacaacgtcggtatcgtccatggctggataatagatggagacaatgatcctagcgcttacgaacatgtctccaaatattcctatatgggtgcccaaaaggccttagtgcagtcatatgagattcagaaaaacaatgctcaatttgaaaacgctgaacaaatccaatcagactcaacttacttgaaatcctttttggcgaggtctgccactcaattgactgattacgggttgaatcatctgagagaaattttagtggaaaggtcctatgccgtgctgttcagaaatgatcatttttgcacactgtataagaataatagcgaactatttactttagttaccgacccgacttacagaaaccgcagggacataacttggcaatcgctgaagtctgttaacggatctcaagatgcattttatacgggcaactttattcctacaagtctggaaagaactaatacaacaactacaggacagaatgaatcctacatctccaacccctttagtgatcagcacgcaggtagagcagccagtgatcaagctaatagcggggcaagtgggatgcaacagatcgaagatgacgaggagttggctaggaggttacaagagcaggaagacatgcgggtggcaaacaatatgcagaatggttatgcaaatcgtagtgggaacaatccaagagaaagatttgaaagacccgagaaaccttcaaagaaaagcaagttcctctcccacaacggaaataaagatggtaaagacaggaaaagagacaagttgaagaaaagctgtgtcatcatgtga

SEQ ID NO: 911 - DNA, 1557 bp, Saccharomyces pastorianus
atgacaaaagaagaaatcaaagaaaaaaagagaagagttgtagatgaacaagtaatcgaaaagaagaagagtaagaaacataagaaggacaaaaaggaaaagaaggataaaaagcacaaaaaggacaagaagagtgaggacaagcaagttgaagcaccaaagaaagaagctgagaagaaaatagaatctacccctgcagctactaacgaattttacgttcagagtgaagccttgactaatgttccacaatccgaaattgacgactttttcaaagaaaacgaagttgccattgaagatccattaaagctgaatttgcgtcctttattatcatttgaccatctttccttggactcctctattcaagccgaaatttctaagttcccaaagccaacacctattcaagcagttgcctggccatatttgttgtctggtaaggatgtcgttggtgttgctgaaaccggttctggtaagacatttgcctttggtgtcccagctattagccatttaatgaacgacaaaaataaaagaggtattcaggttctggtcgtttccccaactagagaattggcctctcaaatttacgataatttgatcattctgaccaacaaagttggcttgcaatgttgttgtgtatatggtggtgtcccaaaggacgaacagagaaaccagctgaaaaaatctcaagtagtagttgctacacctggtagattattagatttattacaggaaggttccgttgacctctctcaggtaaactacttggttttagatgaaggtgacaggatgttggagaaaggttttgaagaagatattaagaatatcattagagaaactgatgcgtccaaaagacagactttgatgtttaccgctacttggccaaaggaagtccgtgagttggcctcttctttcatgaaggacccaatcagggtatctattggtaacacagatcaattaactgctaacaagaaaattacacaaatcgttgaagttgtggatccccgtggtaaagaaagaaaattattggaattattgaaaaaatatcattccggttcaaaaaagaatgaaaaagttttgatttttgctctttacaagaaggaagctactcgtgtggaaagaaatctaaaatacaatgggtacaatgttgctgctattcacggtgatttatcccaacagcaaagaacacaagctttgagtgaattcaagagcggtaagtctaatttgttattggctaccgatgttgctgcaagaggtttggatatacccaatgttaagaccgttattaatttaacttttccattgactgtagaagactacgtccatagaatcggtagaaccggtagagctggccaaacaggtactgctcatactttgttcactgaacaagaaaagcatttggctggtggtttagttaacgttttaaacggtgctaatcaacccgttcctgaggacttgataaagttcggtactcacactaaaaagaaagagcacagtgcttatggttcatttttcaaggatgttgatttgaccaaaaaaccaaagaaaactacttttgattag

SEQ ID NO: 912 - DNA, 2085 bp, Saccharomyces pastorianus
atggagggattcaacccgggccacatagaacacctgtctcccattgactcgactggcaacaattcagcgtccttcatatatccgctgcccaaaactgccggcgagtatgtaaacaatcacaacgaaaatcacacagatgtaaatccatcccctgtgccgtctccgatggtgtctctaaatttcaagaacccttcctccccaaatggcgatttccatattcatacatctgcatcccctacggaagctgcagagcatggcaatcagccagaaaaactgaatcagaataatttggttcatctagatccagtgcccaattttaaagataaagccgacatcaagccttggttacaaaaaatcttctatcctcaagggatagagcttgtgatagaaagatcggatacctttaaagttgtcttcaactgtaaagctgctaaaaggggaagaaacacaaggaggaaaggaaaagataagtctaacgaacaggaccaagaagaggagaaattgcaggtcaatgacgatgaattcgaaaatacaagcagctcgaactttatagtatcaagtaacggggctagatcgtcgcccgaactaacatcttccgggaagccaaagaagaaaaggtgtgtctcaaggttcaataactgccccttcagggtacgagccacttattcattgaagaggaaaagatggagtattgtagtaatgaacagcaaccattcgcatccgttgaagttcaaccctgattctgaagagtacaaaaaattcaaagaaaaattaaggaaagacaatgatctggatgcgatcaagaaatttgacgaactagagtatagaacgttggccaacttacccattccgacagctacaataccttttgactgtggtttaacgaatgaaattcaaagttttaacgttgtcttgcctactaacagcaaatcgtcttcgtctgcatcttcttcaagtgtatcatcagtgtctctcgatcctttgagtgcatcgaaaagaccgtgcttaccccctgtaaataacactggtaatgtcaatactaacaatataaggaaaccaagaagccaatccaagaataaggacacactattgaaaagaacgaccatgcagaacttcctcactacgaaatcaagactacataagacgggcaccccaacatcttcacagcattcatctacagcattttcgggatatattgacgatccgttcaatttaaacgaaatattaccattaccgacttctgattttaagccgaatactgtcaccaatttaaacgagatcgatttcacaaatattttcaccaaaccgtcacacccccacagtgggcccactcatccaagacaagtcttcgaccaattggatgattgttcctcgatactcttctctccattgactacaaacacaaataatgattttgaagtagaatcggatgatttcgttcattctccatatttgaattcggaaggcgatttcagccaaatttttaataatgccccccctgctcatcatattccagatcacacgcgtctggaaagtcaagatagtatcgatagatttgccaatagttcgcaagaacagaacgagtacatcttgcagtatttgacacattttgacgccgcgaatcatgccgccaatacttcaaacgatatttcgcattcattaaacatccaccataacattactgacctgagcaactcacttctcaaacaggaaactctgatagataacccttcgaccagaattttggacgaattaaagttcttgcaaaatagcccacacggtgctcaccatcctgtagattttcagcatgaaaactataatcatctaatgtcgaatcaacctcaaatacgacaccagcaacatgaactgcagctgcagctgccccagcaacagcagcaacagcggcagcaggaatatccccatagtcatgaccaccacgatcatcaccacaaccagcatcaagaagtacgaaaagaggtacaaacacacgaaacgcttgaaatgatgggaaatacactattggaggaattcaatgacattaagatggttaacggcgaattgaaatacgtgaaacgagaagattaa

SEQ ID NO: 913 - DNA, 369 bp, Saccharomyces pastorianus
atgactacatttagattttgccgtgactgcaacaatatgttgtaccctcgtgaagacaaggagaacaataggctgttattcgaatgcagaacatgttcttatgtggaagaagcgggcagcccattggtgtacaggcatgaactgatcacgaacattggtgagactgcgggcgtagtgcaagacattggttctgatccgacgcttccgagatctgatagggaatgtcctaaatgccactctcgtgaaaacgtgtttttccaatcgcagcaaagaagaaaggacacttctatggttttattctttgtgtgtttgtcttgctcgcatatatttacttctgatcaaaagaatacaagaacgcaattttcgtga

SEQ ID NO: 914 - DNA, 612 bp, Saccharomyces pastorianus
atgtccctaagtatactagcgaagagatcctcctctatctggatgaaaacgcgcattacaccagcgttaaccaccccaatcaccatcacaacccgttttaactccacgactacaactgcaccattgtctaaggatgacgctaaggcaaccgtcccagctacagaggctaaacctgtcgaccccaaaatttccaaaattgttcaggatatctcacaattgactcttttggaaacctctagtttgattaccgaattgaagactgcattaaacatcccagagatgaccatgcctatgggcggatttatggcaggaggtgccggtgtcggtgctggtaacgcagcaggctcagctggtgaagcaggtgccggtgctgaagaagaagccaagccggaggccaaaactgtgttcactgtgaagttggattctttcgacgcaaagaccaaggctaaagtcatcaaagaagtcaaaggtttactaggtctctcactagttgaagctaagaaattcgtcgaggctgctccaaaggtcttgaaagaaaacatagccaaggacgatgctgaaaagatcaagaaaaccttggaaggtttaggagctaaggtcagtttggaatga

SEQ ID NO: 915 - DNA, 1155 bp, Saccharomyces pastorianus
atgtctacccctgtatccttttttggtcagcaggtcttaaaccgagtttccttcttaagatgctcaaaggaattcgttaagaaatcgttaaaccacgactccaccattttcatcccatttattgagggggaagcgctcatatcacctgaaaatggtaatttggtacagttatcttactctacgaagtcttaccagaatattctgtctactgtaattcctgcatataccactcttttgaactcaactcggtcaagaagtgatgagtcaggtatcaatttgacatttttaggtctgctagaagagacagattctacttttaattttgaatggtccaatatcgcctataaaggaacaccttactttggattagatatccgtgttacagacaacacattatttaagaaggcagatttcgagtcaatcttttccttcccgcagatgaccagagaccacatctttgagcaaacaaatgctgatgcctcactatattcacaaggaagaatgtacctagattggctagccaagtacaagttttgccccggttgtggatctaaactgtttccagtggacgcaggcaccaagcttcaatgttccaacgaaaacaaaagcctacactgcaatgtcagagatgcgcgtgtcaataacgtatgtttcccaagaacagatccaacagttattatagccatgaccaactcggactactctaaatgttgtctcgcaagatctaagaaaagatatggagattttgtgttgtattccacaattgcaggatttatggagccttctgagaccattgaggaagcctgtgtcagagaaatatgggaagaaacaggcatatcatgcaaaaatgtggacatagtccgctcacagccttggccctacccttgtagcttgatgatcggctgtctgggtattgtcgaattcaacttccacaatgaggtcatcaatctaaatcatgacgatgaattgttggatgcccagtggtttgagacaacagaaatcattcaagctctggatgattatactggtgggatccgcgttccattcaaaaatggcaccaatttgcccggaagcaccactattgcccaccaattgatcaagcaagtctgcgagaactataaaagactccgcacggccgcagcaagccatttgtag

SEQ ID NO: 916 - DNA, 744 bp, Saccharomyces pastorianus
atgagcgagcaaagtcaactagacgactctaccatagacaagctaattccacaaattttcaatgagatgagatctaatcttaacaacactactaataaatcttccaaaggaacgcaaaataatacaaatgataacatgttggccacgaacacttttacaaggccatataactcggtcacgacacagtccttactcaaggaatccgaatcgcttgataaaataacggcaatgatacaaaatgttactggtgcgttaaaaaatagcttacctgtatacgtcgatcaagtacacgacgtttgtaagtcaacgaattctatcctagattcgtggatcaacatacattctcaagcaggctacatccacaagttgatgactgaccaaacgtatttgaagataatcaatgaccggctaaacaatgagaagacaaacacaaatgacgaagaagacagtacgttacacaacatgatcgcaataaagaagagggaggttttgagtttaaaacaaaaattagaaaacaagaaaagagagaaagagaatctaccttccaaatcaacgaatcaaggatcgaatccaaggtatgccagccaacctggaagaaggccagtgtctgccaatggaaatgggaataacagtagggcgaaaaggccacacgttcccgcttcaaagaggcccagcgggataccaagggttaccagccggtggacaaagcccaccgctagtagttcgagaaagatgtttcgttag

SEQ ID NO: 917 - DNA, 1476 bp, Saccharomyces pastorianus
atgtccaggtatcaggttaattgcttgaggtatagacactttcttaggacttctaatatttcgcaaatccctgactttacgaaatactgtattggacccgtaaatgaggatttagctccttatattatggagaccatgaaggcatatccttcaaactccaattatattaatccacaacattactaccataataggacggtccttgtggaaaactacttaaagcgacacccaaatccggtgtcattgacccaattagcgcaatactatgacgattctaccaagttgaccagaactaagatcatcaattctgggaagtttgttaaagaggaacttgttatcagaattgctcacaagctgaatcagttacagcaattgccattcaatgtcgtaaacaacttccatttcgttcaagtttacgagtcatattacaacatatttgaaagttttagaaaataccccgcaataagaactttagatgatgcgtctcaattcgctaactttatcaagaatatgttagagggctttaacaccctaaatctgccgcatttaattatgggggcgctggaatgtacaattttagatctgtatcctcgtgagaaaatggaccaattactatccgatttgctaagggcccgaatatcaagaagactgattgtagaagaacacgtcagtatcacagctaactacactagtggcaaaaaagagaataccctggtattgggtgatatctttcaagaatgtagcgctaagaagtatttattagaagccagtgaagaatctcaaaagttcattcaagatatgtattttaaagacattcccatgcccgaatttgtcattgaaggcgacactgatttgagcttttactttttgcccacacatctaaagtatttgctaggggaaatattgagaaatacttacgaagcaactatgaagcattatattcgtaagggactggacaaaccagaaccgattatagtcactatagtaagtaatgacgaatcctatttattcaggatctcggataaagctggtggtatactgcatgatgatgaaaatctatggtcgtttggcaaatctaaagaaagagctcaagaatctttgaacaattttcacaaattgcctggcttgcaaacagtatccatttatgatcgagttcattctagtgctaaatgtaagtcgaatcttgaggcatcaccgtcagtgacattaaggccatacatgcatacgtcgttagaaccaatgagttatcctagtatcatcaatggacacataaaatatgaaacccccttaattgaactattgaaacgatctttcagatacaagctgggaattggtttggctatgtgtagagtgtatgccgagtattggaacggtgacctgtccttgcattcgatgcctggatatgggaccgatgcagttttgaagctggggaacttaatgaaacacacaaagaaactacaactagataaagtatag

SEQ ID NO: 918 - DNA, 519 bp, Saccharomyces pastorianus
atgtcgacaccagctagaagaagattaatgagagatttcaaacgtatgaaggaagatgccccaccaggagtatctgcttcgccactacctgataatgtcatggtatggaatgctatgatcattggcccagcagacactccgtacgaagacggtacatttcgattgcttctagagtttgatgaagaatacccaaataagccgccacatgttaaatttttaagtgagatgttccatccaaacgtctatgcgaacggtgaaatttgtttagatattttgcaaaacagatggaccccgacatatgatgtagcatctatattaacatccattcaaagtttatttaacgatccaaatccggcttcacccgcaaacgtagaagccgcaacattattcaaagatcataaatcacaatacgtcaaacgagttaaagagacggtagaaaaatcttgggaagatgatatggatgatatggacgacgacgacgacgacgatgaagatgacgacgacgaagaggctgactga

SEQ ID NO: 919 - DNA, 1587 bp, Saccharomyces pastorianus
atgcctcagaataccagacacacgtccattgtagaaatgctttctaccccacctcaattaccgaattccgcggactcgcccattctgtacgagcagacagacaggaatagcgtcggaaacaaaagcgacacagaatctctgcacaagtccatttcgaactcgtcttcgtcgtcttcgatctccacgctggataacatggaatactcaaattccaacaacactcactccttgtctactttaaactcacagaacctgctgtctgtgcacaagcaagaatggcaacacaccctgctttcggacttggtggagcagaacaaactgattttcatcaaaggttccatctctgtagaggaggcctttaatacgttggtcaaacaccagctgacgtctttgcccgtggaaaacttcccgggtgacatgaattgtttgacttttgactacaacgatcttaacgcgtatttgcttctcgtgctgaacagaatcaaagtgagcaatgacaggatcacgatggactgccagaacggtaaatccgtgcctgtgggagagatagtgaagttgactccgaagaatccattctacaaattgcccgaaacggaaaatctgtccacggtgataggcatcttgggtgcaggtgtgcaccgtgtcgccatcacgaacgtggaaatgacgcaggtcaaaggtattctttctcaacgtcgtctgatcaaatatctgtgggataacgcaaggtctttccccacattgaagccgctgttagactcttctttagaggacttgaacattggtgtgttaaacgcatcccgtgataagcctacatccaagcaatcccgtgttatatccattccaggcgatgagcatctgataatggctttgcataagatgtacgtcgaaaggatctcttccattgctgtggtggacgctcagggcaacctgattggtaatatctccgtaacggatgttaaacacgtcacgagaacttcccaatatccgctattgcataatacttgtcgtcattttgtctcagtcattctgaatttgagaggtctagagaccggtaaggattccttccccatcttccatgtgtatccaacaagttccttggcaaggacgttcgcaaaattagtggccaccaaatctcacagattatggatcgtacagccgaacgacaaccaatcttctgcatcttccgaaaaatcatcctctccgtcaccaaacactgcacctgtaacaactttcccatcgcttgcatcttccttccattcaaatccacactcgtcaagaatggctagctctccagttctaaaatcttcggacgcaacaaacaacaaaataaatgtaaatataaatttgaccggttctcccccacctcaaccacaatcatccatgtcgccagctcagcaacagcaaacttcaaacagttcttcggcatctccaactccagcccatttcgaaaaggagtatagaacaggtaaactgataggtgtcgtgtctttaaccgacatattaagtgtgttggcgagaaaacaaacccatcacaaggaaatagatccgcaaatggccagaaaacaaagaggccatgtaggttga

SEQ ID NO: 920 - DNA, 1518 bp, Saccharomyces pastorianus
atgcccacttctggaactactctcgagttgattgacgatcaatttccaaaggatgactccgtcagtggcggtcttgtcgatgaagtcgatttaacccaagccaacatcctggctactggtttgaacaaaaaggccccaagaatcgtcaacgggttcggttccttcatgggttccaaggaaatggtttcagtggaattcgacaagaagtccaacctagatcgtttgttggaaaaagataaccaagaaaaattagaagccaagggcaaaactcatatatccgaacaaccatggaccctgaacaactggcaccaacatttgaactggctgaacatggttcttgtttgtggtatgcctattattggttggtacctggccttctccggtaaggtccctctgcatttgaacgttctggtgttctccgtgttatactacgtcgttggtggtgtttccatcacagccggttaccatagattatggtctcacagatcttactccgctcactggccattaagattattctacgccgtcttcggttgcgcttccgtcgaaggttccgccaaatggtggggtcactctcacagaatccatcatcgttacaccgatactttgagagatccttatgacgctcgtagaggtctatggtactcccatatgggttggatgcttttgaagccaaatccaaagtacaaggccagagctgatatcactgatatgactgatgactggaccgttagattccaacacagacactacatcttattgatgctgcttaccgcttttgtcatcccaactgttgtatgtggttacttctttaacgactacttgggtggtttggtctacgccggtttcatccgtgtctttgtcattcaacaagccactttctgcatcaactccatggctcattacatcggtacccaaccattcgacgacagaagaactcctcgtgacaactgggttactgccattgttacattcggtgaaggttaccataacttccatcacgaattccctaccgattacagaaacgctattaagtggtaccaatacgacccaactaaggttattatctatctaacctctttggtcggtctagcatatgatttgaaaaaattctcccaaaacgccattgaagaagctctgattcaacaagaacaaaagaagattaaccaaaagaaggccaaaatcaactggggcccagttttgaccgatttgccagtgtgggacaaacaaaccttcttggcaaaaactaaagacaacaagggtttggtcatcatctccgggattgttcacgacgtatctggttatatctctgaacatccaggtggtgaaactttaatcaagactgcattaggcaaagacgccacaaaggccttcagtggtggtgtctaccgccactcaaacgctgctcaaaatgtcttggctgacatgagagtagctgtcatcaaggaaagtaagaactctgctattagaatggctagtaagagaggtgaagtttacgaaactggtaagtttttttaa

SEQ ID NO: 921 - DNA, 417 bp, Saccharomyces pastorianus
atgagtgcttggttatttatccttgctgttattgttaactgtatcaacttgttcggccaagtgcactttacaattttatatgctgatttagaagccgattatatcaacccaattgaattatgctctaaagtcaacaagcttattacacctgaagccgcattacatggtgccctatctttgctgttcttattgaacggttactggttcgtatttttaataaatttgccagttttagcctacaatttgaacaagatttacaacaaggttcaacttttggacgctacagaaatattcagaactttgggtaagcacaagagagaaagtttcctaaagttagggtttcacttattgatgttctttttctacttatacagaatgattatggctttgattgctgaaagtggggatgacttctaa

SEQ ID NO: 922 - DNA, 2871 bp, Saccharomyces pastorianus
atgaccgaacaaacagaccaattgccgccacactcacagccaaccaatggctacaagaaatacccgtcacacgataacgaacactccgggcccaacagtcaaccgaataaccactataacgaaaaccaatatggggccaaagactctcataataacaggcaataccaatcgaaaggtggtagatatggatctaacaaatacagcaatcgtaacaatagccaagggaactctcaatactacaataatagatacaacaatagctacagactgaataataacgattacaatgcagccatgatgccaaatatgcagtggcccgccaattactatgcccctcagatgtactatatcccccaacaaatggttcctgttacttccccaccatacacgcaccagccgcttaacactaacacaaccgaatctccttctgcgcctaaaactacaaagatagaaataactacaaagactggggaacgtttaaatctgaaaaagttccacgaagaaaagaaagcttccaagaatgacgagagcaacgatgagacagaacggaagtcaaaatccagtactccttttgaaaaggaggcaactcctgctgtggttgctaatcagccaactaaagagacgtcacctgaagctgctattgaaaaatccgtttcagaagcagaaaacactaagaggttatttttggaacaagtgaggatgcggaaagctgccatggaaagaaagaagaacggtttggcgtctggaaatgaacaaaaattggacaatgtgaattcctccaaaattgacacgaccaaacccaatccgttcctccaacccgaaaccgtcaaagaagaaccaaaaccagtcgaggaagaaccaaagcaaattgtggaagaaccaaaaccagttgaggaagaaccaaaaccagttgaggaagaaccaaaaccagtcgaggcagaaccaaaaccagttgaagaagctgatgaacctgttcttgatgtaaaaacggttgcaagtgaaattgcgccacaacaagataggactggaagtacaaccaaaacagtgacatttaatgaaccagaaagtgagagcagttctcaagataccactgaacttgtggaggagaacaaagatgatgtttctgatgcgaatgacaatgaaactgtaaataaaactgatacgattgacgaaggcaatgtgaatcctgaaattgcgaaatcagaaaatgcagacattccagcggaagaaacaacatcttttatatctggtattgaaatccctacagtgtcacaattacttgaaactttgaagaatgccgagccgatttccaatatatatggcttttcctatccagcggacatcgaaaagccagatatcaagtataaaaagccaagcgttaaatacacctatggtcccactttcttacttcagttcaaggatagattgaaagttaaggctgatcctgcctgggttgaagccgtttcctccaaaattgttattcctcctcatatggccagaaatagaccaaaagatggcggaagatttggaggtgattttagaagtccatctacgcgtaacttggaccctagctctaattcaaggatgtcttcaaaaagaagatccaaaaggatgggtgacgatagaaaatctaatagaggatatacatctagaagggatcgtgaaaaagcctatgaaagggcagaagagcaagctccaaaagaaaatgtcgttccgttggtaccaagtgctaatagatgggtgcctaagtcgagagttaagaaaaccgagaagaagttggctcctgatggtaagaccgagttactagataacgaagaagtggaaaggaagatgaagtctttactaaacaagctaaccttagaaatgtttgattcgatctctactgaaattttggacattgcaaatcaatcgaaatgggaagatgatggtgaaacactaaaaatagtcatcgagcaaattttccataaagcctgtgatgaacctcattggtcttcaatgtacgcccaattatgtggtaaagtggtcaaagatcttgacgttagcatcgaggataaagaaaacgaagggaagaacggtccaaagcttgtcttgcattatctggttgcaagatgccatgaagaatttgaaaagggttgggccgataagttgcctgcaggagaagatggcaatccgttagaacctgaactgatgtcagacgactattatattgcggcagctgctaaaagaagaggcctgggtttggtccgtttcatcgggtacttatattgtttgaatttattgaccggaaaaatgatgtttgaatgtttccgtagattaatgaaagatttgaacaacgatccatctgaagagactttggaatctgtcattgagctactggatactgtgggtaaacaatttgaaaatgacaagtttgtcacgcctcaagccactcttgaaggttcagtacttctcgacaatctatttttgttgctacaacatattattaaggaaggttctgtgtcgaatagaataaagtttaagttgatcgatgtaaaggaattgagagaaatcaaacattggaacagtgcgaagaaagatgctggaccgaagacaattcaacaaattcatcaagaagacgaacaattacgccaaatgaaaaacagccaaagaacaaattcaagatttaacaaccatcacaatcaatccaacagtaatcgattctcttccaacagaagaaatatgcaaaatgcaccaagagataactttgcctcttcaaaaacaacctctttcagaaataaccaaaaacagtctcgtaaagcagaagaatcttcccaagctccaaaggccaatatgtttgacgcattgatgaacaacgatggggacagtgagtag

SEQ ID NO: 923 - DNA, 930 bp, Saccharomyces pastorianus
atgagcagacaaggcggtatgaatgcgggagtacagaacaacccaccttcccgggtggtgtacctggggtccataccatatgatcaaacggaggagcagatccttgacttatgcagtaatgtagggcctgtgatcaacctgaagatgatgtttgaccctcagaccggcagatcgaaaggttatgcatttatcgagttcagagatttggaatctagtgccagtgcagcacgtaatttaaatggataccaattaggctcaaggtttttgaaatgcggttactccagcaatagtgacatatcgggtgtttcgcagcagcagcagccacaacagtataacggcagcggtgggaacaacggcagcaacaataacaacaacaataacaacaacaacaacaacaacggcggaaatagcaataataattacagtaacgattttcagaacagcggaaatgccaatttcctgaatctgaaatttcctgaattgccctcaggcatcgacgttaacataaacatgaccactccggcaatgatgatatccagtgaactagccaagaggccgaaagaagttcagttgaagtttctacaaacgttccaagagtggacgagaactcatcccgacgatgccgtttcgttgttagagctgtgcccgcaattgagttttgccactgcggagctgctgctaaccaatggcatatgcaaagtggacgacttgattcccttagcgtccaagccgcaggaggaggcgtcatccacgaacaacagcagcgttaacgaagtgctggatccggcggtgctcagcaagcagaaggacctcctaaagcaagtgctacaattgaacgacagccaaatcgctattctgcccgatgacgaaaggatggccatatgggacctgaaacaaaaggcattgaggggagaatttggtgcattttga

SEQ ID NO: 924 - DNA, 933 bp, Saccharomyces pastorianus
atggatagtaaggaggtgttggtgcacgttaagaacctagaaaagaacaagactaatgatgccactgttctggagatcctgcgtgtcctggataaagaattcgtccccactgaaaaactattgagagaaacaaaggttggtgtggaagtcaacaagtttaagaagtccagtaatgtggagatcagcaagctcgtgaaaaaaatgatcagctcttggaaagatgccatcaacaagaataagcgttccagacaaccacagcaacaacaccatcaagagcattcgtcagttagtatggagaataagacgcctgcaaatggatctatgaacgggtcagaacaacctgcctcttcccaaccagacgccaccaagcaagaaaaatacgtcagcacaaagccaagaaatagtaaaaatgatggtgtggatacagctttataccaccataaattacgtgatcaagtattaaaggccctttacgatgtattggccagagatagtgagcatcctcctcaatcaattttacacactgcaaaggcaatagaaaatgaaatgaatagagtcaacaactgcgataccagtgaagccgcctataagggcagataccgtataatttattcaaacatcatatcgaaaaataatccagatttgaaacacaaaattgcaaacggtgatatagcgcccgagtttttagctacatgcgatgccaaggatttggcgccagcacctttgaagcaaaagatagaagaaatttctaaacgaaacttatttaacgcacaaggtgccactatagaaaggtcagttactgatagatttacatgtggtaaatgtaaagaaaagaaggtgtcctactaccaattgcaaacaagatccgcggatgaaccattaaccactttctgtacttgtgaagcatgtggtaacagatggaagttttcttag

SEQ ID NO: 925 - DNA, 1029 bp, Saccharomyces pastorianus
atgcacacagcagaatttttagacactgaaccaacagaaatctcatccgttctagcaggaggttacaatcacccactgttgagacagtggcaaagtgagcgtcaactgaccaagggcatgttgattttcccactattcatctctgataatccagatgactgctcggagattgactctttgcccaatattaagagaatcggtgtcaatagactaaatgactacttggggccattagtgaagaagggtttacggtccgtaatcttgtttggtgtgcctctgagccatggtactaaagatccagtgggcactgcagctgacgatccagaggggccagtcatccaaggtattaaatttatttgtgaaaacttcccagacttgtacattatttgcgatgtatgtctttgtgaatacacttcccatggtcattgtggggttttgtacgatgacggctccataaatagagaacgcagtgtctccagactggctgctgtagccgttaactatgctaaagctggtgcacattgtgtggcgccaagcgatatgatcgatggcagaataagagatatcaagagaggtttgattaacgccggtttggcccataagacctttgttatgtcttacgctgctaagttcagtggtaacttatacggacctttccgtgatgctgcttgttctgctccttctagtggtgataggaaatgttaccaattacctcctgctggccgcggtctagcacgtagagctttggaaagggatatgaacgaaggtgctgatggtattattgtcaaaccttccacattctatctggatatcatgagagatgcaagtgaaatctgtaaggacctaccaatctgtgcctaccacgtctcaggcgaatacgcaatgctgcatgctgctgccgaaaagggcgttgttgatttaaaaacaatcgctttcgaatctcatcaaggtttcttaagagcaggtgccagattaatcattacctatctggctcctgaattccttgattggttagacgaggaaaactaa

SEQ ID NO: 926 - DNA, 651 bp, Saccharomyces pastorianus
atgaaaactttaattgttgtggatatgcaaaacgacttcgtctcgcctttgggttcgttgaccgtccccaaaggtgaggaaatagtcgatccaatttccaagttaatgcaggatgctgatagagactggcacagaattgtggtgaccagagactggcaccccgcaagacacgtatcgttcgccaaaaatcataaagacaaagagcctttctcaacctacacctaccgttctccaagaccaggtgatgactccacccaggaaggtatcttgtggcccgtgcactgtgtgaaaaacacttggggcagccaattggtcgaccatataatggatcaagtgctcaccaagcacatgaagattgtcgacaaggggttcttgaccgaccgtgaatactactccgccttcaatgatatctggaacttccacaagaccgatatgaacaagtacttggaaaagcaccacacagacgaggtctacatcgtcggtgtttccttggagtactgtgtcaaggctaccgccatctccgccgcagagctgggctacaagaccactgttctgctggactacacaagacctatcagcgaggatccagaggtcgtcaagaaggccatagaagaattgaaggctcataatgtcaacgtcgtggacaaataa

SEQ ID NO: 927 - DNA, 2619 bp, Saccharomyces pastorianus
atgcagaagtgtgctagccaggcaccattgacgactacgccgactttccgggtctctcaagacaccattcatgccctttcgcaggctattttaaaggcgttccagaaattggcttccattgacagcaatcaggaaatcaaccctgccgatatagcgttcaaactgataaactcgttcaagtatttgccggtttcggctgctggtgcagacgcgtttgacacagaactagaaaaactggacatattttcgccccttctacaagcagccattaccgctggcaataatggcgtcattatatgggaccttataacggtattgtttgcatacatttcgatccataggcaattccatcctttgatcctgcacaacctggacgtgtggaacgaatttatagtagatcataataacgaagttgcgagcacgagccaggagaggaacccgataaagttcggcgtgttgtcgcttctttccatagtacagaatttcgatgagattaccccaaacttgttcgagtttttcaaattgagcttaaaacctactttacttgagatttgggtaccccagtggcaaaactataatccgtcaacaacgaaattaatcaacggtgatgaaaagatttctaattggataacaaaagattatcatatggacttcattatcaccacttcattatcatcgtcatcatctttgaaagccttaccgtctcattattttgtctataagatttcgaaaagaatttctcatttccccaatttgattgatccgaaactgtatcaacttgcaattgcagtaataatggaaaatggaatctcagatatcgaaaacaacaataaccacagcgctaattacaacgatatacccttttatttccaaatcttaatggaagttatcgaccaccctgagttgaactatctacaagagaaccgtttgattttgttacttgacattgcattaaatcatttaatgttagtacccactcattgtctgcattcaagctttggaaacttgggctccactcaaagtttatcttccactttaaatattattcaattccttttatcgaaattcttaatcaacacgggcaatattacacaattaatcaataaaaacgtcaccaacaatagtaacaacaacaacaacaataagaaaaaagactggttccaatcccaacaaacgaattatcaaattccattttggtttgaagattccattttaccaccaatcccaccaatttcaaaatcattatttacttttgacaaagatttgagccacgagtcggattcaattatgatcgtgagggatttgttacgatgtttgaacttaacaatccttttaatttctaagcttttaagggactataacgatttgaatattaatgcattaactcaatcgccagaccatagcaacaatatcagtgatggaaacaaccatataatgatagaacagtacatgcaactctacctcattccactattcacttcactattattggctcaacagttaaacgatcaagaacaagaacaagaggataaactagaggaacaggaagacgaaaatcttattggatcatcctcagtcagacacttgtgttcacaactcatttttttcagttctttaaaattgtgcgaaaatttgatcattaaggaaaaaaatttggccctataccacctaatcaagtttatcactaaaatttctctagatgacctggtattacaaaagatctccatcaatctactaaatcatctgtttttccatcaaatcaatgatgggaggaaccatgacaatttgaaccaaaaattatgtctaaaaaatcaactctctttacaagctttgaaagactatatcacactatggaatgatggttcccatgcttataattcattctttaagaaccttttctatgaagatcagcctgagatagaaactaaaaaattaacaatgtctgacctcataggatttttctccgatgatgagcaaattgtattatctacgcccccaaccacggtgacatcagtctccaccaatgaacttcctatatcattacaaccaattccacagaaaaatatcgaggctttcactccatcatcaaaatacgatgcttattcttccaactcctttgtaccgtcctcatcgaataatggtaatacgaatactaataaacagcaacagcagccacaaaatacaacaccatcttcctctaatagatacttgttcaacaaaagtagccttatctcacaagaacatagtagcggtaacaacgatagcagtactcaagtatctggatctatgaatgacagttattctctagacaattcattcagtaccacaaacaccaatatgacgaggcaggcaactacgttaactagagccactgatgccatgacgactgcgccttcaacaccaacttcatacaataacagtaatagtaacaacaataacaatctatggattgaatcgccaatggcaaatttcaaaagctctatgatcagcaaaaactccaacaagaataaaatggtgaacactggtaagaattacattctagggggacacaacaaagttaaaaacaatagcagggctcaatcgatacatatagatgactttgaaaacaataacgattaa

SEQ ID NO: 928 - DNA, 1536 bp, Saccharomyces pastorianus
atgcaaagtccatatccagtgccgcaggtatctaacgctgacgatggatctttgttgagggacaaccagagcaagtccaagacgactgtgaaatcagaggcgcccagaccgcacgcttgccccatatgtcaaagagcgttccataggctggaacaccagacaagacacatgaggattcacactggtgagaagccccacgcctgtgacttccccggatgtgtgaaaagattcagcagaagcgatgaactaacaaggcacagaagaatccataccaactctcatcctcggggtaaaagaggcaggaagaagaaggtagtcggctcgccaacaagtagtgccagttccagtgccaccagtatacctgatttgaatacggcaaacttcgctccattactgccaaaccagcagcaacagctatccccctctggtcctatagcgattgctccgaaggagcatccgagtcgatcttccacccgaaagagcagaagaacgaaattcgaaattggtgaaattggtggtggtggtggtaatgacgcgtctgtgactacttctcccaacccgctagctaagatacccgtatcagtaaagcctccccctacgttgacattgaacaacatgaactgtcatacgacatccgctccctctacctcttcctcgttgaatactagtcatagtggcagtagattgaagttgaatgcgttgtcctctttacaaatgatgactcccatcgccaacagttcccctagaaccgtattcatagatacccctgagcagaaacagcagcagcagcaacagcagcaacagcagcaaaattcgcagtcacaacgttattcaaacactgttatactaccaaggccgcgatccttaacggatttccagggactgaacaatgggagcacaaacagtaatggggggtacagagcccaaaccagccaaagctccatacagttgaagaggccaaactcagtattgagtctgaacgacttattgattgaccaaagaaattcaaatgaatccgactccgatttcaccaccggcggagaagatgaagacgatggtctaaaggatccatccaactccagcatcgacaatctcgaccaagattactctcaagaacaatcaaggaaaaagtccaaaacctccacacccacgacaatgctgagtaggtcggcaagtggtacgaatctgcatactttggaatacgtaatgaaccagaaccattcccattctgaatcttcgtcgtccgatttccagagagagttgagcagcagattactgaacgttcaacagcagcagcaagagcagcattcattgttacaattgcaaaactcgtcgttgtccagtcaaaatcaaattgtaacctccaataactctttaagtactacacctctattattatcgccaaggatgaacatgattaataccgccgtatcaatccagcagacgcccaaatcgctctcagattcacaaactcaagaaccggaaagattaccaccgctaaggagtttgccattacctttcccacacacggactga

SEQ ID NO: 929 - DNA, 264 bp, Saccharomyces pastorianus
atgcaattctcgcagtatttgtcgttaatttccctgttggttccagctttagcacaggatgtggcggtttcatgcgaacaaattccctctgctagcttagagtcgacgccatattctgtgtcaaccactgctattcttgccaacgggaaagcaatgcagggtgtattcgaatactacagatcgataacttatgtcagtagttgcgggtctgtggccactacaacaaagaaaaacagccctataaatacgcagtatgtcttttga

SEQ ID NO: 930 - DNA, 468 bp, Saccharomyces pastorianus
atgaaggttgaaatcgattccttttcaggtaacagaatctacccaggtagaggtaccttgtttgtccgtggtgactccaagatcttcagattccaaaactccaaatctgcttctttgttcaagcaaagaaagaacccaagaagaatcgcttggactgtcttgttcagaaagcaccacaagaaaggtatcactgaagaagttgctaagaagagatctagaaagaccgtcaaggcccaaagaccaatcaccggtgcttctttggacttgatcaaggaaagaagagctttgaagccagaagttagaaaggctaacagagacgaaaaattgaaggctgacaaggaaaagaagaaggctgacaaggctgccagaaaggctgaaaaggccaagtctgttggtactcaaggttccaagttctccaagcaacaagctaagggtgctttccaaaaggttgctgctacttctcgttaa

SEQ ID NO: 931 - DNA, 363 bp, Saccharomyces pastorianus
atggtcaatgaaaaagtagaaaaaccaaaggctgcaaaaggtactttagttagtgggaaagtctggaaggtggaaaaggcgccattgagggtcaaaagtagtgttgttaagaataagacgttgacatcatgggagcttaaaaaacaaaaaagactggaggataaacagttcaaagaaaggttaacggctttaaaggatgaaaaagaagaagcacgtcaaactaagataaccactttaagggaaagaagagaaaagaaggcagaaaatgaaagatacgagcgtttatctgctaagatgcacgctaagaaggttgagagattaagaagaagagaaaagagaaacaaggcgttgaaagaacgttaa

SEQ ID NO: 932 - DNA, 708 bp, Saccharomyces pastorianus
atgcactgggcagcagcggtggcggtactctttgttgtggttacgaagtttctacaatacacagccaaatatcacgataaatggatctctcaaatggcaccagggactgaattgtccaagaagtatttagtcaagatgaaagagcgtcatgaattaaaagagttcaacaattccatttctgctcaggataactatgctaaatggaccaagaataatagaaaattagattcattagacaaggaaataaatgacttcaaaaatgacatacaatcacaaaacaaggctttccaaggccatctccacaagttgagactattgacaataacggtgccattctttgtattcaagattgtgtacggtaaggtccccgtttacaagttgagctcttcgacgagcaccttattccctacctttgtcacaggtgtttggtctcaaggctggttgtatgtcatattacacccactaagaaccatctctcaaaaatggcatatcatggaaaacaggtttggtgccgccaagtttgatgccatggctttacaaggcgtttctttggggatctgggtctgggcattgatgaacgtcatcagtggactagaattcatcattaatcaactgttcttggctcccaagatggaaccacctgcggtgttagagactcaagaagaaaaaatcttggatgttgtcgacgataccgttattttagattag

SEQ ID NO: 933 - DNA, 840 bp, Saccharomyces pastorianus
atgtcacaagattttatagaagaccattcacgtacaggatcctcagacgacgaggatagtggggcatatgacgagtggatcccgtcattttgttccaggtttggccacgaatacttttgccaggttcccaccgagtttatcgaggatgacttcaatatgacctctttgtcccaagaggtgccccactaccgtaaagccctggatttgatattggatttggaggccatgagtgatgaagaagaagaagaagaagaagacgtggtagaagaagaggaagtggaccaggagatgcaaagtaatgacggccacgatgatggcaagaagaaaaacaagtcccccgtggtgaacaaaagcattatcgaacatgcagcagaacagttatacggtttgatccacgcgaggttcattctgaccaagccaggtctgcaagcgatggctgagaagttcgatcacaaggagtttggaacgtgtccccgttactactgtaacggcatgcaattactgccttgtgggctaagtgatacagtggggaaacataccgtgagattgtattgtcctagttgtcaggacctgtatctgcctcaatcatctaggttcctgtgcttggaaggtgcattttgggggacgagtttccctggtgtgttcttaaaacattttaaagagctggaagaatatgtagaaagaaaaagtaaagaatcctatgaattgaaagtctttgggttcaggataaatgacgaagccgtatctggccccagaatgaagtggttgagacaatacccattcacggaggaagactgggaagagttctcaaaatgcgaattcgagaccccagcagtttaa

SEQ ID NO: 934 - DNA, 555 bp, Saccharomyces pastorianus
atgttaaagtactcgattcaacgaagactcgtctctacattttacgaactattccccaagaccttccccaagaaactgccaatttggaccatagatcaatccaaattaaggaaggaatacaggcagttgcaagcacaacaccacccggacatggctcagcaaggtagcgagcagtcttccacgcttaaccaggcctaccatacactcaaggaccccctcagaaggtcgcaatacatgctcaaactcttgcgcaacatcgatttgacacaagagcagacctcacatgaagtgaccacgagtgatccgcagctcttgttggaagtgctagacgttcatgacgagttgtcccagatgaacgacgaggctggcgtgaagcagctggcacaggagaacaaacagaggattcaggatattgaaacacgattggagcaatgctaccgtgacaagaattacgctgctgcagtgaaattgaccgtggagctgaaatactggtccaacttggcaaaggccttcaaggactgggtaccaggacaaccattagaattgaatcattag

SEQ ID NO: 935 - DNA, 1512 bp, Saccharomyces pastorianus
atgtctgacagatttgttatttgggcgccttcgatacatagtgagctggctgccaagtgtgggtactgtcatggtaataaagaggagaacagggaccaactgttcgcattggactcatgggcccaacagtatgtggacgaattggacgctatagaggttaataattgcacgatgggctcgttcgtagagcatatggacgtggccacatacgaccggttgtgtaatatggggtttagacggtctggcaagtttctttacaaaatggatccattgaggaactgttgtaggctgtacactatccgaaccactccgcaggaactggtcatgtcgaaggaattgagaaaatgtgttagccggtttgtttctaggattacggatgatgggtctcgcatggctattgttccaggcaatgattttgttggaaaaattgtcaatgcagagttgaactctacgaagttccacactaagtttgaacctgcactttatagtgacgagaagtaccagttatttgttaagtaccaagaaagggtccatcaggatttcaaaaactcgccaaagtcttttaaacgattcctatgtgacacgccgtttggtcctgagtccatattggggacgcaagaatcgtgggaccagttgaacaactggcaatccatgaaaccaggcgagaaactgatgcatatggggcctgttcatgagtgttactactacgagggtaaactaattgccatcacggtatcggatatcttgcccagtgggatttcctcagtgtattttatttgggatccggattacagtaaatggtctctggggaagctcagcgctctacgtgaccttgctatcattcaaaagacaaacctgaaatactactatctaggctactatattcaggactgccctaagatgaactacaaggcaagttatggtgctgaagtattggatgtatgctgtggaaagtatatcccattgaaacacattgaaaatatgatttccagaggcaatctgtttgttctgggtgaagaggacgctgatatttccaaagagttatacattgttgactccgataatgggaaaggatcaagttttgttactgaaaacggtgccaagcagatgaatatcgccgaagaagtatacggtgtggatggatgtgcattcaaatctgcaaacgagtctgtattaaaattgaaggagctttacagcgtaccgtacgaagaagaagattcagatactatctattaccagcaaggacaacatgaccaagctccgcgtggcatccccaacgttgtgcccggattgcttccgctctgggagttgttggatttcatggaatctggcaaaattactgacttggagggaaggctattcttgttcgaagttgaaacggatgggattcgcccactgacaaatttctacagtgaatctccccccgttaagagacgcatttgcgatgcgatacggttattcggcttcgagacttgcatgaaatctgtcattctatatagtgagcaaatgtga

SEQ ID NO: 936 - DNA, 1422 bp, Saccharomyces pastorianus
atgggtaacgataatacgaagaagagccaagtggagggagagaatagacaatccaagcagccggtaaatttcctgcctcaagggaaatggttgaagccgaatgaaatcgaatacgagttcggtgggaccgtcggtgtcattggtatgttgatcgggttcccgttgctgatgtactatatgtggatttgtgcagagttttatcacgggaaagttgcgctgcccaaggcgggcgagtcgtggttgcacttcatcaagcacctttaccagttgttcttggacaacggtgtccctgaaaagtatgactggactatcttcctgacattttgggcgttccagattattttctactatacgctgcctggtatctggaccaaaggccagcctttgtcccatttaaagggtaagcagttgccctacttttgtaatgctatgtggaccttgtatgtttctactgctttggtcctagttttacacttcaccaagctgtttaggttgtacgttattattgaccgtttcggtaaaatcatgacatgtgccatcgtttcgggttttgctttctccatcatactgtatttatggacgctgtttgtttctcatgactatcacagaatgacaggcaaccacctgtacgatttttttatgggcgctcctttgaatcctcgttgggggatcctagatatgaagatgtttttcgaagttagattgccttggtttactctttattttatcactttgggtgcctgtttgaaacaatgggaaacgtatggctacgtcactccacaactaggtgttgttatgttggcccattggttgtacgccaacgcatgtgccaagggtgaagagttgattgttccaacttgggatatggcttacgaaaaattcggttttatgctaattttttggaatatcgccggtgtcccatacacgtactgtcactgtactttgtatttatactaccatgagccatctcaatacaactggtcaccattgtacaatatttcactgtacgtcgtcctactatgtgcttattatttctttgatactgcaaatgctcaaaaaaattcgttcagaaagcaaatgtccggtgacaagtctgttagaaagaccttcccatttttgccctaccaagtcttgaaaaatccaaaatatatggtcacttctagcggctcatatcttctgattgatggttggtacacttgggcaagaaaaatccattacacagcagattggactcaatccttaatttgggccctatcttgtggcttcaattcggtattcccatggtttttcccagccttcttccttgttgtcttaattcacagaaccttcagagatcagactaaatgtaagagaaagtatggcaaggattgggacgagtattgcaagcattgcccttacatctttattccttacgttttctga

SEQ ID NO: 937 - DNA, 759 bp, Saccharomyces pastorianus
atgtccggtgctgctgctgcctctgctgctggttatgatagacacatcaccattttttcccccgagggacgtttatatcaagtcgaatatgcctttaaagccaccaatcaaactaatataaattcattggcgattagaggtaagaattgtaccgtagtgataagtcaaaagaaagtacctgacaaactcttggacccagatactgtttcgtatatattttccatttcaagaacaatcggtatggtagtaaacggtccaataccagatgcaagaaacgctgccttaagggctaaggctgaagctgcagaatttcgttataaatatgggtacgatatgccgtgtgatgttctggctaagagaatggccaatctgtcccaaatctacactcaaagagcttacatgagaccattgggtgtcatacttacatttgtttccgtggacgaagaattgggcccatccatttataaaacagatcctgcaggttattttgttggttataaagctactgcaacagggccaaaacaacaagaaattaccacaaacctagaaaaccatttcaaaaagagcaaaattgataatattaatgaggaatcttgggagaaagtagtcgaatttgccattacccatatgattgacgcattgggtactgaattttcaaagaatgacttagaagtcggcgttgcaaccagtggcaaattcttcactttgaaagctgagaatattgaagaaagactagtagcaattgctgaacaagattaa

SEQ ID NO: 938 - DNA, 525 bp, Saccharomyces pastorianus
atggctagaggtttactaaatttaagatctcaactcgggttttacaagtcttaccaccacgaccccaaaaatgttttgattcactccatattcgttcctactatcctgtttagtggtttttgcatgcttcaaagagtcaatttatatcgcggtttcacgttaactactttgttaagcatttcattttttatattttattgctgtttatatctgcctacaggccttctagcaggatttttcttacttctactaaaccatgcgctaatcaatgacaaaattcatttgtcgtttggacaagagctaggtttgtttgttatcggatggattttccaatttataggtcatggcgtttttgagaaaaagaggccggcattgattgataatttagttcagagtttggtattggctccgtactttataatgttcgagtttctttttaagttaggttttatgcctcgattaaatgcagacttggagcatgatctagaggtaaaacaaaaaaatttggagaaacaaaagcaatga

SEQ ID NO: 939 - DNA, 2340 bp, Saccharomyces pastorianus
atggtttacgttccatccacaggcccaagaactctttatgataaagtttttgacgcacatgtcgtccaccaagatgaaaacgggtcctttttgttgtatatcgatagacacttggtccatgaagtcacttccccacaagcttttgaaggtttagaaaatgccggcagaaaggttagaagaatcgattgcactttagccactgtagatcataacattcctactcaatcaagaaagaattttaagtctctagacacatttattaagcaggctgattcacgcctacaagtcaagactcttgagaacaatgttaagcaattcggcgttccatatttcggtatgagtgaatcaagacaaggtattgtccacaccattggccctgaggaaggtttcactctaccaggtactactgttgtctgcggtgactctcacacatctacccatggtgcctttggttcattggcttttggtatcggtacttccgaagtggagcatgtcctggccacccaaacaatcatccaagccaaatctaaaaacatgagaattactgtaaatggtaaactatcacctggtatcacttccaaggatttgattttgtatatcattggtctcataggtactgcaggtggtactggtagtgttatcgagtttgcaggtgaggctattgaagccctttcaatggaagcacgtatgtctatgtgtaacatgtccatcgaagctggtgcaagagcaggtatgattagaccagatgaaaacaccttttcttacactaaaggtagacctctggctccaaagggtgccgaatgggaaaaggctgttgcctactggaaaactttgaaaaccgatgaaggtgccaagtttgaccacgaaataaacattgaagctgccgatgtgattccaactattacctggggtacttctccccaagatgccctaccaattactggttcagttccagatccaaagaatgttgctgatccaattaagaagtctggtatggagagagctttaagttatatgggtttagaagcaaacacaccattaaaaagtatcaaggtagataaagttttcattggttcctgtactaacggtcgtattgaagatttgagatgtgctgcagctgtagtgaagggccacaaactggctgatagtattaagttagccatggtcgttccaggttctggtttagtcaaaaaacaagccgaagaagaaggtctacacaaggttttccaagaagccggttttgaatggagagaagctggttgttcaatgtgtttgggtatgaacccagatattttggaggcctatgaacgttgtgcttctacatccaacagaaacttcgaaggccgtcaaggtgccctatctcgtacacatttgatgtctccagccatggctgctgctgccggtattgccggtcatttcgtggatatcagagaatttgaatataagaaccaagataaaggtagtccaaaagtggaagtcacttcagatgatgaaaaggagcttgaaagcgctgcttatgatcacactgaacctgttcagcctaaggaagctacacaggatgttgccaatgatgaattgaaggatattccagtcaagtcgaatgatacccctgttaaagctgccgcctccggtatgaagccatttttgactttagaaggtgtcagtgcaccattggacaaagctaatgttgacactgatgctattatcccaaaacaatttttaaaaactattaagagaacaggtttaaagacgggtttgttctatgaatggcgtttccgtaaagacgatcaaggtaaggatcaagaaaccgatttcgtattgaacgttgaaccttggagggaagccgaagtattggttgttaccggtgacaatttcgggtgtggttcttcaagagagcacgcaccatgggctttgaaggattttggtataaagtcaattatcgctccttcctatggtgatattttctacaataactctttcaagaatggtttattgccaatcagattggatcagcaaatcattcttgataagttgattcctattgccaacaaaggtggtaaactatgcattgatttgccaaaccaaaagattttggattccaacggtgccgttcttgttgaccattttgaaatagaacctttcagaaagcactgtctagttaacggccttgacgatatcggtattacattgcaaaaggaagatttcatttctaaatatgaggctttaagaagagaaaagtactcgttcttggagggtggttctaagttactaaagttcgacaacgctccaagaagaaaggctgttactaccactttcgacactgttcaccaggactggtaa

SEQ ID NO: 940 - DNA, 3534 bp, Saccharomyces pastorianus
atgtctaggcaagacgaaaactccgctttattggcaaataaggcaaacaatcaaccatcatacacaagaaaccagaacggagaccaagacgattttaagctttcaaaaagtcagctttcggatctgcacaacccaaaatccgtagggtcgtttatcaaattattcggtgaagaaactggcaattttttcaaatatttaaaaacagataaaaatgcaggtatttcacttccaaaaaggacagactatcgcaagacaacccgttataagaattacggagacaactctcttcccgaacgagtcccaaagtcttttttacagttagtgtggatagccttcaatgataaaacaatggagttactgtcagttgctgctgtcgtttcctttgttttaggtctgtatgaattgtgggtgcaaccaccacaatatgatcctgaaggtaatttaattaggcaagtcgattggatagaaggtgttgctatcatgatggctgttcttgtggtggttctagtaagtgccgccaatgattaccaaaaggaattacagtttgcaaagctaaataagaaaaaggaagaccgtaaaattatcgccataagaaacgaccaggaagtactgatttccattcatcacgctttggttggtgatattatttcactacaaactggtgatgttgttcctgctgattgcgttatgatatcagggaaatgcgaagcagatgaatcttctatgactggtgaatctaacacgataaaaaaacttccaattgctaactcattaaaggatttcaaaaaattcaattccggtcacgaccacttacgaaagaagccattagatataggtgatgctgacgaagacggtaatagagtcgctgattgtatgctaatctctgggtctagaattttatctgggttaggcagaggtgtaatcacatccgtaggtataaactcagtttatggtcaaacaatgacttcattgaacgtcgaatccgaaagcactcctttacagctacatttgagtcaattggctgacaacatatctgtttacggttgtgtggctgctatcatccttttcttggtcctattcatcagatatttattttatgtaatacctgagaatggcagattccatgatttagatcctgctcaaaaaggttccaaatttatgaacattctcattacttccattacagttattgtagtggctgttccagaaggtttaccattagcggttacgctagccctggcatttgccacaacaagaatgactaaagatggtaacttagtaagggttctgagaagctgtgaaactatgggctctgctactgcagtctgctccgataaaactggtactttgacagaaaacgtcatgagtgtcgttcgtggtttcttgggcaattttaattttgatgacaataaatccttacctgttagtgaacagaaaaagctaaattctaagaaagtattcggaaaagactgttcgtcatctttaagaaacgatctattagctaatatcgtgctaaattcaactgcctttgaaaatagagattttaagatgaaaaataaaggcaacagcagcactgatagagattcctcagagaggtccagttcttccaacgggtggatgtccaaattattgttttttaagaagaacaagaacgacaaccatgaagatcaattattcgagaatgtttctaaaggaaagcaagagccattcatcggttccaaaacagaaacggctttactcagtctagcaagattttctttgggtttgcaagttggagaattacaggatttgagagaccagccgactgaaaaattcaatatcgaaaagattgttcagacaattccatttgaaagctctcgcaaatgggccggactagttgtaaaatacagaggtagtgaaggtaaaagaccgttctataggctttacgttaaaggtgccgcggaaattgttttccaaaattgtttatataagagaaatttagatgatactttgaaaaaaattgatgaagaaactaaagaacaaataaatggtgaaatcaaaaatcttgcatccgatgctctcagagcaatcagtgttgcccacagagatttttatgaatgtgaaagctggcctcctgagcagttgcgcgataaagattcgcccaacacagctgcacacgatttacttttcaacgatcaaagcattgaaaagggtctgattctagatggtatacttggtattcaggatcctttgcgtgaaggtgtcagggaatctgttctgcaatgtcagcgtgccggtgtaactgtacgtatggttactggtgacaatatattaactgcaaaagctattgcaaggaattgtagtattctttccggagacgtttcccctgaatcatactctgccatggaaggcactgaatttaggaagttaaccaaaaatgaacgtataagaatcctaccaaacttaaaagtcttggcaagatcatcaccagaagataagaggttgttggtagaaacgttgaaaggaatgggagacgtagttgcagttactggtgacggtacaaacgatgcgccagctttaaaactagctgacgtggggttttcaatgggtatttcgggtaccgaagttgctcgagaggcctcagatattattcttatgactgatgatttttctgctattgttaacgctattaaatgggggagatgtgtttctgtctccataaagaagtttattcaatttcaattaattgttaacattactgcagtaattttaacttttgtgtcgtctgttgcatctagcgacgaaacgtcggtattgacagcggtccaactattatggatcaatctgattatggacactttagctgcgttagctttagctactgataagcctgatccaaacataatggatagaaaacctaaaggccgctcatcgtctttgatttctgtttcgacttggaagatgattttatcacaggctacattgcaattgatagttacttttattttacacttctacgggcccgaattatttttcaatagccacgaagatcaaataacgagtcatcaacaacaacaactaaatgccatgacattcaacaccttcgtttggttacagttctttactatgctagtatcgagaaaattagatgaagctgacggcatatcaagttggagagatagaatttcaactgcaaacttaaacttcttccaagacttgggcagaaattattatttcttaacaataatggcaatcattggcggatgccaagttttgatcatgttttttggtggtgcaccattctctattgccagacagaccaaatcgatgtggataaccgctgttctttgtggtatgttgtctttgattatgggattattggtaaggatagtccctgatgaagtagcattgaaagcatttccggttgcttatgttcaaaaatttaaatatgtatttggacttgagtttctcagaagaaagcaactcgcaaaaaatgacgacgaagaagcgcttttggacgaatctgatacaccagagtctacggcgttctactag

SEQ ID NO: 941 - DNA, 840 bp, Saccharomyces pastorianus
atggccgacttatctattgcagatgatgatgatatcttaggaatgttttttgatgaggaatttgttcctcacgcatttgttgatatacttttaacaaatgcacttgacgaagatgaaatccaaacgcaatccatatcgtcatcgctattgaccaggctggacttctacacaaaaaaccttacaaaggaattggagaatactatatggaatttggataaattgtctcaaacactaccgatggcgtgggcaccttctagatccagggaagaattagacaaagatgattcatcagtatattcgactgaatcgctaaggtcatctaagctggagtactatctggataccttgggaagtgccgtaagagcattagaaacaggaatgaagaatgtgacggaaaaggtaaaagagatagatcaacaaaaagatgagaacactaatgttagaaaacaactgcaaaatttagtgctaattaaagaaagaattgagaagacaatatattatttagaacaaatcaagaccgttatgaatatttcgacaacaaaagaaagtggaaacactgctaccatgggtagcgacatttcaataagcgacttcaagacatctctgaagactctagagaatacgattgatgaatcgctagctttaacgtctggaaatgaagccaaaaaccaaaaaaattccgatttgatagaaaaaattgactcactttccgaactgaaggccttgtttaaaggtcttgataagttctttgctgaatacgtcaccttttcagagagtataaaatcaaaagcacaaagttatttatcaaccaaggatattgacgaagagctaatttcttga

SEQ ID NO: 942 - DNA, 1701 bp, Saccharomyces pastorianus
atgtctacaaactcaaacccgttcatgaataatacaccttcttcctctccacttaagggttctgagaataagaggatatcgaaacggccgatctccagttcgtcatctgcctcactattatcctccccctccagacgatcgaggccgcctacagtatatggtgatagatatattcctaacagaactgacatagatttgaattctatcgtttcaatcagtagcataacgaacgttcctgccctcaacccatcgagcacagaggatcaagtcgagtaccaaaaggaaagacaagcacatgaaacgtacaacactctgttaaagaatgagctttttggtgaaatgcttagtaaggatacagtagggccagaaagtagtatagaccgtataaagaacactaggccatctactatgggcgttgtacatgcagaaaattcaagtaaccgtggttatgagctggaacgagtatcaacaccgccacctgaaggggctggtttagaagacttttctccacactctacgccagtcacgcctcgacgtcttttcacttcacagcaagatgaagtcatacggccttccagtagctcagtgagaggcgccagcctgctgacctatcaacaacgcaaaggtagaaaactctcagcagcatctttgttacagtcacagttttttgattcaatgtcgccagttaggccagattcgaaacaattattgttgtcaccaggaaagcaattcagacaaatagcgaaagtcccttatagagttctagatgctccatctttagcagacgatttttattatagtttgatagattggtcgagcacagacgtcttggcagtcgcccttgggaagtctatatttttaacggacaataatacgggggacgttgtgcatttgtgtgacacgcaaaacgaatatacaagcttaagctggattggagcaggctctcacctagcagttggccaaggcaacgggcttgtagaaatttatgacgtaataaaaagaaaatgtataagaacattatcaggacatgtcgatagagtggcgtgtttgtcttggaataatcatgtgttaacatctggaagtagggaccatcgaatactgcatagagatgtaagaatgccggatcctttcttcgaaactatagagtcgcatactcaggaagtctgcggcttgaagtggaatgtagcagataataagcttgcatcaggtggtaacgataatatggttaatgtttacgagggaacttccaaatccccaatcttgacatttgatgaacataaggctgctgttaaggcaatggcttggtctcctcacaaaaggggcattttagctacaggcggtggaacagcggatagaaaattgaaaatttggaatgtcaatacttcgacgaagataagtgatatagacagtggctctcagatatgtaatatggtatggtcaaaaaatacgaacgaacttgtgacatcgcatggttattcaaaatataacttaactttatgggattgtacttccatggatccaatcgcaattttgaagggacacagtttcagagtccttcatttgaccttatctaatgatgggaccactgttgtttctggagctggagacgaaacattacgatattggaagctttttgacaagccaaaagcgaaagttcaaccaaattcgttgatatttgatgcattcaatcagatccgctaa

SEQ ID NO: 943 - DNA, 651 bp, Saccharomyces pastorianus
atgttattacactacgtcttactggctcttgtgttatcgcccttcagagcctctgcattttatttctatggttatggtggagaccgaaaatgtttcctaaaggaattatccaaggacacccttttaaaaggctcttataacttgggagttcatgatgaaaagttggaggactatgctcttcccagtcaaagtgattacggcatagttatagatgtggaagaggtgtttgataataaccatagagtggtccatcaacagagttctccttcaggtgacttcacgttcctggcattagaatctggggaatacaaaatctgtcttcaatcccaagtaaagaattggataggtaaaaccaaaacaaaactggaagttgaatttgaaatcggttttgaagccatgttggattcaaaaaggaaagatactatagaaactttgcacgagaaagtcaatatattaaattcgaaaatcatggaaattagaagggaacagcaattggtgagagaacgagaagaatccttcagagatatatccgaatctgtaaactctcgcgcaatgtggtggatcgtgattcaagtcattatcctgatctcaatttgtgtatggcaaatgaaaagcttacgttcattttttgtcaagcaaaaagtcttgtaa

SEQ ID NO: 944 - DNA, 1050 bp, Saccharomyces pastorianus
atgtcaaacatagattcagttttaattattggtggttccggtttcctcggattgcacttaattcagcaattttatgatataaatcccaagccagatattcacatttttgatgttagaaacctcccagaaaaactttcaaagcaattcactttcaatgtcgatgacatagaattccataaaggtgatctaacctcccccaatgacatggaagatgctatcaaggaaagtaaagcaaatgttgttgttcattgtgcttcgccaatgcatggtcaaaatccaaatatttacgacatagtgaatgtaaagggaacgcgtaatgtgattgatatgtgtaagaaatgtggtgtcaatgttcttgtatatacttcttctgcgggtgttatttttaacggtcaagacgtgcataatgcggatgaaacttggccaattccagaagttcctatggacgcatataatgagacaaaggctatcgctgaagatatggtgttgaaggcaaacgatccagacagcgatttttatactgttgcacttcgtccagcaggtatttttggtccaggggatagacagttggtgccaggtcttagacaggtcgcaaagttaggacaatcgaagtttcaaattggtgacaataacaatttatttgattggacttatgccggtaatgtcgctgatgctcatgttttagccgcacataagttgcttgacccaaaaacaagatcggaggtctctggtgaaactttctttattaccaatgacacccccacttacttttgggccttagctcgtacagtttggaaggcagatgggcatgttgctaagaacattattgttttgaaaagaccagttgcaatttgcgctggttacctttcagaatgggtttccaagctgctgggtaaagagccagggttgactccgtttagagtcaagatcgtgtgtgcataccgttatcataatatttctaaggctaaaaagttgctgggatatacgccaagggtaggtattgaagaaggtatcaataaaacattagcctggatggacgaaggtttgtaa

SEQ ID NO: 945 - DNA, 1425 bp, Saccharomyces pastorianus
atgtcatcttcagatatttttgatgttctaaacattaaacagaaatctaaaagtccggctaatggcccgacttcggtgccctcgtcctcggcagccaatcgattcaaacctcaggtgactggtatgcaaagagaactatttaacttgctgggggaaaatcaacctccagttgttattcagtcaggaaataacttcaaggaaaaaatgctttcgacatcaagaccatctccctggtcatttgtagagtttaaggctaatcccttcgttactctgcgccattgggtcaagggttctaaagaattggtaggagatgaactgaaggaatcgccatattctaaatttaatcagcacttatctatcccatctttcaccgaagaagagtacacgaccttcatgcatgacacagaaaatcaagagaaagtgcaaaacgataaaaaccccaatgacagcactgaaattggaaagaagaacgataataaaaactggtcttttgaggaaataaactatttatttgaactctgtcgaaagtatgatttacgttggttcttaattttcgacagatataactataataaatcacgaatacttgaagaccttaaggaagaattttaccgcatctgtagaaattacttcaaaacaaacaaccctagccatccactcctatcttcgttgaacttctcggctgaaaaggaaatagaaagaaaaaagtatctacaacgtctactttctcgttctgcagccgaaattgctgaagaggaagcactgatagttgagtcgaagaaattcgaaatggctgctaagagaacactagcagaaagggaatcattactaagactattggattctcctcattcagatcagtcaattacacaatatctcacatctcaggggatgtcacagctgtacagcacgcttttagcagacaaaactaggaaacgtaagcacgatccaaacattcctgaaaatccttggatgaagcagcaacagcagtttgctcaacatagacaacttcaacaaatgaatgtgaaaaagccggaagtcaaagaaagtccttcccccaagaagacaaaaagacagagacaagagatgcaaactgcactcaaaagaagatctgagagtgcgtacgctgaactattattgaaggattttaattccgaagaaaggaaggcgttgggcgtaataacacacggtgaaaaactatcgccaggagtttatttgagatcaacaaagctatcgacctttaaaccagcgctacaaaacaaaatttttgctgttcttcaagaactttctttaccctctcgtcctgtgatgccatcaaacgacgtaatggaaagacaagaagagcttgtaaaaaaaatcaatacccttatcgatttaaaaaaacatgtcgataaatacgaagccggtatgtctattacgaagtga

SEQ ID NO: 946 - DNA, 1398 bp, Saccharomyces pastorianus
atgagcgaaagaaataatgaaaatatagattctagaaactcaagccaaatagttgaaacagatcctgcagaaagcaagaataaacacatccgtagcgctttgagaaaacgaaaaggtagattaaccgcccaagcttatgaagaagatcaagaagctattttgtcatctcctttattaacttctacgcccaaaacagtctctagatcattagtgaggctgtatccatatttaatcgttgtggataattttttgagcgtcatcacatggtccaatgataacatatttgtaaacgtgtttggaatatttacctttactgtttgtgttttgtactttggaaccatcacaaagtattttggacatttaatgattgtgggtataatatgggcatatctattaatagacaagcacgtccaagaaacaatggcatcttgcccttcattagatgatataatacatgtaatggatagagtttctatgaagtctagtgctgtcttgtcacccattactattttaagcgctcaagatgtcaggagattgttatttactgttgcattcctatccccaatttacatttttcttacaatgtttgtgctacctccaaattatttgatgctggcggggggactgtatgtacttacgtatcactctaaactgattagaagaatgaggagatatatgtggaagttccgcattgttagattacttgtattcttcgtaacaggattagaccttgggggaccagacaacaataggcgcttatttgcttctgttaacaagaaaataaggtcctttgtctggaatgaagtaggtaatacgtctagtaccaaaaagactgttcttttcaaagtcgccctttttgaaaaccaacgccgttggcttggtattgggtggacgtccactatgctgagctatgagagggcatcttggacagatgaatttctgaattcttcccctagccctgatatgtttacattaccagagaaacagtctggaatggcatgggaatggcatgataaagattggatgctcgacttaacaaatgatggggcaattcagcttcctgcttctgctactaaaactaagtttaagcctggtgcagatgaaggctttatatattgtgacaatacctggaataacccttcagctacagacacatataaaaagtacacaagaatacggaggtgggtcaggacagcaacagtgacgaccacgtatgacaatgagcccaatgtggagaaagtttcgatgaataccctcgctccaaaaagtgaggataatgataaaggcaggaaaagaaaggtttcgttcagtgcagcaaatgaagtgcatattataccttcctctagtaacagcaaattaatagagatgtcagacattgcaatggacggttctctataa

SEQ ID NO: 947 - DNA, 1203 bp, Saccharomyces pastorianus
atgagtagtaacgcaccaggggctcccactctttctgctaattctgcggcttctgaagggaaggagaaatcggataacgtttccggtgatgagtatctttctcaggaggaggaagtttttgatggtaatgatattgaaaacaatgaaaccaaagtgtatgaagaatctttagacctggacttggaacgtagtactagacaggtttggttggtcagattaccaatgtttcttgcagagaaatggagggatagaggtaacctgtatggtcaagaattgggtaagattagaataaacaaggatggcagtaaaatcacgctacttttgaatgaaaatgataatgattctataccgcatgagtatgatttagagctcaccaaaaaagtggtagagaatgaatacgttttcactgaacaaaatttaaagaagtatcaacaacggaaaagagagttagaagctgatcctgagaagcaaagacaagcttatttaaaaaaacaagaacgcgaagaagagctcaaaaagaagcagcagcaacaaaaacgtagaaacaacagaaaaaagttcaatcacagagttatgacagatagagatggtagagacaggtatatcccatacgttaaaacaattcctaagaaaaccgctattgtaggaacagtttgtcacgaatgtcaagttatgccatctatgaatgatccaaattaccacaaaattgttgaacaaagaagaaacattgtcaagcttaacaacaaagaaagaatcacaaccttggatgaaaccgttggtgtaacgatgagtcatacaggtatgtctatgaggtcagacaactctaatttcttgaaagttggacgcgagaaagctaagagtaatatcaaatctattcgtatgccaaagaaggaaattttggactatctatttaagctgtttgacgagtatgattactggtctctaaaggggctgaaggaacgtactagacaacctgaagcgcatttaaaggagtgtttggacaaggttgctactcttgtaaagaagggaccttatgcgttcaagtatactttaagacctgagtataaaaaactgaaagaagaggaaaggaaggcaacattaggtgaattagccgatgagcagacaggttccgcgggagagaatacccaaggggaggctgaagctgattttgaagatgaaatagagatggaagatgttgtttag

SEQ ID NO: 948 - DNA, 972 bp, Saccharomyces pastorianus
atgacgataattttagatcctgatagagtttggatagacggctgctttgacttcacacatcatgggcatgcgggagctatcttgcaagctcgtcaaacggtttcaaaagaaaatggtaaacttttctgtggtgtgcataccgatcacgatattcaacataataagggttcgcctgtcatgaattcacaagaaagatatgaacataccagagcaaataggtggtgttcagaagtagttgaagctgcgccgtatgtgacagatcccgattggatggataggtaccaatgccaatacgttgttcatggtgacgacatcaccctggatgctaacggagaagattgttataaagtggtcaaagaaatgggacggtttaaagttgtcaaaagaacatacggggtaagtactaccgagatcatacatagaatattaacaaataatacgttggcgcctactcatcctgattattatgctaacactcaagagctaggtttttattcagttgccgaagatgcggtttcgaaacattgttatgtttttcaaaaagatttgagttacgtcctggtaagtggtggatacgatttcaacgtaggagattgcgtttacgttgatggagatttcgacttatttcacatgggagatattgaccagttaaggaagttgaaaatggatctccacccagacaaaaagctgattgtcggcatcactacaaatgattactcaagcaccatcatgacgatgaaagagcgttctctaagcgttctaagttgtagatatgtcgatgcagttattattaatgctgatgccgacgcattagctcagtgtaattggaaaaaatatcgtataggcacggctgtcctcacggaaggcggaaagtttagcgaatacttgactaaagacgtcatcgtcaagagaatagaatctcgaagggatgtctatgttgcgagaaaccaaaagaaaggtatgtccatttaa

SEQ ID NO: 949 - DNA, 255 bp, Saccharomyces pastorianus
atgactagaacaaataaatggactgaacgtgaatcaaaagctaatccaaagtacttctcacacactggtaactacggtgaatccccaaatcacatcaaaaaacaaggttccggcaaaggtaactggggtaagccaggtgacgagatcgatgatttaattgacagtggtgaaatacctccagtattcaagaaagatagaagagggtcaaactctcaagcacatgaacagaagttcgaaaacactcaaaaggaataa

SEQ ID NO: 950 - DNA, 1959 bp, Saccharomyces pastorianus
atggggttgaagaaattcttcaagattaagcctccagaggatgcgacatctgaacaaaataaggacactttgatggaattaggtattagcgtcaaaaatccaaataagaaaagaaaagaaaagttttccgcttatggtaaattcgcgaatgataaatctgaagataaggtgtatgcaccaccaggttatgaacagtacgctaagccacgggatgaactagaggatttgaatgcctctcccctagatgccaatggtaacgaagcgaccgctcagcctagtcaaacttcaactggcacgggacaacaaggaggccttgcagagtctaattctatgcagaaagatctttacgctattgaaaacgaagattaccgatatgacgatgacccctatgcaagatttcaggcgaataagagcaatagtgggagtagcgccaatccgtcggcgtacggtggttttggaggaggctataacagtgcacctattaattccttcaacaacggaggctcttatagtaaccaaagtgcaggaaatagttggtccagtggaaatgtcagcaacaatcaaaaccgaacaaatgataattttaatccaagacaagcacagcagaaacaatctcctgtttcagtgtcacggaaacctccaatggcggaccagaggggctactcatcaaaccctacgcaagagaaaagaaatccttatgctgatacgaatagttacggtggtggatatgacgttaatactaacaaaactggtagtagccgaaatggaagtgccacgaattcaaatccatacgcttctatgacaaacgatctttacagcaataccaacccaaacaggtctgcaaatccatactccagaagaaacaatagtcaaccgcaatcgcagcccgcaccaatgacttacaccccatcatttgttgccgccaatgaagcagaaacaaaaactgaagttgacctaaacgacgcacctagagggggtgagttcgactttgaagatgcctatgcagacaaatctgcagaaaacagggtggcattagatgagcccgatttgaatgcagtaataacaaatgatgattctgtagatttaaatgcatctgaagtagatcaacgttcaagacagcaacaacaacaacaacagtggttcatggatgagcgacagcaacagcaacaagacctcaatgcaactactggccagtatgaagatcagagaggctataagacattcgaagatatacaaaaagaagaggaagctcgccaacagcaggaagaagatgaggctgtggatgaaatcaagcaagagatcaagtttaccaaacaaagttctgtcgcttctactagaaacacactaaaaatggcgcaagacgccgagagagctggtatgaacacactgggtatgctaggtcaccaaagtgaacagttgaacagtgtggagggaaatctagatttgataaaagtacaaaacaaggtggccgacgaaaaagtagccgaattaaagaagttgaatcgtagtatacttgccgttcatgtttctaatccgttcaattctaaaagaaggagaagagaaagagaagagcaattgaagaacaggaaaattgaagaaaaattgatgagagaacaaacaaatcaacaaatctcaaggtccactcaaagaatagaaggtgctatgaatgcaaatggtaatactagtgaagtacgtgagagataccaaagacagaatattttagaaaaggcgaaaagatatcaatttgaagatgatgaagaagatgacgaaatggaattagaaattgatagaaatttggaccaaatccaacaagttagtaatcgtttaaagaagatggctttgaccactggtcaagaattagactctcagcaaaaacgtctcaataacattgaggaaggtactgatgatttagatatcaatcttcacatgaataccaacaggttggccggtatcagatag

SEQ ID NO: 951 - DNA, 1188 bp, Saccharomyces pastorianus
atggaccccacaaaagcacccgactttaagccaccgcaaccaaatgaagagttgcagccaccaccagacccaaagcataccataccaaaatctggacccatagttccatacgttttggctgactacaattcttcgattgacgctccttttaatcttgatatttacaagaccctgtcgtcgaggaaaaaaacttccaactcaagcaaccgaatggatcatattccgttaaatactagtgacttccagccgttgtctcgggatgtatcgtcggaagaagaaggtgaagagcagtggaacggaattgattccaagctgcagaatgttacgacggctaacaatttgggcgtgttaaagagccaaattgctgacctggaagaagtccctcacaccatcgtgagacaagccagaactatcgaagattatgaatttcctgtgcacaggctaacaaaaaaactacaagatcctgaaaagctacctctaatcatagtcgcttgtggatcgttttccccaataacatacctacatttaaggatgttcgaaatggccttggacgatattaacgagcaaacacgttttgaagtggttggtggttatttctctccagttagtgataactaccaaaaacgtggattagcgccagctcatcatcgtgtccgcatgtgtgaattagcttgcgaaaggacctcatcgtggttaatggttgatgcatgggaatctttacagtcaagttatacaagaaccgcaaaagtcttggaccattttaaccatgaaataaatattaagagaggcggaatatcgaccgtggatggtcaaaaaatgggtgtcaagattatgttactagcaggtggtgatcttattgagtccatgggtgaacctcacgtgtgggctgattccgacttgcaccatattttgggtaattacggttgtttaattgtagaaaggactggatcggatgttagatctttcttgctttcacacgatatcatgtatgaacacagaaggaatattctcattatcaaacaacttatttacaacgatatttcatctacgaaggtacgtcttttcatcagacgtggcatgtcagtacaataccttcttccaaactctgttatcagatacatccaagagtataatttatacattaatcagagcgaacctgtcaaacaggtattagatagtaaagaataa

SEQ ID NO: 952 - DNA, 573 bp, Saccharomyces pastorianus
atgtctagattaagaagatttaacaggaaaattttgggcttgaatcccggttacgcttatgaagttgagtcagaacacgatgacatatccatgttaccgttagatacagaggaacaagaagaacttatacaaaaatttgaggtcaatgcccacattacgaataagacgtacataaacgttttaagtgtactttatttgctgtatggaggattgctaatgatattcgtaagaaaatcgcgagggcatgttaaattagcacttcttgctggcgctaattccttgatctgctcatgcattacgcttagatataatatcataaatgattaccttttattcagcaaatttaaattacgagtgagtaatttttcaattaatacattaaacattgttttgttagtatttacgggttggataagtttcaaccatgcgatggaagataggaaaacattgttctatttacaggttccgatggttttattttgggtcgctgtaatcgtaaaaaggtgggctcggaatatggaagatgaaattgcggacctacggcgtttaaagtataaatacaagaatgcttga

SEQ ID NO: 953 - DNA, 900 bp, Saccharomyces pastorianus
atgtcgcatgaaatggcaccgtgggtacccatgtttattcagtcatgtaaaaacaacactgagccattcgtaccattccaattcgctactgtggataagttgaccaacaagccacgctgtagaacggtagtgttcagagactttctgttccacgataagaaaactaacgttttgacctttaacactgatatgaggagttctaagataacggaatcattcatagaaccaagctcgagtaattctggtggtgacaaccaaagatgcgagactccattttttgaagtgtgtgtctatttcccagaaacttgggaacaatatcggtttagtggtcaaagctttatattatctaggcagttcaaagaaataccggatgaaatcatttccaaatatgaaattttttcaccgcggctttcagaagcaagtgacaatagtactgatgaagacatagatacttcaattaacgaccacaacgataaaaataatgacgccgacgatcataacattaacaacgataacacactcataaaaacaacagacgacgacgacgacgacgaacatcacgaggatgaggattctcaaccacaaccacaggaatgggatgcagaactactaagacaatggtcttctctatccagacatacaaaatcattatatagaaagccagcgccgggccaaaagcttacctctgaaaccagcaaacagttagacaagcttcatagaggagttgatggcgctaaagaagatgtgggtttggaaaattttggtatcgtttgtctttgtattgactctgttgattatttgaatttgaaggagggaagaggtggcgaaagatggattttccagaaaactgacggtaaagacgaagaggatctgtgggaggaacaagaagtgtgtccatga

SEQ ID NO: 954 - DNA, 1416 bp, Saccharomyces pastorianus
atgtccatttgtgaacaatactacccagaagaacccgctcaaccaacaatcaagaccgattctattcctggtcctgagtctcaaaagcagttgaaggaactaggtgaagttttcgatacgagaccagcatatttcttagcagattatgagaaatccttgggtaactatatcgctgatgtagacggcaatacttatttggatttatatgcacaaatctcctcaatcgcactaggttataacaatcctgccttaatcaaggcagcgcaatcaccagaaatgatccgtgctttggttgaccgtcctgccttgggaaatttcccatcaaaggatttagacaagatactaaagcagattttgaaatccgcaccaaaaggtcaagaccatgtttggtcaggactctccggtgcagatgccaatgaattggcattcaaggccgcctttatctattaccgtgccaagcaaaggggcttcgatgctgatttttctgaacaagataatatatccgtcatggaaaataacgctcctggtgctccccaacttgctgttctgtcattcaagaaagccttccatggtagactatttgcctccgggtctacaacctgttctaagccaattcacaagctagatttcccagctttccattggcctcatgctgaatacccatcttacaagtttccgttggaagacaatgccgatgaaaaccgtaaagaggatgaccgttgcttgcaattggtcgaagaattgatcaagacttggtccatcccagtggcagctttgatcgtcgaaccaattcaatctgaaggtggtgataaccacgcctctaagtatttcttacaaaagttgagagacgttactttgaaacacaatgttgtctacatcattgatgaagtgcaaacaggtgttggggccactggtaaactctggtgtcacgaatacgccgatatccaaccacctgtggatttggtgacattttcgaagaaattccaaagtgcaggatatttcttccacgaccccaaattcattccaaacaaggcatacagacaattcaacacatggtgtggtgaacccgccagaatgatcattgctggtgccattggacaagaaatctccgacaagaagttgactgagcaatgtacaagagtgggtaattacctattcaaaaaattggaggatttgcaaaaaaagtatcctgaaaacttccaaagcttgagaggcaaagacaggggcacattcatcgcatgggatttacctactggtgaaaagagagatctgctattgaagaagttgaagtctaatggttgtaacgtgggtggatgtgcagtcaatgcagtgagattgagaccttcattaacattcgaggagaaacatgccgatatttttattgaagcattgaccaaatcagtcaatgagctatga

SEQ ID NO: 955 - DNA, 357 bp, Saccharomyces pastorianus
atggctgagaaacgtactcttatagctgtgatagctgacgaggataccacaaccggtttattgttagctggtattggacaaatctctcctgaaactcaagaaaagaacttcttcgtttaccaagaaggtaaaaccaccaaggaggagatcactgacaagtttgatcacttcaccgaacaaagggacgatattgctattcttttgatcaaccagcatattgctgaaaacataagagcaagagtggactccttcatcaatgcattccctgctatcttagaaatcccctccaaggatcatccttacgatcctgaaaaggactctgtgttgaaaagagtcagaaaactgtttggtgagtaa

SEQ ID NO: 956 - DNA, 837 bp, Saccharomyces pastorianus
atggcaaagactataaaagtggttaggaaaaaagaccccaagaaaaagaatcaatctgatccgttggctaaacaaaaacttatctggaagattggtcatgttttgactttagttttcggcttggtgttttccattacatatttctatcatgccttaatcttcttcaaatatcgttcctggaaatggttgttcttgagagttaacaagaactactcctttattcaaagtaggaaatggtacatgaaactgttaggttggagcccacaaataatgtaccgtctgtctctaattggcgtatttatgtctgaatccgtaacaatgcaacaaaactgggttggacttaaccctacatggagtgatttattgtcttccgagaacttccattctgttttgattgcctgcttatggttcttcggtggtggaaagtcgttctacaagctactgcctttcatgattctaagttatttacacttaacgaaaatgaattacgaattgaatgctgacaaagaaaaaagtattcctgtgacacctagagacaaaaaacttttacatctgctagcttattcggagttgcttgttatcctagctttgactttggatactatattattcaagacaggaacctccggatttatgctgatcatctacgtcggtatttattggttgcgactaaacttttcaccatatgctcaagtgactgttttggaattacttgtcaaatttgaaaaatatgttcctaagcaacataaaagtaagtggcatgttatcaagaatttcgtttatttgaaaatgaaagagcacgaaaagagaactaaagaggttgccaggtacgcctaa

SEQ ID NO: 957 - DNA, 327 bp, Saccharomyces pastorianus
atgcctccaaagcaacaattatctaaagctgccaaagccgctgccgctcttgctggtggtaagaagtctaagaagaagtggtccaagaagtccatgaaagacagagctcaacacgctgtcatcttagaccaagaaaaatacgacagaatcttgaaggaagtcccaacttacagatacgtttctgtctctgttttggtcgatagattaaagattggtggttctttagctagaattgctttgagacacttggaaaaggaaggtatcatcactccaatctccaagcactccaagcaagctatctacaccagagctactgcttccgaataa

SEQ ID NO: 958 - DNA, 1089 bp, Saccharomyces pastorianus
atgtcacgcagattcgatttgaagactataacagatctgtcagttctagttggaacgggaatctcattgtattatttgatcagtcgattactcaacgatgccgaatcaggacccttatctggtaaatcaaaggaatcaaaggctaagcagtctttacagtgggaaaaattgataaaaagatcaccggcactggcagaagtatcgttggactcatatgaaaagactatactgtcgtcgattgtcacgcccgaggaaataaatataacttttcaagatattggtggtttggacccgcttatttctgatttgcatgaaagcgttatatatcccttaatgatgccagaagtgtattctaatagccctctgttacaagctcctagcggagtcttgttatatgggcctccaggctgtggtaaaaccatgctggcaaaagctttagctaaggagagtggtgccaactttatctccataagaatgtcatctattatggacaaatggtacggtgaatcaaacaaaatagttgatgcaatgttttcattggcgaacaaattagagccttgcataattttcattgatgaaattgattcattcttgagagaacgttcttccaccgatcatgaagttactgcgactttgaaagccgaattcatgactttgtgggatggtttattaaacaatggacgagtaatgattattggtgctactaaccggataaatgacatagacgatgcgtttttaagaagattgccaaaaagattccttgtttcgctacctggttcaggccaacggtttaaaatactaaatgtcctactaaaagatactaaacttgatgaaaaggattttgacttgcaactaatagctgacaataccaaaggattctcagggtcggacttaaaagagctctgcagagaagcggccttagatgcagcaaaagaatacattaaacagaaaaggcagctaattgacagtggcaaaatcggtgttaacgatacttcttctctgaaaataagaccattgaaaacaaaagattttacgaaaaaactaaggttggatgttacaagtacattgtcgtctcaacctctggattaa

SEQ ID NO: 959 - DNA, 480 bp, Saccharomyces pastorianus
atgttcaagggcgtttattacggtgaaagtaacacaaacttagacatctcttcttacactcaatgcctactgtttcttcaagaatcaatcataccacctttaacaaataatagcgacaatggtacgctcatacagtatcacggcatatcaaaaaacgataacatcaaacaatccatagacaagttaagtaaacaaatcactgcctctgctgtaaatttagagcaacaacagcacgtactttgtgtattctcttatggtcctcatattcagaaaatgctaagtattttggagatattcagaaaaagttacaccaaggaccacgaaagcttgcatcagtggaataaattgacgtcgttcgatgtaataaaagagggtaggaacgaactattagagaaaaaactaaaagttccaattttgatcacttttgtatccggttctaatgccatgggtctagacctgcatggatttaccaaacagtaa

SEQ ID NO: 960 - DNA, 738 bp, Saccharomyces pastorianus
atgaacgcaagcttgtttaaatcttctcttcgtttaggatatatgaagcccttgttaccacgatctagcactatcattgttccatccataatgacacgaacatctctatttagaaaggctctatctagtagaacgaggttatacactaacggcgcaggtgcagcgtcaggaaagagcgatgccaagactggcaataagcacaaaccgttatggccacaggttaagtctgcttctacatttactttctcaggcatacttgtgataggcgctgttggtatatccactattgttatttatttaattctttcagaactattttcgccttcaggtgacacacaacttttcaatagagccgttacaatggtagagaagaacaaagacgtaagaaatttattacaatgcaatgacggtattacgggaaaagaaagattgaaggcatacggtgaacttataacaaacgataaatggacaagaaacagacctatcgtatccacgaagaaaatggataaggaggggagaacacatcattatatgagatttcacattgaatctaaaaagaaattggcactggttcatctagaggctaaagaatctaaaaaaaattaccaacctgatttcattaatatgtatgtagacgttcctggtgagaagcgttactatttgattaaaccaaaattgaattcagttcctagttctaagggctttttgggaataagatggggtcccagaaaagattaa

SEQ ID NO: 961 - DNA, 363 bp, Saccharomyces pastorianus
atgcttctcacaccagccaatcttgcaagaccgatggatactgaaaactctgacaacaatagcagtaagaacagtaactcgttcatgcgctccatcgtttcttccttaatggttaaaccaatatcatccctcacaaacacagtcacaagaaacaaaggtaagggcgaaagcactccgcgcaatagcacacctaacaaaattacaagatacgatttgtttaaagctgctgctgataatgacttgaaaagaagcaagacccaagaaagggccaaatccagaagaggctccaatagtagatacaatgacgacatttctgtgtctagtcctatttcaggaatccaacggagtagaagcagtatataa

SEQ ID NO: 962 - DNA, 264 bp, Saccharomyces pastorianus
atggtttcacaattattcgaagaaaaggccaaggctgtcaacgagctaccaacaaaaccctcaaccgatgaactactggaactttacggtctatacaagcaagctacagtaggagacaatgacaaggaaaagccaggtatttttaacatgaaggaccgttacaagtgggaagcctgggaagacttaaagggtaagtctcaagaagatgccgaaaaggagtacatcgcgtatgtcgataacttgattgccaaatactcttcttaa

SEQ ID NO: 963 - DNA, 669 bp, Saccharomyces pastorianus
atgaccgaattagattatcgtggagctgctcaggcgacttccgcctcatacagccgagatcaaacagaacttaagccatttccttctgccggcagtgcttcttcgtcaatcaaaactacagaaccggtgaaagaccatagaagaagacgttcatccagtataatttcacatgtggaacaggaaacctttgaagatgaaaacgaccagcaaatgctaccaaatatgaatgctacatgggtggaccagcgtggtgcttggatcattcacgtggtcgtcatcacactgttgaaactatttttcaacttgttccctggtgttaccgcagaatggtcatggaccctgactaacatgacttacgttgtggggtcgtacgtcatgttccatttgattaagggtacgccgtttgatttcaacggtggtgcgtacgacaatttgacaatgtgggaacaaattgatgacgaaactttatttactccttcaagaaaatttttgattatcgtgccaattgccttatttctggttagtactcactatgcacactatgatttaaaaatgttttcctggaactgctttttgacaacattcgttgctgttgttccaaagttacctgttactcatagactaagaatttctattcctggtattacaggtcgtgctcaaattagttga

SEQ ID NO: 964 - DNA, 1671 bp, Saccharomyces pastorianus
atgtcacaaatatctagaaatgattcggctaccactgacacttcaatatcaacctcgggatctacaacggtattgtccacatcctcgtccgataaggacactgtgagtataaaccaacaacgcgcaagaataaggtccggctcattatttgtcgagggatctcatctatctccatcatcggaaacgaaatcatataacatttacatcgatgataccaaatacgataaaatctttagaggagattcaacctcaagtggcacgggcagtccgcaggtcttcgaagatgctaaagatgataatttccacgaagaatcacatagagctttggagaattcaattttggatttaatacgacgaggctcggaagctgcagaattcccattacctccgccgtgctcaagtgacagaaacagaaattcttcccacggctcttccgcagaaacgaatccaaatggacacagtagcagcggtactatttctacttcagtacttttgaacttgggttccgctgaaaagcatgctgagaccgccaggggtgattatatagattcatcttcagtaaaatcatcagataaaaaaaaggagagacgttcttcgtcatactatccgccatactatccaccaaatggaggtagcccccaaaaccaacagccagggaataccgtttcgaaaagccgagcctcaagtcaagtgcaggatgaatactcttcattttcctctgtgcggtatgatgacgggttcgtaccatcgattgaagaagctgttgaagtatctaagaaaaagatttccaatgacgcatcaaaaggtgtttttcctgaccagactttcataccgcatgagtttcaaataccaaaaaaggcttggaataggccctcggcacatacccctacaaagtcatttcccatggtcaaaactccaagaaaccattatctgctaaccgacatattaaaaccgtctgaagcggttgactttgccaatcaacaaaggtctcctaccttgctaaataacacattacaccctaatacatggcatagctctgctaaagaaggcccccaaccccgaaaccaagatgaaaagctgcgggaaaccaaccgatccgctccaaatcatatttatcgttcccaagctcctcttgatgtaggagcgaacacctcgggtggtcaaaactcactgtatcatgaagaacattcaactaatgcggatgactattcagtttctaaagaaatcggtcaagaaaatcaggatggcacaaaatacgaatacaaaacatttgctaaaggcgcggaccaagaatggcaatcgccctttcaaatgcacacgatacccattcagagaatagacacatcctccatacattcgtatgactcccaaacgcgtggattctccgaagtctatagtatatcaagaatcatggtgacactgtgcacctgtgttttaattccgccgctgttctttttcttttccattgatggaaataacggtatttcaaattatagactaatgagaatgataatgaatcatgagcatagaattggcctactcaaaggattcgaatgggacattgacataaaatggttcagaacgttatgttttattttaggatgcatagagttgttagctatattcgctggtataggaataggatttggcgtgggagtaactcgagagtag

SEQ ID NO: 965 - DNA, 810 bp, Saccharomyces pastorianus
atgctatcacatatcgttgagtatgaatgccaatataccgatcagatttacaaaaaacgcaaaatttggcatgatggcaaactaaagtattttcaaataaacagcagattcatgctctatacggaaaaggataacattttattaactagtgaattcaaaacaagttccaaagagctgaaggccattttgaacccggaagggtttgatatcgaagagcataggattttcagtcagtttttagtaataatctcaggtattatcgacgaatatgatagagatattcaagtaacagcatttcacgtcagaacagatcctcctattctatcagtgcaaaaaaagcaacctgcttcctcagaacgtgtgcctactttgaaccacatttcaactgcaagggagatacattcaaatacgaaagtcacaattcctaaagacaagcagaaacaggacagtggcgctagaggtggattcaacattagcaagcttactttaaaggtgaacaagccttttaagaagcccaagaggatattgaatgctaatgtagtgaatgagttgaacaggccgagtataagggatagaagaagtccagaaacggtgcaaccagatgaggtaaatattggtatagagaagatacatgaagttgaaaaaatcgtgctgggtgaagatgatattttaaaatgtccaggtgagacaaatctgcaagattctaagggtacagatggttctgaaaagaaaactggtgtaagaatggcggccaagagtaagagaggaagtagaatacgaaaaatcgttcacaaaccactcaaaatttga

SEQ ID NO: 966 - DNA, 1002 bp, Saccharomyces pastorianus
atgtcagaacactcagacaaaaaacagaaagttgctatttcgtccttggaccagttgaagaaggctgggacccatgtggtggctgattctggggattttgagtccatttccaagtacgaaccccaggactcaactaccaacccttctctgatattggccgcttcaaagctagagaagtatgaaaggctgatcgatgcctctgtcgagtacggtaggaagcatggtaagaccgatcatgagaaagttgagaatgccatggataaaatattggtggaatttggttcacagattttgaagatcgtgccaggtagagtatccaccgaagtggatgcaaggctgtcctttgacaagaaagccactgttaaaaaagctctccatataatcaaactgtacaatgaggtgggcgtgcctaaagaaagagtattgatcaagatagcttctacatgggagggcatccaagctgctaaagagttggaagcaaaacatggcattcattgtaacatgaccttgttgttttccttcactcaagctgtagcatgtgcagaggcaaaagttactttgatttccccatttgtgggaaggatcatggatttctacaaggagcggtcaggtgaggactacaccggagagactgatcccggtgttctctctgtgagaaagatttacagctactataagaggcacggctacaataccgaggtgatggcggcttcctttagaaaccttgacgagctgaaggccttggcaggtattgatgacatgactctcccactgaatattttgcaacagttacacgagtcaacagatcctattgaaaacaaattgaacgcagagaccgctaaaaaggaaggtgtcgacaaaatatcttttatcaacgatgaacctcacttcagatacgtctttaacgaagatcaaatggccacagaaaaagtatctgatggtattagaaaattttctgtagacatcgaagcgctgtacaagttagtcgaggaaaaaatgtga

SEQ ID NO: 967 - DNA, 1158 bp, Saccharomyces pastorianus
atgtttcgagtctctgaaaatcgcctaaacttactgctgagaggccgcgcaacacatgcaagcgtgttgagaagacttttgagtacgcgtattaaggaagaaaagactaccttagaggatgctggcattatctctaatagaacaattcacgaaaagcaaaatcaccatattgaagggattactaaggacaatgatctggaattactagaaaaaggtatcaggaaatctgacgagatgacttccaatttcacaaattatatgtacagatttcacagactccctcccaattacggaagtaatcaactcatcaccatcgataaggaactgcagagagaactgcatggagttatggcgtctttcaaggctccttgcaggtttgcatttggttacggctccggagtttttgaacaagcagggtattctaaaacagatagcaaaccccaaatcgatattatcttaggtgtcactcatccatcacattttcactctattaatatgagacaaaatccccaccactattccagtttgaaatacttcggttccgaattcgtttccaaatttcaagaaattggtgcaggggtgtacttcaacccatttgctaatataaatggacacgacgtaaaatatggagtagtttctatggaaacgcttttaaaagacgtagctacttggaatacattctatatagcggggcgactacaaaaaccggttaaaatattaaagaatgatctacgagtgcaatactggaaccagctaaacctgaaagctgccgctacattggctaagcattacaccctagagaaaaacaacaacaagtttgacgaattccaattttataaagagataaccgctttgagttacgcaggtgatattagatacaaactaggtggagaaaatcccgacaaagttaacaacattgttactaaaaactttgaaaggttccaaatatactataaacctatttacaaagaggtggtcctaaacgattcattttatcttccaaagggattcacattaaaaaacactcaaagactcttactcagccgcataagtaaatcgagtgcactgcaaaccattaaaggtgttttcactgcgggggtcacaaaatcgattaagtatgcttgggctaagaagatgaaatcaatgaaaagaagttag

SEQ ID NO: 968 - DNA, 3075 bp, Saccharomyces pastorianus
atggtggcacggaaatcaaagagggaccaacaaaagcagcttgctaaaccagaggaatccgatgttccaaaggaaaatgaagaagatgaagaacatttgtatggtaatattgacgactacaagcatctaatccaggatgaggaatattgtgatgaagatgtacctcgcgatttgcaatttagcgaagatgaggacgactctgagcgggatgattctttgctggcagaattttcagactatggggaaatatctgaagatgatgaagaagatttcatgaatgcaattagggaagcaagtaacttcaaagtgaaaaagaaaaagaaaaacgataaaagtaaatcatatggccgccaaaggaaagaaagagtgctagatccagaagtagcgcaattgctctctgaggctaatgaagcatttgttagaaatgatttacaagttgcggaaagattatttaatgaagtcatcaaaaaagatgcgcgtaattttgctgcttatgaaactctgggtgatatctaccaattgcaaggaagacttaacgattgttgtaactcgtggtttttggcagcccatctaaatgcgtccgattgggaattttggaaaatagtggctatcttatctgctgatttagatcacgttagacaagccatatactgtttgtctagggttataagcttgaaccctatggaatgggaatctacgtatcgccgggcaatgttgtacaagaaaacgggacaattggcaagagctctggatggatttcaaaaactatatatctacaatccttacaatgcgaacatattaagggagctggctattctttacgttgactatgacagaatcgatgacgccgttgaactttacatgaaagtgtttaacgcaaatgtcgaaagaagagaagccattttggctgctgcagaaaatgctttagattcttcagatgaagaaagcggggcagaagaagaagccgaaaaggaacctcacgatcaagacgaggatatgcagatgtttcctgagattaactggaaaaaaataaattcaaaatataaatgtataccattcgattggtcgtctttgaatattctcgccgaactctttttgaaactggcagtcggtgaggttgatggtattaaagctatcaaaaaatgtgcacgttggattcaacgtcgtgaaggtgaggtgttttgggacggcgttccggatgattcagaatttgacaatagaaggtttaaaaatagtactttcgactctctacctgccattgaaaaggaaaaatcgtatactattccaatcgacatcagagttaggttagggttgttgaggttagacacagataaccttgttgaagccctcaatcactttcaatgtctttacgatgaaagttttaccgacgttgcagatttatattttgaagcagcgactgctttgacaaaggccgaaaagtataaagaagccattgatttctttacgccgttgttggctattgaggaatggcgtacaactgacgtttttaagcccctagcaaggtgttacaaagaaaccgaaacttatggaacagctaaggaatattacgaattggccatcaaatctgaaccaggcgatttggatattcgtgtgtcactcgcagaagtttattatcacctaaacgatccagaaacattcaaaaatatgttagttgacgttgtggaaatgagaaaacatcaagttgatgaatcactcaataggatatctactgagaggggctctggtgatagtttgaacgatgtctccagtaaaccattattagaggatagcaaatttcgaacctttagaaagaaaaagcgcacaccctatgacgcagagagagagagaatagaaagggaaagaagaataactgcaaaagtcgtagagaaatatcagaatatcaagaaattcaagtttgatccagcacttggtgaagccaaacaagccactatatggattaatacggtttcagaactggttgatattttttcaagtgttaaaaacttcttcatgaaaagtcgttccaggaaattcgttggtatcctacggagaactaaaaaatttaataccgagcttgattttcaaatagaaagactatccaaactagctgaaggagatagcgtgtttgaaggaccgttaatggaagagagagtgactctaacatctgcaacagaattaagaggactgtcatatgagcaatggtttgagctatttatggaactttcccttataatagcgaaatatcaaagcgttgaggatggtttaagtgtggtagaaacggcccaggaagtgaacgtcttttttcaggatcctgaaagagtcaaaatgatgaaattcgtgaaactggctattgtactgcaaatggacgatgaagaagaattggcggaaaacttaagaggtcttctgaatcaatttcaatttaacaggaaagttttgcaggtatttatgtattccttatgccgcgggccttcctctctgaatattctaagttctaccattcaacaaaaattcttcttaagacaactgaaagccttcgatagttgcagatatagcacagaagttaatggtcaagcctcaataacgaacaaagtcgtggacaaccccgacaaaaagtcatcgccatacctgtactatatctatgctgttttgctttactctagtagaggctttctttcagcattacagtacttaacgaggctagaggaggatattccagacgatccaatggttaaccttttaatggggctatcgcatattcatcgtgccatgcaaaggttaacggctcaaagacattttcaaatacttcacggattgcgatatttgtatcgctattatacaataagaaaaagtctatacacagatctggaaaaacaagaagcagattacaatttagggcgctcttttcatttgattggtctggtatcgattgcagttgaatattataacaaggttttagagaactatgatgatgaaaagttgaaaaaacacgccgcatacaactgtattataatttatcagcaaagcgggaatgtgcaattagctgataaactcatggaagagtatctaagtgtttaa

SEQ ID NO: 969 - DNA, 1092 bp, Saccharomyces pastorianus
atgttttccgggttcagttcttttggcggaggaaacggctttgttaatatacctcaaacgtttgaggaattctttagatgctatcctatagccatgatgaatgatagaatacggaaagatgacgcaaacttcggcggcaagatcttcctgccaccaagcgctctgagcaaactgtctatgttgaacattagatatcccatgcttttcaaactgactgctaatgaaaacggaaatgtgacacatggtggtgttttagaatttattgctgaagaagggagggtatacttgccccaatggatgatggaaacattgggcatacagccgggatccctattacagatttcatcagcggatgtgcctctgggtcaattcgtgaaattagaacctcaatcggtagactttttagacatttctgaccccaaggcagttctagaaaacgtgttgaggaacttttccacattaactgtggatgatgtgatcgagatcagttataacggaaaaacattcaaaattaagattttagaggtgaaacctgaatcgtcatcaaaaagtatatgtgtcattgagaccgacttggtaacggattttgcgccacccgtaggatatgtggaacctgattataaagcactgaaggcccaacaagacaaagaaaaaaagagccctttcagtaagggtcaagtcttagatccatcggtgcttgggcagggatcaatgtccacaagaattgattatgcaggcattacaaacagtattaataatgatcgatctaaattcgttggtaaaggacaaaatatatctgggaaggctcccaagaggaatccggaacccgggcaagatttaaagaatataaagataacgtttgatggccaacctgccaaactagatttgcctgaaggccaactattttttggatttccaatggttctaccgaaggacgatgaaggaagtgatagtgaagctaaatctaacgaacaaaatttccatggtcaagggatctcgttacgaaaaagcaacaaaagaaaaccgaagaaagatcatgactcgtctaaatcaaaagcaccaaagagtcctgaagtcatcgagatcgactag

SEQ ID NO: 970 - DNA, 843 bp, Saccharomyces pastorianus
atgttttcaaggagcgttttcagaagcacgataccaattaagggaactctccctcgattgtactcgaactctataaaattggctaacctgggagaggttactgattatttggtaggtgacggtgtacctaacttactacaaaggatgctcaaagaatctgtactcgctgataatattactttgagattatttcccacttcgcatccctatatcccagtgttgcacggaagatccaaatataaggcttctttgaatgccatcaggatgatagtacgaaagttcgtactcgacgaagagtgccgcttgcatataagtttagtcaagactttaaattcgacatcgaaaggcggagaattcaaagaaaattctcagaattacaacactcttacgcccaatgacaaactggttatcaagtggcaaagttgtataccggaagatcgttgcaaaatttctaagccagagattaacgacgagttgaaagaaaagaaagacagggtcgaaggggataattcgttttcaattagatcggtaccagtgatagattacattttacatcctacgataaataatctgaatcaaagggttgttacagaatacattgatgacgcagccgaaaagtccatacaaaattttaacaaaaacggagatattaaagaaggtaagattggaaaagatgacactataaaaaagaataaagtgagaaggttatcacggttaataagaggcacttttatatttgaattcaacgaagaaaactctaaaattttagtccataccattgaagacgtcgagttgattcattacggaaaaaaaattgccactggcggcgcatttgcatgttga

SEQ ID NO: 971 - DNA, 1731 bp, Saccharomyces pastorianus
atggccgaaggaagaacttttctttctcagttgaatgtcttcaacaaggaaaactaccagtttccctcttcttccacaaccaaaaagaaatcgagcgccacaacggtagatgttgacaacgatgcctccgattttgaagcaggccaacagttcgctacagagttggaccaaggtgaaaagcaactaggtgttctgtcatgtatcgggcttatctgcaacagaatgcttggtacaggtgttttcgccgtgtcctcgacaatttacacattatgtgggtctgtgggacttgctttgatcatgtgggccgtcggggccattattgccatttctggtttatacgtctacatggagttcggtacagctataccgaagaatggtggtgaaaagaattacctggaagccatcttcagaaaacccaaatttttcattacctgtatgtacgctgcctacatttttttcctaggttgggctgctggtaactccataaatacagctgtcatgtttttaactgcggctgatgcggaaatcacgaaatggaaccaaagaggtattggtgtggctgtcgttttctttgcgtttttgataaattctttgaacgttaaaattggtttatatctacaaaacattttgggtgttttcaaagttggtattgtccttttcatctccattaccggttgggttgcccttggtggtgggctaaaagacggttaccaatctcacaatttccgtaacgcctttgaaggtaccgaaactgccactgcttacggtattgttaacgccttgtatagtgttatttggtcatttgttggttactcgaatgttaattacgcacttggtgaagttaagaaccctgtgagaactttgaagatcgcaggtcctacatctatggtttttttggcaatcgtttacatttttgtcaatattgcctactttgctgtggtgccaaaagaaaagctaatatcttccaagttagtcttagcagctgatttctttgatatcgtttttggtggccaagccaaaagagctgctgccgcattggtcgggttgagcgccttgggtaatgttctttctgttattttttctcaaggtagaatcattcaacagttgggtcgtgaaggtatcctgccgttttccaacttttttgcctcttccaaaccattcaactccccaatggttggtttgtttcaacattttgttgtctgtacaatcaccattatagctccgcctccaggtgatgcgtatctactagttcaaaatttgatttcttacccaatgaacattatcaatttcgccatcagtgctggtttactatggatatattggcaacgtagacaaggtaagattgaatggaacccaccaatcaaggccggcgtttttgtcacagggtttttcgcattatctaatctatatctgatcattgcaccatatgttcctccatcaaacggcgagtccgtttattcaagcatgccatactggatccactgtgtgatcgcatggggtatcttcctctttggtggtgtttactacgttgtatgggcacaattattaccaaaatggggccactacaaattggtcacgaaggatgtgcttggtgaagacggattttggagagtcaagattgccaaagttcatgatactaatgacagcgatgatatggatacacaagaagacggtattgtcgaaactgatataatcgaacattataaaagtgaagaagaaaaacaactatag

SEQ ID NO: 972 - DNA, 993 bp, Saccharomyces pastorianus
atgtgtgcgaaaaagctcaagtatgctgccggagatgactttgtacgttacgcaacgcctaaagaggccatggaagaaacccgacgtgaatttgacaaagagagacaaaggcaacaacaaatgaaagccgctccaccaccaccaccaccaccgtctaacactagaatccattcggctccaattcctctccaaaatcagtacctcaaaaaccgggttgagagcggacaccaatcttacggctctccccaaaattactctcttagacatacgaaagtacctattgatcctagatataataacacggtacagaaaccggccagtaggcctatccccccacaaccgaagcattataacagtgcagcctcatcctctctacgcatagcctcccctgcatcagtgcataacccacaagtaccggcctcaactgctccttttgatagtaaagaagatctgagagatatgcaggtagccgttcagctgtttcacaaccatgacattaagggcaaaaatcgactgacggcagaagagttacaaaacttattacaaaacgatgacaattctcatttttgtatatcatcagtggatgccctaataaatctatttggtgcttcaaggtttggcactgtgaaccaggcggaattcatctctttatacaaacgagtgaagagttggagaaaaatctatgtggataacgacatcaatggatcactcaccatttctgtaagtgaatttcataattcacttcaagaattgggttatctgataccttttgaggtccgtgagaaaacatttgatccgtatgctgagtttataaatagaagcgggacaggcaaagaactaaaattcgacaagtttgtggaggcattagtttggctaatgagattaacaaaattatttaggaagttcgatactaatcaagaaggtattgcaaccatacaatacaaagattttatcgattctacattgtatttgggccgtttcttaccacactga

SEQ ID NO: 973 - DNA, 1536 bp, Saccharomyces pastorianus
atgaaatcaaaggagggtaggctgccaacagattgtcccgttgagttttcccaaataatcactggattttctgaggaggccaaagtacataaacaaagttctcaaggaaaacacgtggatcaatatcaaacaaaaagccctaaatcaagaagtattagacagagatcatcatcttttgtaaacggtaagtgcaaaagcaaagaaactccattgtcagaaaattatggtgtagacgaaatgaattcaaaattagacggccgaaatattgggattagaaatttgccacaccagcgcgagttgttgaatgccaagaatggaatccactttacagtgatggtcgcaggtcaaagcgggttgggcaaaacaacattcattaattccctgttcgctacctccttgattaacgacaatatcaaagaaaataggcctatcgttcgttataaaaatattatcgaaggtgacggaacacaccttagatttggggtcattgatactcctggcttcgggaatgatatggacaatgcgttcacatggagaacaatggtcaactatattgacgaggaaataaggtcctatatttttcaagaggaacagccagataggacaaaaatgatagacgatagagttcattgttgcctgtattttctgaagccttccaataaaggcattgatgcattggatgttttaacaatgaaagaattagcaagaagggttaatctaattccaattatcgcaaaagcagacttattgactaaacatgaactaagtattttcaaaatggaaattagagaaattataagagtacagaatatttccgtttgttgtttttttgataacaatattctagatgcaacaaaagatattttccagaagtttccatttagtataattgcgtctaaagagtatgtgttaaataaaaagggcgagaaagttaaagggagagaatataagtgggggactgttgaaatcgagaacgaaaagcattgtgattttaaaattctacaaaagattcttcttgactggcatctgatcgactttgtagaaagtactgaagattattacgaaaagtgtagatctgaaatgttaagaacaaggttattaaaagccagagactgtctaaccaccaacacggttgaaataacggatgaacagagaaagtttttgcaagaggagatgaactttgaagacattgaagagaacaaattgaaaaattataaatgctatgaaataatcaataaagtgattatggataaagtggctacagaatgggaccctgaatttataaccagacagctagaggccaagaaaaggttcaacgatatttctaaccaagagattctcaagattaaggaatggaaaaaaagcctatttatgaaacaggaaaacttcaatcaagaaatcgaagaactgaatcataatttggagaacttacaattggaatgtcaagatttagaatacaggttactaatggataagagttccaaccatcattcaacggatagtgctactttagtgaacgttcacatcaagagatga

SEQ ID NO: 974 - DNA, 930 bp, Saccharomyces pastorianus
atgtctgccgttttcaataacgctactctttcaggtctggtccaagctggcaccttttcccagactttacaaaatgtcgcgcactaccaacctcatttaaatttcatggaaaagtactgggctgcctggtacacttacatgaacaacgatgtcttggccaccggtctaatgttcttcttattgcatgaattcatgtactttttcagatgtttgccatggttcataatcgaccaaattccatactttagaagatggaagttacaaccaaccaagattccaagtgctaaagaacaactatactgtttgaagtctgttcttctatctcatttcttggtcgaagctattcctatctggacattccacccaatgtgtgaaaaattaggtattaccgtcgaagtcccattcccatctattaaaaaaatggctttagaaatcggtctattcttcgtcttagaagacacatggcattactgggctcaccgtctgttccattacggtgtcttctacaagtacattcacaagcaacatcacagatatgccgctccattcggtctatccgctgaatacgctcaccctgctgaaactctatctctaggtttcggtaccgtcggtatgccaattctatacgtcatgtacaccggtcacttacatttgttcactctatgtgtatggatcactatgagattattccaagctgttgactctcattccggttacgatttcccatggtctttgaacaaggtcatgccattctgggccggtgccgaacaccacgatttgcatcaccactacttcatcggtaactacgcctcttctttcagatggtgggattactgcctagacaccgagtctggtccagaagcaaaggcttccagagaagaaagaatgaagaagagagctgaaactaacgctcaaaagaaaactaactaa

SEQ ID NO: 975 - DNA, 951 bp, Saccharomyces pastorianus
atgtttaagaggttaatcaatcgtcaaaatgctgttgcattttccttaccaagcccagctggcctacggtatggtaggtttaacgcgagtacgaagagaaatttctcactttttcaaagtgtagcagacacatttctaactctacatgaggcgtcgcagataccttggatagtgattgttcccttgagtacaatcacactcaggaccctggtgacgctgccattcagtgtgtggcagcggaaaagaatattgaaacagcaagaactgaggaaactggttcaaccaataacgcctattgtcaaacttcgattagcagctatcactaacaaaaagtccaagaaccctgtcaagattaacgcgaatggcaccctcattccactaccagtgcaggatccaggcgtcttgaccccagatcaaatcactcttctagcagtgaaagagacaagaaataggcaaaggaaactattcaaaaagtataatgtctcattgtggaaaaacgcgctattgcctattgtccaaattccgctttgggtgacgctctccatgggtatcaggacgcttacagaggcccagctaatagaaactttctatcctgcttggattgctgcactggggttcggatctttcgatctaagctcacctttaacagcaatgcccctattagcgcccattctggttggaactttggccgtgctgaacgtggaatataacggccgactaatgtttagttccaacatgtcatcgcaaggtataaagactgtttcaagaaattcgtccagagtccaagaggcaatggccagcatactgaatgtgtcgaggctcggctgcgtcgtcatgctagcaatgtcctcgcaggctccattccttctctcgctctactggatctcctcacagctgtactctttggtgcagaacattgtccttaactggatatacccctaccaaagatga

SEQ ID NO: 976 - DNA, 888 bp, Saccharomyces pastorianus
atgtcatctctaaataacactggagggaaacttattgcgcaaaaagctaaggaagatgacgatatcgaagacatattcgcttcaacctatgtttaccagtctgctgtgattaaaaatccctcgattgatatctcgtctcccaaaggaaaaaagggcaaaagtgatctgtatgaagaagagacccattcaatgggcaagaatggcaaatatatctacaagtcggttgacaggcatttggacttcttgagaccaggcttgagatttggtggctctcaatcgtctaaatacacatattatactgtggaggtaaaaattgatactgttaatttgccactttataaaacctcgcattctttggacccacacgtcacaggtacgtttaccatacgaaatctgactccagtactggataaagtggtcactcttttcgaaggctatgtgatcacgtatgaccaatacccattatgttcgacgcactggcccgcagaggaaccgtttgatccgtacatggctcaaagagaaagtgattgttctcactggaaaaggtttggtcacttcagtactggaaaatggtcaccgacgcaaagaaattttggtcagtacgattacgacaccacagaatttatgaaccaacgttatatttatctcaaatggaaagagagatttctactagataacgaagatcaagataacctgacgttaaatgatatctatcacctggacggtgcctcatttgaagggttttactacgtctgcttggaccaagaaacaggttcaatggagggttattactatcatcctgcttgtgaattatttcagaaactcgagctggtgcctactaattgtgatgatctgaatacccattctagtggatttgaaattgcctag

SEQ ID NO: 977 - DNA, 3450 bp, Saccharomyces pastorianus
atgaatagtaatgaactgaatctaaggcatgaatatttttatgaaattttcggtaaaaagagaaaatcggacacttttgttcctactcagccatatactctcaaggttcagccagccgtcggtgacatttccatagagaacgatgaagacgtagtcgaaaatgagactacattcaaagacatcgcattaacacatgacgccagtgcacaatataatactgcgccaaaggctttccttcagcattcgaagacatctcctgctctacacatttcaacaaattttaattcaagttcccaacctttcttgacagacgtgttgtactccaaaagtaaaatagaccaaccaatacatgcatcaaatggccggaacgctgctgccaaagccttgtcaccttctcaaaaaagatcgaatcctatattgccccccaacacaaaaaaatattcgtctaactcaatattatcgccatccaagggcaatagtagtcatgccgtggatccgaatccgtattctactcctccaactcccaaaagtgcagacctcataacggcttcccatgattcatttgataaaaagcccaatacttcaagcacttcttctttgtttgctttggattcactgaaaaatcaaaataggcgctcatcaaactcttccaatcattcgaatcagtatcaacgctacggcaaccatcatcaccgccatcattcaagatctaaatcaagccccgtctccctatcagagatttctctgatcaaaggaacacccctggtttactctgcacttttatcattgatcgctataaaattcaaacagactattcaattaagtactcataagaaaatgggactactttatagagattcatttacagggaaacaagcgattgatacattgtgcttgatcataggcactttaaatcgtaatttgggtttactaatcggtaaatcgttggaagctcaaaagttgttccatgatgtcctttatgaccacaatataagggattccgtattagaagtttatgagttttcttcaagttcggttttcatagctcatcagttacatagttttacgtcagttgccagtactctttcttcatcaacttcttcgattaacttagttggtactaaaactgaaattaatggtgttttcgttccactttcgcattgttattcgcccacatgttctatggaaaaactttgctactctatctcctgtcctaatcgtttgcaacaacaagcaaagctacatttgaaattaggtggtggccttaagagaaacatttcgttggcactcgataaggacgacgatgaaagaatctcttggacaagttccgtgccaaagagtatatgggagtcattactcaaaacacaaataaaaagacaagaagcaatatacgagttatttaccacagaaaagaaatttgttaaatccttggaaatcatacgagatacattcatgaaaaaattattagaaacaaatatcattccatcagaagtaagagtaaattttgtgaagcacgtctttgcacatgtcaatgaaatttattttgtaaatagagaatttttaaaagctttagcacagagacaagcattgagttcaatttgtcctggaattgctgatatatttttacagtatcttccgtttttcgatccgtttctctcttacatcgcatcaagaccatacgccaaatatctaattgaaacacagagatcagttaatccaaactttgctcgttttgatgacgacgtgtccaattcctctttaaggcatggaatagattcgttcttgtctcaaggtgtttcaaggcctggtagatactctttgttggttagagagataattcattcttcagatcctgtaaccaataaagacgatttgcaaatgctaatgaaagtgcaggatttattgaaagatctaatgaaaagaatcgatagagcaagtggtgcggcacaagatcgttctgatgttaaattattgaaacagaaaattctgttcaaaaacgagtatgtcaatctaggtctaaataatgaaagaagaaagattaagcatgagggcctattgtctaggaaagacgtaaacaaggtggacgcatcgtttgcaggagatatccaattttatctgctcgacaatatgttattgtttttgaaatcaaaggcagtaaacaaatggcaccagcatactgtattccaaagacctattccattgcctctgttgttcatttgtcccgctgaggatatgccatccataaaaagacacgttactgaaaacccaaattgctcagcaggcatactttctccccaatatcaaacaagcaacgtcaaaaatgccatcacgtttgcctattatggtactaaacagcaatatcaagtagctctgtatgccccacagctggctgggttacagacattgatagagaaggtcaaacaagaacagagcagatatcttgatgaaactaagcagatcacttttaagcagttgataggccaatttttccattcttatacaaataataatcacattaatgatgttttactattttcaggaggtagattattattagtcgcaacaaatctcgggctttatgtcatgaattataactcttcgatcaaccagaaaccaattcatcttctgcataaaatctcgatatcgcagatatctgtgttggaagagtacaaaatcattgttttactaattgataagaagttgtacggttgtcctttgaatataattgaagatccacaaaatggtgattttattttcaaaaagaaatccaaggtcttgtcaaaatatgtcatgatgttcaaagatggtatctgtaatggtaagagggtcattttggcagctcataactttttgcatacgataaagttaataaatgtaggtcccttgatatctgactttggcaatagtaattttaagaaaaacctgaaggcaagcttactggagtttagtgtcgattcagagcctttgtcattttcatttctggaggacaaaatatgcatcggttgtaaaaagaacataaaaacactaaacgtgcctaacgtttttgaaaagaattctttcaaaataagagaaatttttaatccatacaatgacaaagtgttattggggttttgtaaggaaacatttaaagcgatttccatattttcagtgaaaaacctatattttatttgtttaccagaacttggattctttgtgaataaacaaggaaggagggaagaagcaaaagaaattatccattgggagggggaagcacagcagttcgcatattctcatccttacgttttggcagttaatgaaaactttattgaaattagggaaatagaaaacggcgagcttgtacgttgtgtactcggcaataaggttcgcatgtttagggcacactctcaaagtattttatatagttatgaagattctcatggatttgaaatcgttgaatcgctaaatttttga

SEQ ID NO: 978 - DNA, 1173 bp, Saccharomyces pastorianus
atgagcaatccggctggagaatcgaagaatagtgaagggaagaagaaatatagaggaaataggtatcacaacaataagaatagaggtaaaaacaagaatgaggactctaaaaagaatgaggattctaaaaagaatgagggcaaggtaaataacggtagtgttagcagcggcagtaaaaacaagagaaacaacaaaaagaggaacagagagcattataactacaaaaggaaacctaaatctggtaaatcgactgaaaatgaaggatacaaacttgtcgtcagattattacctccgaatctgacggcagacgacttctttgccattataggaaacaccaatagcgacagtgatgataaagaaggtattcaggataaatttaagtatagtgattggtgtttttttgaaggtcattattctagtaaagtattcaagaactcaacgtattcaaggtgcaattttctgtttgatggcttacaagatttggaaaagttcgcagatttcataaaaacttgtaaattcattgataacaaggacaatattacaaccccagacttgaaactatcgccatacgtgaaaaagttcacacaaacgtcgaagaaggactcggcacaagaggggaccattgaagaagatgaaatcttcaaaacatttatgaattctatgaagcagctcaacgaaaatgatgaatactcatttcaggactttagtgtcttgaagtccttggacaaagaattctcaaggagtctagagttggagaacaagatagcagagaggactgaaagggtattaacagaactagttggtgctggtgacaaggtcaaaagtaagaacaagaagaaaaaaaacaaaaatggtaaaaaaaaatatcaagacgaggaatcaagcaataaaattcccaagaagaagcggaatagaaacaaaaagaagcacgatgaccgtgagaaaagcagtgccaccaagactaagaatagcaacgtggtgataattgaggaggcgggtaaagaagtgttaaaacaaaggaagaagaagatgcttttgcaagagaagttaaagcaatctaattcttctcagcctcaatccccatccactcaagcgcagtcgtcgttcaaattcaaagaaaatacatcgatatcacgagtcaaaattctacatcgagatgataccgagaagtga

SEQ ID NO: 979 - DNA, 450 bp, Saccharomyces pastorianus
atgaagctggtcaactttttgaaaaaactgcgtaatgagcaagttaccatcgagttaaagaacggtaccacagtttggggaacactacaatcagtatcaccacaaatgaatgccatcctaacagacgtaaagttaacgctgccacaacctcggctaaataaattgaacagcaatgggattgcaatgtctagtttgtatttgagtgggggtcaacaagccacgacaggtacgacgggtgacaatatagcaagtctgcaatacatcaatattagaggtaataccataagacagataatcctgccggactccttgaacctggattcgctgctggttgaccaaatgcaactaaacgccttaagaagatcgggccaagttgccagtgaccctaataaaaagagaagacgtgactttagtgctccagtgaataaaagaccaagaagaggtctatga

SEQ ID NO: 980 - DNA, 729 bp, Saccharomyces pastorianus
atggccaccaaagaatttcaagtggagtcccacatctctttgaagcagttgaataaccagtcggtatctttgattattcctcggctgacaagagataagatccacaattcaatgtattacaaagtcaatctgagtaacgagtctttgaggggcaatacaatggtagagctactgaaagtcattatcggcaaatttggcgcattaaaggatcaggatggtcatatgaacatgtctgttctaggtggtgtagaatttaagtgcatcctgatgaaactggttgaaattagacccactttgcaacaattgaccttcttattaaacgtgaacgactcgaacacttttagttctaagtacattaccgctttgattctggtttatgcgcggttgcaatactattatttaaatgataaaaataacaatgatactaatgccgatgatttggtaaaattatttaaagtacaattatacaaatattcacagcagttttccaaactaaagagtttcccactacaagtggattgctttgctcattctaataacgaagaactctgtataatacgcgttgatgaattagtcgattggttggtcactcaagaccacatctggggtattcctttaggtaagtgtcagtggagtaaaatatacgactcagaagaagaaagtagctcaagtggaagtgattatgaagatgacagtgaaagtggcagtgacagcggtagcgaatcatag

SEQ ID NO: 981 - DNA, 474 bp, Saccharomyces pastorianus
atgtcgtacaaacaatactttgatggtttacctttaaaattaaagtcatttttccaaagatatccgccttcaatcaaatattcttcggtatccacatcaacaaaggccgttgatgccaaccccttcttgccaaataaacatccagtcacacaacggttacatgatcctaaatactcattaagaagaatgagcgatgtatataagctggcattgcgttatggagtgcaagactttttaccacctatcgataatactaagaaacttttcttcgaagacaaatacgataagaaaactttaatgaagggtgttctcttacctaaaggtcataaacatgaactcaaattgaatgagaagttgatgaagcgtgaagaggctttgaagaatgtggacaatctgattgcatccaagaagggttcgaaatacgcaaagaaattagaaaaaatgaaaacaacccaaagtataggctggttctaa

SEQ ID NO: 982 - DNA, 1008 bp, Saccharomyces pastorianus
atgtcaacccaatctggtattatcgcagaccaaggtttgctggattccttgaacgagaatctttccacggacggtgttgtcattgtcatagccaagatttcccctgattccacctcggtacatcaattagacgtaacccataatttggaccaattggttcatttggcttcgcaaaacaaggaacccctgtacatcttctataagccccagaaggttgccaaatactttttcgtgtcattcatccccgatggttctccggtgagatcaaggatgctttacgcctcgactaagaacacgctggcaaggcagatcggctcgaactctctatccacggagcagccgttgatcacggacgtacaagaactggcggacttgaaagagcttgatggtgatcgtactgttgctcaaaataaacctttgacggaagatgaaaaaatgcaaattgaaataaacaaacagcagacactcttgaggaaatccgtcaacaataactcggtcaaacttgtctcccaggacagcccttcacctttgtcactgactttcaaggtcgattccgagaggcctatagacgaaattttcagtaatgacggtaaaaacctgatcattttccaaatcgagcctacaaatgaaaccatccagatcgtgcaatcagagacgtgcccctctgtggatgcgttacaaatcgacttgcctgggcccagctatacgatatttaagcatgacagtttgaacttctttatctattcttgcccatcgggcagcaaagtcaaagatagaatgatgtatgcttccaacaagaacgggttcatcaactacttgaaaaacgaccaaaaaatctcgttcagcaaaatattggaaattggtgacttcgtcgaactagacaaatcgtcattgtccgccaaaagtgacgaagatgaccttgaccgtggttccactccagaccaatcgaacaacggcagcttgagattcgacaaaccaaggggcccaatgaggaaaagaagaacatag

SEQ ID NO: 983 - DNA, 552 bp, Saccharomyces pastorianus
atgtcccaatcaaaccctgtcttacgtggctttgccatcacaacagctatagctgctctaacagccaccggttatgctgtttactttgactaccaaagaagaaacagctcacaattcaggaaagtcttgaggcaaagagccaaagaacaggccaagatggaagaagaggccaagagccatgccaaggaggtcaaactgcaaaaagtcacggaattcttatctgtagaattggctaaggatcctatccctagtgatccctctgaaagagaggccacattcactaccaacgtggaaaatggtgaaagactgtccatgcaacaaggtaaagaactagaagccgcttctaaattttataaagcattgactgtatatcctcaacctgcggatttgttaggtatctatcaaagatccatccctgaagccatttacgaatacattatcttaatgattgccatcttgcctcctgctaacgtggcttctttcgttaaaggtgttgttggaagtaaagccgaatcagatgctgttgctgaagccaacgacattgacgattaa

SEQ ID NO: 984 - DNA, 1953 bp, Saccharomyces pastorianus
atgagcgaatctgaagccaaagcaggagtagctacaccaccaggtaaatccgaacaagctgctccagtagcagcagcaaccagcggtgaaaagaaactatctaataaggaattgaaagaaatgaaaaagcaggaaaaggctgcaaagagagcggcactgaaacaggctaatggtatgtccatcgagcagcaacaacaacaagcacaaatcaaaaaagagaaaaagcagttgcaacgtgaacaacaacagaagagagaacaaaagcaaaagaatgctaacaagaaaaagcaaagcgggcaaaacgtgaagaaaagtaccctttttggtcatttagaaaccactgaagaaagaagagccaccatcttggcggtgacaagtgcagtatcatctccaaggacttctaggatcaccgctgccgggttgatggtccccgtagtggccagcgcattatcaggatcaaacgtattgacagcttcgtctttgatgcctacgggctcaaatgctgcctctacaccagcaactacggcccccacatcagcgacaacgacaatttccgcttcttccacagccctctctgctgcttctacttcaacggcaacaatcactacaactgcggtacaacaagaaattgcctcatcaaacgcatctgatgttgccaagacattggcatccatttcattagaagcaggtgagtttaatgtcctccctggtatatcttcagtgattccagcggcattggaacagtcgtttgatagttccagtttggtatcatccgttaaggaactgttacttaacaaagatctcattcatccatcaattttattattgacttcccatttggcacactataaaatagtgggatccatcccacgttgcatagctatgctcgaagttttccaaattgttatcaaagactaccaaacaccaaagggaaccaccttgtcacgtaatttaacaagttatttgtcgcatcagatcgatcttttgaagaaagctagaccattaagtgtcactatgggtaatgctataagatggttgaaacaagaaatttcgttgatcgatccatctacacccgataaagcagctaagaaagatctttgcgaaaagattggacaattcgccaaggagaaaattgaattggctgatcaactaatcatagacaacgcctcgacacaaattgaagactctactactatcgtcacgtatggctcatcaaaagtcttgactgagttgctacttcataactctattggcttaaagaaaaacattaaaattattgttgttgactcgagaccattattcgagggccgaaaaatggcagagacattaagaaatgcaggcgtcaacgttatgtatgctctcattacaagtttagacacggttttcaacatggacgtggattatgtattcttgggagcacattctattttatccaatggatttttatactcaagagcgggtacagcaatgttggcaatgagtgctaagagaagaaatatacctgtattggtgtgctgtgaaagtttaaagttttcacaaagagtgcaattagatagtgtaacatttaacgaattggcggatccgaatgatttgattaatatagattatgaaaatccagtggaaagacgtggtaataaaggtgcgttactaaaccagttcgtgaaggagaggaaacttgaaaagaaaaaactagaaatggaaaataaaccaaagggtaataagattggcggcaagaaggggtctgaagaagaaaataaagatgttaatgatgagggagataacggtgaaaaaaacatcttggatggatggcaagaactaccttcattaaatattgtcaacatattgtatgatttgacgccacccgaatacatcaaaaaggtcatcactgaattcggtgctttgccaccttcatctgtgcctgttatcctaagagaatacaaaggttccgcatag

SEQ ID NO: 985 - DNA, 1011 bp, Saccharomyces pastorianus
atgcacagaacttactcgttaagaaacttcagagcccctacggcctctcaattgcaaaacccacctccaccaccatctaccaccaagggtagattcttcgggaagggtggtctagcctacagcttcagaagaagcgctgccggggcctttggcccggaattatccaggaagctatcccagttggtcaagattgaaaagaacgttttgagatccatggagctgactgccaatgaaagacgtgacgccgctaagcaattgtccatctgggggttggaaaacgacgatgacgtttccgacatcaccgacaagttgggtgttctgatctacgaagtcagtgaattggacgaccaattcatcgaccgttacgaccaatacagactaaccttgaagtctgtcagagatatcgaaggctctgtacaaccatctagagaccgtaaggataagatcaccgacaaaatcgcctatttgaagtacaaggatcctcaatcccctaagattgaagttttggaacaagaattggtccgtgccgaagccgaatccttagtcgctgaagcccaattatctaacatcacaagatccaagttgagagccgctttcaactaccagtttgattccatcatcgaacactccgaaaaaatcgctttgatcgctggttacggtaaagctttattggaactattggacgattctccagtcactccaggtgaaaccagacctgcctacgacggctacgaagcatcaaagcaaattatcatcgatgctgaaagtgcattaaacgaatggactctagattccgcccaagtcaagcccactctaagtttcaagcaggattatgaagacttcgaacctgaggaagatgaagaagaggaagatggccaaggcagatggtccgaagacgaacaagaagacggacagatcgaagagcctgaacaagaagacgacgacgtagttgaagaacacgaacatgccgatcatcaacacgaatctcttcccgagcacaccactgcttaa

SEQ ID NO: 986 - DNA, 1692 bp, Saccharomyces pastorianus
atgtcagagattactctaggtagataccttttcgaaagattgaagcaagtcaatgttaataccattttcgggctaccaggcgactttaacttgtctctgttggacaagatatacgaggtcgacggactaagatgggctggtaatgccaatgagctgaatgcagcctatgccgccgacgggtacgcccgtattaaggggctgtccgtgctgattacgacttttggtgttggtgagttatccgccttgaacggtattgcaggttcgtatgctgaacatgttggtgtgctgcatgttgtcggtgtgccctctgtctcagcacaagccaagcaattgctactgcaccataccttgggtaatggtgacttcactgttttccacagaatgtcgaccaacatctcggagaccacatcgatgattaccgacattgctacggctccctcagagatcgaccggctgatcagaactacgtttgtcacgcaaagacccagctatttgggactaccagccaatttggtggacttgaaggttcccgcttctcttctcaacaagccgattgacctgtcgttaaagcccaacgacccggaagccgaaaaggaagtcatcgacactgtgctggaactgatccagaattccaaggaccctattattttgtctgatgcctgtgcctctagacaccatgttaagaaggagacccaaaaattgattgacttgactcaattcccggcctttgtgacgcctttgggtaaaggttcaatcgacgaacaacaccccagatacggaggtgtttatgtgggcacgctgtccaagccagacgtgaagaaggccgtcgagtcggccgatctgatcctttccgttggtgccttgctgtccgatttcaacacaggttctttttcctattcctacaagacaaagaatgtggtcgagttccattccgactacatcaaggtaaagaacgcaactttcccgggcgttcagatgaagtttgccctgcaaaagttgctaagcgtcatacccggggtgatcaaaggctacaaggctgtccccgtgccaacaaagactccccccaacaaggaagtggctaccagcactcccttgaagcaggagtggctatggaacgagctgtccaagttcctgcaagagggcgacgttattatatccgagacaggcacgtccgcgttcggtataaaccagacaagcttcccgaaggacgcctacggcatttcacaagttttatggggctccatcgggttcactacaggcgcgaccctgggcgctgcgttcgccgcggaggagctcgaccccagcaggagagtcatcctgttcatcggtgacgggtcgctgcaattgactgtgcaagaaatatccaccatggtcagatgggggttgaagccgtaccttttcgtcctaaacaacgacgggtacaccattgagaagttgattcacgggcctcacgcggagtacaacgaaattcagacctgggaccacctcgccctgttgcccacgttcggcgccaagaaatacgaaaaccacaaggtcgccactacaggcgactgggacaagctgaccagagatccggagttccagaagaactccgtgatcagactgatcgaactaaagcttcccgtgtttgacgctccagagagtctgatcaagcaagcggaactgaccgcggccaccaacgccaagcagtaa

SEQ ID NO: 987 - DNA, 1722 bp, Saccharomyces pastorianus
atgctatctaaatcagagaaacacatcgaccttttggctgggaacatgagcaatctgagtttcgatggacctggaactcctagaagcgctggactatttaacgtcaaccaaaacaatacaaacaggaggacgaggcctgccggttttaatgattctccctctccgataaaatcttccctctttccgcacgaagacagttccaacatggacattgatgaagtgtctcaaagcgatatggatatcactaactctccaaagaaacttcctccgaagttttacgaaagagcgacttcaaataaaactcagagagttgtcagtgtttgtaaaatgtactttctggaatattattgtgacatgtttgactacgtaatcagtagaagacaacgtacaaaacaagtcttagaatatttacagcagcaaagccaactaccaactgctgaccaagcaaaactcaatgaggaatggtcttcatacttacaaaaggaacaccaagtcctgagaaaaagaagattgaaacctaaaaacagggattttgaagtgatcacgcaggttggtcaaggtggttatgggcaagtttatttggctagaaagaaagacacaaaagaagtgtgtgcgttgaagattttaaacaagaaattactgtttaagttgaacgagaccaaacacgttttaacggaaagagacattttgaccactacgagatcggagtggctggtgaagctgctgtacgcattccaagatctacaaagtctatatctagctatggagtttgtaccaggtggcgatttccgtacattattaataaacaccaggtgcttgaaaagtgggcatgccagattctatatcagcgaaatgttttgtgcggttaacgcattgcatgatttaggttatacacatagggatttgaagccagaaaattttctgattgacgccaaggggcacataaaactaacggattttggtttagctgctgggacgatttctaatgaaagaattgaaagtatgaaaataagattagaaaaaatcaaagacttggaatttccagcattcacagagaaatctatagaagacagaaggaaaatgtacaatcaactgagagagaaagaagtaaattatgcaaattcgatggttggatctccagattacatggctctagaagtcttagaaggaaagaagtacgactttaccgtggattattggtcattaggttgcatgctctttgaaagtttagttggatatacaccattcagcggatcatccactaacgagacgtatgataacttaagacgctggaaacagactttaagaaggccccgacaatcagatggaagagctgcattttccgatagaacatgggacttgataacaaggttaattgctgatccaataaatcgactaagatcctttgaacatgtcaaacgtatgccatattttgcagacatagatttcagtactttgaggtcaatgattccgcctttcactcctcaactagatagcgagactgatgcaggttattttgatgattttactagtgaagctgatatggctaaatatgctgatgtattcaaaagacaggacaaactaacggccatggtagatgactctgcagtatcatcgaaactagttggatttacctttaggcacagaaatgggaaacaaggttctagtggcgtcttatttaacgggtctgaacactcagacccattcgcaactttttattga

SEQ ID NO: 988 - DNA, 1518 bp, Saccharomyces pastorianus
atggcaagtgcgaaggttttggtaactcacataaatgaaagcgatgccgatgaggcaatcacgaaggttaagaaactaaataaaaaatccggtccttttgacctaatgattatattcggcaagtcatatggtgaactggttaaattaaacactgacggtttacctcaattgctattgatctcgtcaaacgataatgacgatgattcaaagtcaaagaaaatgagcgaagatgtaacattactgcataactttggtacctataaactggcaaacaatatcaccatttcttaccttgcctattctaatgacgtgctacaagaacaaaaggacactattctggataaattcagtaaacttgataatcaagtagatatcctcatcacacaagaatggggtctcccgatttccgagagaagtggaaagttatctggaaatgaggtgatcgatgagttagcaaataaggtgcacgctagatatcattttgcgttttctgatgaaaaaaacttttttgaattggaacctttcagctgggaaggtggccgtgtatcgaggtttctcaatattccaaaatatggatctggcaagaaatgggcctatgcattcaacatctcagtaggtgacgatgaagaagttgaaccttccaaccttataagtaatccctacgagagtgctagtttaaaccgcaagaagagaccattggaaatagaaacaggagaagtggttaatcaagaccgtaagatttctgccattggagagaagagtgaaattaagaaaatgagaacgattctaccaaccaattgccatttctgcttttcaaacccgaatcttgaagaccatatgataatttcaataggtaagctagtttacttaaccacagccaaggggcctctgagtgtacccaagggtgacatggatatgtcaggacattgcctcatcatcccaatcgaacatatcccgaagttgaactcaagcgagaagatagagctggcacagagcctgttagcttaccaatccagccttgtaaaaatgaattatgtaaaatttgatatgtctacggctgttttcgagatacagtctgaacgttctgttcatttccataagcaagttgttcctattccgaaatacctgattttgaagttccgtgctgctttagatagacaggttcattttaataacgaaaagttcactagaaatgccaaactcgagtttagatgctacgactctttttcctcagaagagtatctggatattgttaaccaccaaaccaataattacttgcaattcactgtctacgaaactcccgaatcaaatccaaaaatattcctggccagcttcaactccagcgaaacaatcgatttgcagtttggaagacgcgtattagccttcttactaaatttaccacgtagagttaagtggaattctccaacttgtctacaaaccaagcaacaagagtccacagaagcagaaaagttccaaaaggcatacaaggattacgacatttctctcccagaaagctaa

SEQ ID NO: 989 - DNA, 3435 bp, Saccharomyces pastorianus
atgtctgattactttagttccagacctttgcaaacgctcacaccgatggataataggccttccggcggtggtggcggcgatgatgcctcctccatccactcaaagagctcccagtatttgatggatatcttaccggattcgatgactctgaatgaaagtgtctcttctacagtagccaacaatcaagcaaaggagttcattttgcccgaatccgacgagaggtctccctatcacatcaatgtccctatacccaaggcccagtcggcttctacagaaacgaaaaagcctctgtccggtgatgcagacactgtcgatgggcagtttgtcaaggagtatcctactgacattcttgtggacagattttacaaatggaaaaaaatcctgaaaggtttgatcatctatttaagggaggtcgcttatgctcaagaacaatttgcaagaatcaactatcaactgaaggggtccgtcaagtttcccttcctaacggatatcgatgaaaccacaaacactattacagacccatttactgcagctcctagaacgtctaagaaatcgcagccatcacagaagaagacagtgttgactgaaaatgaacagttccaaatgcaaatgcaacaagaacagagagactacccatcccaaccatccgtagacgaaagcacgatgagcttggcgcctcacgagtacaagcctgttcaagctgctgaattaaacaacacgtctgctgcatccgggtttgttaaatttggttcaggctccattcaagacgtccaagttattttgaaaaagtaccatctttccttggctaaccagcagttcaaaatctctaaagaaatcacatccactgtgattcctaagttagaggagttaagaaaggatctgagatataagatcacagagatcaaagacatacacggtgatttcaaaacaaacatcgatgcacatgttcaactaacaagccagctgctgaaaaaatatattgcgtccgtgaaattcatgaacgccaatggtattggtaacgacaaagtcactgctacaaataagaagccacacaaattagaccctaaacatgatccgtatcttttgaaactacaactagatttgcaattgaagcgtcaagtagcagaggaaacttatttgcaagaagcgtttataaatttacaaacttcaggtttacaactagagaaaatcatatacactaaaattcagcaatccctactacgttattctgccttaatcgattccgaagctcgtcttatgattaaaaacatgtgccaggaattacaacatggcataatatcaaaacctcctgcatttgaatgggataacttcgtcacccaacacccttcgtgtttactcaattggaaatctaacgaccccataccacctccaagaaagttgtctgatgttgtttatcctcacatgaaatccccactagccaagtgtataagagcaggatacttcttgaaaaaatcagaagtattgcccacttatcaccaaggttatttcgtcttaacgtcgaattacattcacgagttccaaagtagtgatttttataacttatcatctacaagctcaacttctacaaaatcgtcaacttattcatcttcagcatcgattgctgacacttatgccggtgctacaggcaatactaaagttaacactcaccatcgccacagtagcgatgtgcatagtaataatgccgtcaacgctggtacaaccggtgtagctggtactcgctgcatccgcaaaaagagctatttggcgccaattatgagtgttccattaaacgattgtactctaaaagatgcatcgtctacgaaatttgtgcttgtaggaaagcctactcttaatgaaaatgccgatatcaggaaatcgagctccagtacacatgtatccggtgcctctcaaacctctttaccaaagtatggtcatgaaacagcgaaaatattttctaaggccccattccacaaatttttgaagggaggtaaacctaaaaataagaatacgaagtcaagtgagttagaccaattttatgcggcagcacaaaaagaatccaataagtatgtgacttggactttcaaaatagtatctgcagaacctactgaagaggacttgaaacatttcaaaagatgggtccaagatttgaaaaacttaactagtttcaatgatactaaggaaagaatcaagttcattgaagatcgtgtaatgaaatcacatcgattcaaagcaggatatatgtcgaaaaataatatgaacaacgtgttccatacgccttgcctaacagatagctcatttgcattgcaggatgccactacgtcctctctcaatccaaatgggaggtctggaaaaccccagtatattcatattcagaacaattcattggccgattttgatgtaaatgattttagatctagggttaacacacctgccattgatgattacggtaacttgattacagtagaaagaagatcagcaccatctccgcaccagtcccctgattatgcagctacgtcaggtaatacaactccatcttattcatcaggctcaaggcctcagagcgtgtataacggatacaatccagctgtatctataaccagtaatggaatgatgctacaacagtcggcaatgaacagtaataataaaccagcagctagcctgcgtcatcaaagaaatgtttcacaaacaagttctttaccaggcttttcatatacatctccatcgctaccggtaaactctccgggcagttctaattcggaatccagctcaggcggttattttgccatccctcttcatgggaacaacaataacaacaattacatgcaaagaaattctgaagactccagcccatcttataatgaagatcacatacgacaacagcaaccaatgcaatctttatcaaggacttcaagttccagtataatcgctacagggatgagaagtacatctgctgggaatccacctaccacaaacgtagcaattgtgcctaaggtaatggttaataaccaaaatgttaaaactgtccctgctgatcagtcagctacggcaccttcatcacctacgttgaactcttcctcaacaacaaccaatcgcgaatcaccatatcaaacccttaagaaaacaaacagtacaggaaatgttccatctttaagcacagaaaaaacacacgcgcaccctgctttttataaaaggggcaataacagtgctcaaaacttgaccactactggcacaacagcttctagagttcatcctgtcagaaaacataagaaaaatgtatccttcagttctttgaatagtttgatgttttcaaaaaagggcgctaattatggtggtaatctaatgaccaaccaatttatgagtggtgggatacaagaagatgatggtgattcaggtaataacgattctataaaactgaaccagtcaatctattcttaa

SEQ ID NO: 990 - DNA, 2844 bp, Saccharomyces pastorianus
atgtcattctttgattccttgcgtcaaaaggccccatttttagacaagctggccgacacttttactccaactttaaccagggatgagaaattcagattgaagtacaagctaccagctaatgagaacattttagatgatacaaatgctgaagttacattcgcaacccccaacggcaatggcaatgatcattcggatatgaccaataaagggagaaaaacagcctatgtattctctggaagattgtttttgacgcctcacttcctggtgtttcgggatgcattcgatcattcgtcatgcgtactgatcctgaatatctctactattaaacgagtggagagatcgccatccgaatcgtatgaatttgctcttttagtgaccttatactcgggagcaaaagtgttgatccaatttattggtatacgttataggtcagagcagttttgtaataaattgaaattgaatttgaaacagaacatccctaatgccaaagctttaacggcgttcctagaaacttcttattctgagtttttaattgctaagaatatactggggaaaaaggacatagctgtacctagggcaggtcttggtcaacattttaaatatccaggaaatcccactatggccaaggagaaggccaagttaagattgtggttcgattatttcagacaaaatggaagaaacttggctgttgttcaaactcctatgttcaggaaattgattagaatcggtgtaccaaaccgaatgagaggtgaaatttgggagttatgttcaggtgcaatgtatcttcgttatgctaatgttggggaatatgaaaaaattctaaatgataacgctggtaagacttcacaagctatcgatgaaattgaaaaggacttaaaaagatcattaccagaatattcagcataccaaactgaagaaggtattcaaaggttgaggaatgttttgacagcctattcatggaagaatcctgatgtaggatactgccaggcaatgaacatagttgttgcagggtttttaatcttcatgtctgaagaacaagcgttttggtgcttatgtaacctttgtgacatttacgttccagggtattattcaaagacgatgtacggcacgttgttggaccaacgggtgtttgaatcctttgttgaagaccgaatgccagttctctgggaatatattgtccaacatgatatccaaatatctgtcgtatccttaccttggtttttgtccctatttttcacctcaatgcctctagagtatgctgttaggataatggatatttttttcatgaatgggtccattacactatttcaagtggcattggctgttttgaaaataaacgcagacgacattttacaagctgatgatgacgggatgtttatcgccatcattaagcactattttcaaactctgggccaaagtgcacatccagattcaagcgatataaaatacaggcaaatcacgaaattccaagaattgctagtaacagcattcaaagagttcagtgtcatcacggaagaaatggcaatgcaagcaagacacagatatgaaaagggcatatttcggaatattgaaacttttatgaaaaggacgcaattgcgtcatatgccaaagacgttcaatctttccagtgacaatttgtccaatatctatgacatgttttaccaaagtatagaaacgtataagatcagtatgggaactggatcatccaatatgggtttcgaggtatttattcagttcttgagtaagttctgcgattcatgtagaccgtgtgaaaaagaaaacgatccagctttccgtgaacaaaagaggaattttttgcaaagattgtttgacaactgggattctgctcgtattggcgagttaaccttaaacgacgtggtaactggattggataagctattaactgttgatctcttacaagctataaactatttcttttctttgtatgatacggatggtgatggtgaactgcacagggaagaagttctgcagctttcagaggggctgctactgctcacagaaccgtggaagagtggtagatatgtggacctgttgactaaaaagtgcattgaggatgatattgccgaaaatattatcagggagaatggcgaggaaatagttactatgaaccagattgagttgcccacaggtgttactattgatgaagaaaaatataaagccgaacaagcagaaagatatttgaaagctgcaagcaattttctacagagatcatttgagtatgctaaggcagttgagcttgcggaggaggttaatttgatcgatctatccgacgatgaagacgaagaaagtcacgcagcaaaactgaaaagattggaaagcataagggcgaaccctgctctagaccccacgcatccaaaggtcatagatctggcaacatttagaatgatcattctggcagatgaaacttatgaactttttttctccaacacgttacgatcatccattcacgtcgatgaacacatcaatgtcaataacaaaaacaaagtccttagaagtatgtttgatggcatcttagctgacggcaaaagagttgctgaacaagttcgtcgccgggtcgattccgtggcaactaggaatagtatcacttcggcagaaagcacgccaactgacgcagcaagttcgacaactacaaaggaagagaagtacgacgatttggatgattttacatcggaccatcaatccgagcacgaggaactgctgcaaagctcctggtttgaagttgacgatgccaacgaaacgaatgctgtgcaagaaaggccttttgaaccgttatcagcaaatccatcggacaagaagtctagccttattgaattcgaagcatag

SEQ ID NO: 991 - DNA, 1041 bp, Saccharomyces pastorianus
atgctaggtgtaagctctttcctgctaggtcttcgacccacaacaaaagtgttttttcgtagcaacatttcgctaatcccatcgagaactttagcatcatataccggtaggccacagagcacggcgaaactgataaacccttccatactggtgagccggagtgtggcttttcagcagcctctagcaaagaggtttttctttcaaacgtcgactctgaaatccaggtggaagcccattttcaatgaagaaactaccaatcgatatgtgcgtttaaacaggttccaacagtaccaacagcagagaaataccggcaactcgctgggctctatgactgtcctgggtttttcgttgatggcagggatctattttgtttcgccatatttgtttgagtatgtgccacccttctcgtatttcaaggaccatccaaagaatttggtatacgcattgttagggatcaatcttgctgtattcgggttgtggcaatcgcctaaatgttggaggttcctccagaagtacatgttactgcagaaggatcatatgacaagcaagctttccataattgggagtgcattttctcatcaagagttttggcacctgggtatgaatatgctggcattgtggtcatttggtgtttcactctcgtcaatgctgggtgcatccaatttcttctctttatacatgaacagtgccattgcggggtccttgttttcgttatggtacccgaagcttgcacgcttggctattgcagcgcctagcttgggtgccagtggcgccctatttggggtattgggatgcttttcatatttgttccctcatgctaaaatactgttatttgtcttccctgttccaggcggcgcctgggtagcatttttagcatcagtggcatggaatgcagctggttgcgctttcagatggggatcgtttgattatgcagcacatctaggaggctccatgatgggtgttttgtatggatggtatattagtaaagctgtcgagaggcaaaggcaacatcgtctacagagcaccggtaggtggttttag

SEQ ID NO: 992 - DNA, 552 bp, Saccharomyces pastorianus
atgttcagcacacggtggatatgcagaatacagatagctggcggaataaaccgcctgggaagttaccggttagcatccaccggaggagctaagattggtaagaaatttgagactatggatcaaataaaggcttatctatcagaacctgtgtggtctgttcatgaatacttgggaacgaacgtagaggagaatacccttagattgccacctgtagagcttgtgaagaaactgctgcgattatcaggcttgcccctagaaggagcggacattgaagccattcaaatgcaactcgccaagcagttatcattcgtcaacagactgcataatatacctgttgaagatagaacaagtgtggaagggtatgacgctcgactgatgccgaggcaaacaacaaaattgaactataggatgctactagacgctgttaaacaccagaagcaagatgcggatataggcgaggttagcggatcttggacggctacggggcttgctgcagaatccaagaatgggtattttgttgtcagagaaggactacttaaaaaccgaaagtga

SEQ ID NO: 993 - DNA, 1794 bp, Saccharomyces pastorianus
atgagaatcaaaaagaagaacaccagaggtaacgctagaaactttatcaccagatctcaagctgtgagaaaattgcaagtttctcttgctgatttcagaagattatgtattttcaaaggtatctacccaagagaaccaagaaacaaaaagaaggcaaacaagggttccaccgctccaacaactttctactatgctaaggatattcaatacctgatgcatgagcccgtcttggctaaatttagagagcacaaaacttttgcaaggaaattaacaagagccttaggtagaggtgaagtttcttctgctaaaagattagaagaaaacagagacacctacactctagatcatattatcaaggaacgttacccaagtttcccagacgctctgagggatattgatgatgctttgaatatgttattccttttctctaatttgccctccacgaatcaagtttcatcgaatattgtcagcgatgctcaaaaactttgtaatcaatggttggcatatgtcgctaaagaacgtttggttcgtaaagttttcgtatcgatcaagggtgtctactatcaagctaatatcaaaggtgaagaagttagatggttagttccattcaagttcccagaaaatattccaagcgatgtcgactttagaattatgttgaccttcttagaattttattcaactttattgcatttcgttctgtacaaactatacaccgatagtgggttgatttatccaccaaaattggatcttgaaaaggataaaattataagtggtttgtcatcatacatcctcgaatctagacaagaagacaatttgctacaacatgaaccagccgaaattaaagaagacgcacaagttgaaactttggatgcatcgaccttaaagtctgctttaaatgccgataaagcaaaacttgaagaaacaagcaaagaagaacaagagcaagaacaagaacaagaacaaaatgaggaaacagaactagacacattcgaagacaataacaagaataagggtgacattttaatacaaccaacgaagtatgattccccagttgctgctttatactccgattttgttttctatattggcagagaagtcccaatcgatattcttgaatttttaattctatcatgtggtggtaatgtcatcagtgaagccgctttagatcaaattgagggcaaaaaagatattgacatgtctaagattacccatcaaattgttgacagaccagtattgaaaaataaggttgctggtagaacatatattcagccgcaatgggtctttgattgtatcaataagggtgagttggttcctgccaacaagtatcttccaggtgaaacacttccacctcatttgagtccatggggtgatgctatcggttatgatccaactgctcctgtggaagaaggcgaagaaagcgaaagtgagagtgaagctgaagttgaagaggaagaccaacaagtcgttgttgaaggtgaagaagaagaagaagaagacgaagagttacaagctcaaaaggagttggaattggaagcacaaggtgtcaaatattcagaagctcctgaagccagcaagggtgccaataagccaaagaacaagaagagaaaggtcgacgaagaagaagaagaaaagaagttgaagatgattatgatgagtaacaaacaaaagaaactttacaaaaagatgaaatattccaactccaaaaaggaggaacaaactgaaagtttgaaaaagaaaaagaagcaaattgccaagcaaaaggctaaattgggtaaacttaactccaaaaaataa

SEQ ID NO: 994 - DNA, 924 bp, Saccharomyces pastorianus
atggtccagcaactgagtctatttggatctattaatgatgatggctatgatttattaatatcaacgctaacaacaatatcaggtaatccaccacttttatataacagtttatgcactatttggaaaccaaatccgtcttacgacgtcgaaaatgtaaattccaggaatcagttggttgaaccgaacagaataaagctttctaaagaattgccctttgcttacttgattgatgaaacaatggctgataagccattgaattttaaaattttaaagtcctttactaatgatgaaatttcgctggactattctatgacaaagaacattctacacgacgaagttccacagaccaacagtaacaacagtactaccgtgggcaaaaaggacggtgaaaatgtaaaaagcgatgtaaaagaaggcgaaaacaaggatgatgaagcagatgtagacatggacgcaacttccaccgtttccaacaagtcatgttcttcttggtcattacagatttcagatattccagctgcaggtaataacagaagtgtatcgatgcagacaatagctgaaacgattatactatcttcggctggtgaaaactcatcaataacttcactcatgaacgaattagggtatgtatttgagttccagtatctcacaattggtgtaaaattctttatgaagcatggtttaatattagaattacaaaagatttggcaaatagaagaaaatgggaattcacagataactaacggaggattcttaataaaggcttatattaacgttagtagaggtactgatattgaccgtataaactatacagagactgtactaatgagtgtaaaaaaagaactacaaggatacatcgacttaagtgtaccagatagacaatcgatggactccagggtagcacatggaaataatgtaatatga

SEQ ID NO: 995 - DNA, 234 bp, Saccharomyces pastorianus
atggccgtcgatgtacctcgtactgtaatcaataaacttatgctgtttaccgtggcaatggttgtactacctgtacttacgtttttcattattcaacagtacacaccaaacaccctagtcagtggaggtttagctgctgcaatggccaatgtcgttctcatcgtttacatcgttgtagccttctgtgaagatactggcgattataaggttgaaagcaacaaaaaagaagattga

SEQ ID NO: 996 - DNA, 798 bp, Saccharomyces pastorianus
atggcattcggtcaactgtacggctttttcgttttcactttatcgtggtttctttccaagactgccgaggcagcctcatccaaggaaagcttctcctttatttcgctaaacaaagagactaatttgaacattttcagctctgtctcttcaacagcggatgtgatatcaactgttgatagtgctattgccatcttcgagttcgaagactacccattaatggataaggtgatattcgacgaaagtattcaagagtacccatttttcgataggtttttttctaatgaggtcgctttagtcgtcgctgatgaattgcctatgaacattcctcaaaccttatctactattttagagcagtttacagtgaatgatttagctcaaagtgcttccgatttattgtacgaccacttcttagaagacaaaagcattgtgttgttcaaatttccttctagcgattacgatttgtacaaattggacgaattcatcgaatcttgcttattgtttttggaagacaaatctagtgacgatctgactgtcgttatcaattcggttggtaccattgacactgatgactataactttgctgccaaagacatcttgagccacgatgacaacaacgaagctcaagatggcgacagtgatattttaagctctatttggaccgagggacttcttatgtgcctaattgtttctgcattgttggtgtttattttgatcattgcgctctcttggatatctaatttagatattacctatggtgctctggaaaaatcttcaaacccaataaagaaaaataattaa

SEQ ID NO: 997 - DNA, 1425 bp, Saccharomyces pastorianus
atgtcaacatcccttttagtggagaatagccggactattaatgcaaatgatgagaacagtataaatgatactcaacgtatcgtgcaaaagagaactgttccaagaaccattctaggtaatgtcacaaacaatgcaaatattctgcaagagatctctatgaataaaaaaatcggagtaaagagcttttcaaaactaagctctttcttacctttgaaggaagaagttttgaagcacaacgattttaactcttcttttagtgataccgtacaggaaaggaaacaaggttttttaaagaataaagaaaatattcccgaatatggatattccgatcaacaacagcaacaacatcctaacgatgagtcaattcgtgtagactcaactgcactaagctctaatatattggaatactctgaaaataaatcaatttctacccaaatggaatggcagaataagatcataaaaaggaattttgaagattcgaaaaaaaaacggccaacatcgactctggttgagcaaaatcaacaaaagaagtttaaattgtatgagcttactacagaagaagatattctcgaggaatacgagtgggatgatttagatgaagaagattatggtgatccgctgatggtaagcgaagaagttgatgatatttttgaatatttgcatcacttggaaatacttacgttgccaaataagccaaatcttttcaaacataggaacatcaaacagaacagagatattctagtgaactggatagtcaagatccataataagttcggtcttcttccggaaacattatatctggccataaatataatggataggtttctttgtgaagagatagttcaactgaacaaattacagttagtggggacatcatgtttgttcattgcctctaaatatgaggaaatttactctccaagtataaagcattttgcatatgaaacagatggggcctgctctgtggacgagatcaaagaaggtgaaaagtttatattagaaaaactaaacttccaaattagcttcgctaatccgatgaatttcttaaggagaatatcgaaagcggatgactatgatattcaatcaagaacactagccaaattcttgatggaaatttctctagtagatttcaagttcattggaatattaccgtctttatgcgcctcggcagcaatgtttctttctaggaaaatgttgggtaagggcatctgggatggcaacttgattcactatagtggtggttatacaaaagaaaaactgtatccagtttgccaattgttgatggattatcttgtagggcctaccattcacgacgagttcttgaaaaaatatcaatcgagaagatttttgaaagcatccataatatctattgaatgggctttgaaagtaaggaagaatggttatgatataatgactttgcatgagtga

SEQ ID NO: 998 - DNA, 1203 bp, Saccharomyces pastorianus
atgacggcttcatcccttgaagataacttactgctcgaatgctacagcgaccctgaattaagaaggtggacacacttggctaatgcgagagtttggaagggccttctcacactggaccagtatgtcgaaagagagcaagtgttggggtcttcggagatttctcagaaagacaaatcagacgagacaatatcaagattcccaaaaagttatcaatggcttgggcaaaagtactttgttttgaaggatacatctttgcccgacaacgggaagtttagtcaagttgtttccagttgcgaaacattgaacagaatcgggtattgtattcacccagggtcgaacggaaagattgaaccagctttaattgtatgcattggaggtgttttcacctttgaaaaccaccgcggcaaaggctatgctaagagcatgattaccaaactgaacgaattctatgataatatacgtaatgaagctgggggtgtattggaattgaaaaacttacttatcaatctttatagcgaagtgggagattattattccccattagggtacaaaagtatgcatgttccactgcaccaccttaccaaattaaacgaaattactgaatactattgccaaggagggtctgatgcaaacggcaagtatttgggatttgatgattacgaagacttagtgaaattacacgaaggacagttcaataaaagtctaatgaaattacataagaataatccagagaagttcattttcactattgcaccagatatagacatattcaagtggttccagtatcgtgaccttttcatcatgaaaagatcgggaagggaatctcaggaaaagctgtccttcggatttgcattgagtgataacagccacatcatatggcatcacaattggaatggcaattctttgattatcgtcagaatctacatacctgaagaaaccattcagagaaaagaagcgaaacttaaacagttgctgagccaagccataaaagaaacacaagatcgagggatgcatgcgctagaattctgggatagtgaaattcctgtcaaacagtatccacaattattccaattgctgaccgaactggaagacgattctaaactcttttcggataatggctccatcagtgctgtcagacctcctaagggttataccgccgacaaggttatttgggataataataccaaattctgttggttttaa

SEQ ID NO: 999 - DNA, 1155 bp, Saccharomyces pastorianus
atgtctttattaagggctagatgcaccagccgttttctatcgaacacatcactgcttccctgtagacacacgaatgggagaccactatatcacttactcacaaggcaccagcaacatagaggcataataacgtcgactatagactggaaaccaatcaaaactggtaagagtccaaacgatgattccaaaaggaaaggatcatttggaaagaagatcgtgttggggttaatgattgcaatgccggtaatatcattctatctaggaacttggcaaatgaggaggttaaaatggaagacaaagctaattgcagcgtgtgaaagtaagctgacctatgacccgataccgcttcctaaaacttttactcctgagatgtgcgaagactgggaataccgtaaagttattctttccggacatttcctccacagtgaagagatgtttgttggtccaagaaagaaaaatggagagaagggttatctcttattcacgccatttatcttggacgatactggcgacaaattgcttatagaaagaggatggatcagtgaagaaaaagtagctcctgagtcaagaaacttgcatcatttatcgttgcctcaaggggatcatttgaaattggtctgcttagtaaggccaccaaaggcaagaggctcattacaatgggcaaaaaaggacccaaattctagattgtggcaagtgccggacatttacgatatggcaaaaacgtccgggtgtaaacctatccaattccaagccttgtacgacatgaaggatcatccgatacgcgacgaaaactcaaagaacgcagctttatcaaatcaatcaacttttagcttctggaaattctggaaacgtgaacctactgatatcaagactgaaaagaaaaatctttccgaaggcaagccaaatccggaggcagctgaccaaacaatcgagttcaatgaatggcagttcataaaagcgggtgttcccataggtaggaagcccacgattgatttgaaaaacaatcatctacagtatttagtaacatggtacggcctttcccttctgagcacgatccttttagccgtagctcttgcgaaggctaaaaagggcggagttgtgtctcaagaccaactgatcaaggacaaactaaagcacacgaggaagtacatgtaa

SEQ ID NO: 1000 - DNA, 1032 bp, Saccharomyces pastorianus
atgagcgaagataaagccaaattagcaactgccaggtcggctacagaataccggctatctatcggtagcgccccgacttcgagaaggtcttccataggtgaatcctcatccgtggcaaaatttactggtcaagaagggctaacgggatcaactggagagtgcagtgaaaacgccatacagcaggttctgttgccgaagatcagagaattgaccgattccattatcactttagattcaaattttacgcacttgaactttattcacgagagtttggctgacctgaatgaatcactaggttcgttgttgtatggtatcatgagcaattcatggtgcgtagagttttcacaggcgcctcatgatatccaagaggatctgatcgctatcaaacagttggaatcgttagaagatgagaaaaaaaacttattagaggaaatttccaacatagaacgtggggcttcgaaaacaaatgctgatgtgccaagagaaaataaactggataaagattcccagaagaaacagttcagccaaccgctgttcccttcctcgcaagtaagaaagtataggccatacgacaacaaagataaaagaaggtctactaaggccgccaacaacttgtcaacagacaatgaagaggattatgatgacgatactagcagcgaggcgtcctttgttctaaacccgacaaacatagggacatccaaatcctctcaagggcacgtaagtaaaaatgcgcgttccaataacaataacaatagtaagctaaggaggaaatcaatcctacacacaataagaaatagcattgcctctggagctgatttgccgggcatcgaaaacgataacgtcatcaatttaggcgatttgcataatcgaatatcgctcggaagtggtgccgctaggatagtcaatggtcccatggcaaaaaagaggcattccatgttcactgaaaatgcagaaaggacttccacagaaaacagacactcaatcgcaaaaaaacctgagaaaaagctgagcgcaagaccgcctttcaggtaa

SEQ ID NO: 1001 - DNA, 1632 bp, Saccharomyces pastorianus
atgtttggtttcggcggtggtaatagcggatttggaaataagccagctggttcagccgggttttcttttgggcaaaataacaatacggccagtcaaccttcaggttctgggtttggtttcggaggtggccagcaaaataatacgactaccggtgcgaatacaaccggagggtttggagctaatcaaactacgaatacttttggagctaatcaacaaaataatgctgggggtggcctttttggtaataagcctgctcttggtggcttaggaagcaccaatactagcgtttcaggaactacagctgctgggacaggtttatttggtcagcaaccagcctccggtggacctctcagtggtggtctatttggaaataagccagctcccacaaccggaggcctttttggtaatacaacacagaataataatactacaggcggggggttatttaataacaaattagggactaccgggtcacttatggataataataatacccaaaacacttctactatgaatggtagtggactctttggcgctaaacctcaaaacagtgcgccggctactggtggtttgtttgggaataagccacagggttccgtagcaggtggtggattatttggaagcaactcccagaataacaatacccttagtggaagtggtcttttcggtcaacctcagcagccccaaacgaatactacccctggatacggaaatacagtctccacacaaccatcgtttgcttggtctaaaccccccgatcaaactaacttacagcaacagcaacagcaacaacaatttcaggtaccattacaacaaacacaggcaattgtccagcagcagcagcagctttctaattacccccaacaaattcaagagcaagtactgaaatgtaaggaatcatgggaccctaacacgacgaaaacaaaattgagagcgtttgtatataacaaagtgaatgaaacagaagccattctatataccaaaccagcacaagtacttcaggaagaatgggaccaagcaatggagagtaaaccctcttcccaaacgattccaatacaaatatacgggtttggaggtttaaatcaacgtaatcaagtacaaactgagaatgttgcacaagctagaattatcctaaatcaaattctagaaaaatcaacacaattgcaacaaaagcatgaattggacactgcatccagggttttgaaggcacaatcaaggaatgtagaaattgagaaaagaattttgaaactaggcacacaattggcgattttaaagaacagaggattgccactgggaatagcagaagaaaaaatgtggtcacaattccagactttattacaacgcagtgaggaccctgcgggcttaggtaagactaatgaactttgggcacgtttggctgtcttaaaagaacgcgccaagaacatttctagccaattagatggtaaactaatggtcttcaatgaggatgccaaaagccaagacaatatgtcacaaggcaccggtgaagaatctaacgatcgtattgataaaatagcggaaattctaacgaaccagcagcgtggtataacgtacttgaacgaagttttggagaaggacactgcaatggtaaaagaatatgcgaataagacctaa

SEQ ID NO: 1002 - DNA, 1209 bp, Saccharomyces pastorianus
atgtgcgacggttcaacatctacaaaaggtctaccatacaagctggccgaagagagcagagtaaaaactctcataccgaatgatttggtggcatcgcggagtaactgcataaagacattgaacagctcttcgcccaaagtagactccatctcctgtatagacatctggctgaattacgccaatggcttgctgagttacaggtacgaggccggtaatgttgatcctcttgtagaagaggaaatctctcaggtcttgatcaacgtggccacattttatgaagatatcggcatcgaaaccttgcacagagcgtatgaatcttcacaaccatcgaacaacctatgggtcacgagcgggacttatttgaaaagaggattaggcttggtctgctttcttaaggctatttcccaaacaaatgcggttgctgaccccaagaatatgcaggtgctcaacatttccaaccagctgtctctggagttccaattgttgcaacaactgggaattgtcattttggcattatccaaattgagatcaaaagtcagcaaggatgctgttgtggatctcgaaccccacgaacttaaagaactaggcacgtccagtgtcttctacgccaagctttgtattgggtcctataacactgcattgcaatgccaggatggccgtatagtggacttcctcttcttaaagtatttacagagtttgatctatcttttcctgtcaattaaccagtacaatatggacgaatgtgggatcgccattggaatgcttcaagaatcggtcaaaaaactattgaatatagtccctaactcgcagctcaaagaactggacatcctatcttccacagatatcacaaagaagagggatattttgaaaaaggcttttaaaaggaagatacataccactactttaaagacgagtcacatatttgagaagaaagcatcctctacatacaaaaacggcatgatgcccttattaaatctttcgttgaatgattttataatccccctaacaatactattaagatacaggtaccaaagaaccaacgataatttttcatataaaccggtagagaatgacattgagaaattgaacaagctcttgcccaggggcaagtcgtcggatatagaaggtatcccatggacgtttcaaaatggtcatttaacatttgaaaactcaaacgacgctagcaatgagaacgaaaactacttctga

SEQ ID NO: 1003 - DNA, 1719 bp, Saccharomyces pastorianus
atgtgtggtatctttgcagccttcaagcatgaagacgttcatgatttcaaaccaaaagctttacagctatcaaagagaatcagacaccgtggcccagattggtccggtaacgccatcatgaactccaccatatttgttcatgaaagattggccattgtcggtttagactctggtgcccaaccaatcacttcttctgacggcgattacatgcttggtgttaatggtgaaatctacaaccatatccaactaagagagaaatgttccgactacaagttccagactttcagtgattgtgaacctatcattccactgtacttggaacatgatatcgatgctccaaaatacttggatggtatgtttgccttctgcctatacgattccaagaaagaccgtgttatcgctgcaagagatcctatcggtgtcgtcactttatacatggggcgttgttccaagtctccaacgactgtttacttcgcttctgaactaaagtgtttaaccgatgtttgcgacagtatcattgcattccctccaggtcatgtttatgattccgagaccgacaagatcactcgttacttcactccagactggttggatgaaaaacgtatcccatccaccccagtggattaccacgccattagacacagcttagaaaaggccgttagaaagagactaatggctgaagttccatacggtgttctattatccggtggtctggactcttctttgattgctgccattgccgctcgtgaaactgaaacggctaatgacgaggccaacgaagaagctgacgttgaaaacaaaaagcttgccggtatcgatgaccaaggccatttgcacacatccggttggtctcgtttacattcgtttgccgttggtttaccaaacgcacccgatttacaagctgccaggaaagtcgccaagtttattggttctattcatcacgaacacaccttcacattgcaagaaggtttagacgctttggacgatgtcatttaccatttggaaacttacgatgttaccaccattagagcttccaccccaatgttcttactgtccagaaagatcaaggctcaaggtgttaagatggttctttctggtgaaggttcagacgagatctttggtggttatctatattttgcccaagctccttctgccgccgagttccataccgaatccgtacaacgtgttaagaacttacatttggccgattgtttgagagccaacaaatctactttagcctggggtctagaggcccgtgttccattcttagacaaggactttttgcaactgtgtatgaacattgatccaaaagataaaatgatcaattctaaagagggccggatcgaaaagtacattttgagaaaggctttcgataccacagatgaaccagacgtcaaaccatacttaccagaagagattttatggagacaaaaggagcaattttccgacggtgtgggctactcgtggatcgacggtctaagagacacagctgaaagagttatttcagacgctatgttcgccaatccaaaagctagctggggtgacgacatcccaactactaaggaggcttactggtacagattgaaattcgatgcctggtttcctcaaaagaccgccgctgataccgtcatgagatggataccaaaggccgattggggatgtgccgaagatccttctggtagatacgccaaaattcatgaaaagcacgttaatgcttaa

SEQ ID NO: 1004 - DNA, 3111 bp, Saccharomyces pastorianus
atggggagaaatatcagaaggcgcaggagcaattcctcactttcagaggccatatcagtatcgctgggaataaactatcaagactcatcaaaaaacaagattcatagagctagtgttagcacaatgtcacctccattatgccgttcttatatgagtggattttttacaggtgcaagctcgcctatgaattacaatatgtctgactcaaagctacccttctcgaacaagcaacaccccaaagtgattcacggatcagaaaaattgcatagacaaacagcccaactgtccaatgaattttgctcttcttcagttgaggaaggctctccgactattaaggactatatggacattataaatagcgatgacagaaaagatgatcaatctatgcgcactatagaagagaatattgatgaagaatacgctgatgaatactcaagattattactcagtccagcatcctcaaatgcggatgacgaacgaaatcgtgcgcttcaagacagtccaatatcagaactagaggatggtctcgggggcggataccagtccgtccatccctcgcataatatgcgtttaggcccaagaagtgcgtggcagtggtttacgtcatttccttccaaatgcgcacattacctacctgcggcagtattaggtctgcttttgaacatcttagatgcgttgtcctatggtatgatcatatttccaattacagaaccggtattttctcatttggggcccaccggtatttctatgttttatatctccacaataatatcacaaagtgtgtattctgggggctggtcgagttttccttccggagttggaagtgaaatgatcgaaattaccccattttatcacacaatggctctaggtataaaagaggcgctagtgggtagtgatgatgaaatcataaccaccacaatcttctgttatgtgatcagctctatgcttacaggtatcgttttctatgtactggggaaattacgactaggcaaaatagttggatttttccctcgacacattttaataggctgtatcggaggtgttggttatttcttgataattaccggtattgaagtcactacaagagtggctaaattcgagtactcgtggcctttcttgtcgggactgttcacaaattatgacacgttggcaaagtggttactgcctgtcttgctgacaatagttttaatcggtacgcaacggtgtttcaagaactcattagtcctgccaactttttacattttgacattggttttattccattttattgttgcaatcattcctacattatctttagatactctaagagagtcaggatggattttcccaatcgctagttctgatagtaaatggtacgatcattacaaattattcaatattcataaagttcactgggcgttggttttccaacaaataccaacaatgatggctttgaccttttttggtattttacatgtccccatcaatgtgcccgccttggccatgtcactacaaatggataaatacgatgttgataaagaactgattgcgcatggttattcaaactttttcagtgggctgctaggttcagttcaaaactacctggtgtacactaatagtgttttatttattagagccggagcagactcgtcatttgctggcttccttttggtagccttgaccgtctgtattatggttattggacctgtgataatatcattcataccaatctgtatagtcggctctctgatttttttgctgggttatgagttattggtagaagcactagttaatacctggaataaactgaataggtttgaatacctgactgttgtaattattgtctttacaatgggtatattcgactttgttctaggtatcattgttggtattttgattgcatgcttttcgttcttggttgatagcacaaaattgcaaactattaacggcgaatataatgggaatgtcgctaagagtacggtttatcgtgattatgttcaaaccaaatttctagaaggcattggtgaacagatatatgttctaaaattgcaaaacgttttgtttttcgggactatcatatcaattgaagaaaaaattgaaagactgctagaaataagcaataaagactcaacaaaacggagaataaagtatttaattttggattttaagaacatcaacgctgacaatattgactattctgcagcagaaggtttcaatagaattaaaaggttcacggaaaccaaaagaatcaagctgatcatatcctccatcaaagaaagggatcatatatacaacgccttcaataacgtgggactattaaacgatgtggaattatttgccgatttaaacagtgctttggaatggtgtgagaatgaatttctcttccaatataagcaattaagagaaaaggcaaagaagcgactagaagaaagaaagcagaataatgttgtgtccgcaataatggcagccactcaaaacaaaaagatcgatagatctagaaataatttgaataaaggtaatagagaacaagttagaaacttgatgtccctaccaaccaacacccctcgtaatcatcaaatgctttccgtggctcagaacgtctttgcaaatgatgaacaggcagtgaagaatctcaagaaggaatataaaaacgacgaaccaattttacctatattgctatttgcactaaagcaatatcgacctgatatcgtatccgaagttcagaagataagagaaaaagaaatcaagttctgggctcaactatgtccctatttcagtagacgcagactagcaagtcaatcacatttaatacatgcagacaatgtatttttcttgatagaaacaggtatgttaaaggcaatgtatgaactaccacaaggtacattgtacgagatcatgtctaatggtacatgttttgggaaaatcatcgccccaggaaacactatgcctaaagaacagaaactcatcattgaaacggaaacagattccatattatgggttatagattctagctctttgaataaaatgaaagaagaaaaccttgcattgtacgtggaggttgcgttaatgataatgtgcatcaaggacactaggttcaaggaattactaggctacacccttgttagcgcatga

SEQ ID NO: 1005 - DNA, 693 bp, Saccharomyces pastorianus
atggccattccatctgttagtgtcaccaccgataatgaatacgaggacatatcatccttctcttctattgactcttacaagcctgagccctttactgggttcaaagattcggaagctccagagcagcctcttttgaagaatgacaccattgttggaaagggacaattggagaatgatgacagtgtaggcgatcagcaccgtcactctgatgtgcactctcatcacagttccagtactttgaaaaggccaacttctaactcgatagaaaagatggttacacacaatgcgttagaagggaattcagaaacagtagattctttgaaaaaagaagggttaaacctggacaagaagggtactccagacatcacagccccagtaacaaattcggcgcacgatgctgcatttccagaggagtatcgattagagactgagacggggctggttaagttgaagacacttgaaactttaagaagagaagactctcgtgtttccggagcaaaaaaggagcagggccacgaccacactgacgcacattctacacgctccaaagctactgcgtattctcaaggttcttccctagaatccgataagttgaacatagcagtggaaaagaataagaaaagaattgaaaagtaccaaaaacacaagggagaaaaaggaattaaaggcttcttccacagaatctttgattga

SEQ ID NO: 1006 - DNA, 942 bp, Saccharomyces pastorianus
atgtgcatactaatggcaacgagagcgcaccccgattatgagctcatattaatatcaaatagagatgaattcttggaaagaaaaacacacgccacatgctggcacaacaatgatttcatcctttcaccctacgatgtggccaagacatcggtggaaaaacaaatttttggcacctggtcgggcataaataaagaagggaagctagctacgatcctcaatctgaagcaggacgatcagcgagatcccacgaaatccaaatctcgcggcatgttaccattttcctttttaacgagtcgtaaagcaagttttcaagattgggacgattataacaatttcgaaaagcattatgacggtttaagggctacaggtgactttaacttcttctatggtgatgttattgagaaacggtataaagttattgattccttaggaaatactttcactgtattaggctccgcctgcagacgagatcctgattcttacatagtaatttctaatggtaagtttcacaatagttccagtatatcagagcaagcctgggagaaagtaaagattgggcgtgatagtttggagacattaattcaagaaaatattgaatcagatgaggaaacgttggtatcaagttgttttcaactcgcttcaaagtgttctcttccagataccacttcaaagccggatcttttacagatgcttgtggacccaaacgtaacaatgaacaccatatatgtgccgcctttacggaggcccccaggcgatgatttgggcgcgtctatacccgatggcgactactacggaacacgatctcaaatagtgctgcttgtaagtaagaactcatctaaggttacctttattgagagaatactttatagctcagatgaagacgtgagtcactactcagcatctgctccaaaggaagagaaaagatttgaatttgaattgtaa

SEQ ID NO: 1007 - DNA, 636 bp, Saccharomyces pastorianus
atggatctggaaaatttgggtaaaaagttaaaggagttgaaaagaagaagggtggacgcatctctaaagacaaggaagttggcggatagagagatccaggaagccagtgcaaatcgaaaaccaagagtctatagcatggaagatgcaaacgatgaggaattagaaggagaaacaaaaagtgatgataaagacaaagctttccactacactgttcaagaatataatgcatgggaacagaagcagaagcaaaggaagagtggaaagactcaagggactggaagttcatatgaccaactcgcgaaattgagttatgaaaaaaccctaagaaatctcactacacagaatcataagcatgaaaactctgttaacgaaaaggacaataaagattctatgggacagggtaggattgaaaagatacagaaaaacacaataactggtaagataaggattgtagatgacgataaattagtaaataaactggcctctactttggagtctgaatcgaagaagagatatgaggtaagaaagcgccaaatggaaaatgttaaggcaccaactggtgtcgaaagttttataaatgataaaaataaacaatttaatgaaaaattgggtagggaatcaaggggttcggagtaa

SEQ ID NO: 1008 - DNA, 2562 bp, Saccharomyces pastorianus
  modified_base (319)..(319): a, c, g, t, unknown, or other
atgctattcaataccaaccgtcaggaagacgaccccttcacgcaattgatcaatcagtcatccgcgaatgcgcaaaaccagcaagcacaacagcaggaaaagccccaccagttcttgcagaatgttgtctctaatgagcctaaaggcaaggaagactgggtctcgccattcagacaacgtgccttaagcggcaaccagaacaacaggttgtatgtgcacgatgcaaagaacagaaaatttcccactgttagtgccacttctacctattcaaagaaacagcctcaagatctgggctacaaaaacatcccaaatgacgttnaaagagctaaggacattaaatttccaacttatttaaccaagaacgaagaaagacaatatcagctgttaacagaattggaattgaaagagaaacatttgaagtatttgaagaaatgtcaaaaaattacagacttaacgggggatggaaatgatgacacctccagtaccacatcttcctcttcgtcagtatcttcttcagaagacgaggatactgcttctgctatcgtacctgcagacaatgaaactacgactacggctactactacgactacggctgcctccgcagatagtgccgatgaagccacttctatagaagaagaacagaatgaaaacgcaagcgaggttacgcccactgaaaagacaaccactgacaacgaaaaggaaattccggaaccggagactgtcaaaggtgaacagaacttggcagaacctgctgtggcagaacctgctgtggcagaacctgctgtgacagaacctgctgtgacagaacctgctgtgacagaacctgctgtgatagaacctgctgtgacagaacctgctgtgacagaaaccacagctgccattgcccaaagtgatgtaccggaattagccgttacagccgaaagtgataatgctccagaatcagcagctgtagccgcaagcgatgatgtctcagaagtagcagtcgccccaatagaagagccaaaggtggaaacatctgtcgtaaagagggatatcgttaccgaggaaggaaagggagaactagcagacgctgaagcagaaactgaacaatcatcagaagatgagcacggcggggaaacgtctactcctgaaacctcagaagcagaatctgatggggacaatacaccgattgacccaagcaaagctccaaaagtcccatttcaggaccgtccgcaaaaggaaagaaccggcttttttgccctatggaaaagtcctacttcttcttctgctaagaagggtactgctacggctcctttgaatccagtggccactccagaaaaccctgaattaattgtaaagacgaaagaacatgactatttatcaaaggctgtttatgataaaattaattatgatgaaaaggtccaccaagcatggctggttgatttaagagccaaggaaaaggccaaatatgatgccaaaaataatgaatacaaggaaaaattacaagatttacaaaacaaaattgacgaaatcgaaaattcaatgaaacaattgagagaagaaacctctaaaaagattgaagtcaacaaaaacagattggttaaacaaatcattgacattaacaccgagcataacaataaaaaactaatgatatttaaagatacggaaaatatgaaaacacaaaaaatagaagaaaagaatgaagttttaagcaggcaaaccaatgtcaaatctgaaatcgatgagttaaatagtgaaaaaattaacgttcaaaaggagttcaatgattggactacaaatctgagtaatttatctcaacaactggatgctcaaattttcaagatcaatcaaattaatttgaagcaaagcaaagctcaaaacgaaatcgataatttggagaaggaaaagaacgatttaattactcaaactgaggaaaataaaaagttgcatgaaaagaatcaagaagtcttggaaagtgtggaaaacaaggaatacttaccacaaatcaatgatatcgacgctcaaatttccaccctattgaaccaaatgaccataattaggcaggaaaacgccaatgaaaggactcatttatcggcaatcaccaaaaaacttgaagatgaacgccgtgctcatgaagaacaattgaagttggaggctgaagaaagaaaacgtaaagaagagaacctgttggaaaagcaacgtcaagagttagaagaacaggctcaccaggctcaactagaacatgaagagcagatcacgcaggtcaaaaaaacctacaatgatcaattaaccgagttacaagacaaattagcagctgaagaagaagaattggaagcagttaaaagagaaagaacaaggctgcaaggtgaaaaagccatcgaagaacaaacccgtcaaaaaaatgctgatgacgctctgaaacaaacgattttggataagcaacacaaacaagctgaaggcttacatgcggccgaaaatcatgttaaaacaccatccaatcacttacaagagagcaagcacgccattccaaagaatgactcgatgtatgaatatcatactgaagaagatgttatgtatgcctga

SEQ ID NO: 1009 - DNA, 864 bp, Saccharomyces pastorianus
atgtctaatccaagcaggttcatcgacatcatcaccaaggtggcgttacccattggtattgttgccagtgggcttcaatactccatgtatgatgtgaaaggtggttctcgtggtgttatctttgacagaatcaatggtgttaagcaacaggttgtgggtgaaggtacccattttctggtgccttggctacaaaaggcgattatatacgatgtgagaacaaaaccaaagagtattgccacgaacactggtactagagatttacaaatggtgtccttgacgttaagagtcttgcacagaccagaggttttacaactgccttccatatatcaaaatttgggccttgattatgatgagagagtgttaccatcaattggtaacgaagtgttaaagtctatagtagcacagtttgatgcagccgagttgattactcaaagagagattatttctcaaaagatcagaaaggagctctctacgagagccaacgaatttggtatcaagttggaagatgtctcaattacccatatgacgtttggccccgaatttactaaagccgttgaacaaaagcaaattgcacaacaagatgctgaaagggcaaagttcatcgttgaaaaggcggagcaagaaagacaagcctcagttattagagcagaaggtgaagcagaaagtgctgaatacatttcaaaagctttggctaaagtgggtgatggtttgttattgattagaagattagaagcctccaaggacattgcccaaactctggccaattccagtagtgttatctatttaccaagtcaacacgccggtagtagtaacagcgaatcttcaggatctcccaactccttgcttttaaatattggtcgttaa

SEQ ID NO: 1010 - DNA, 777 bp, Saccharomyces pastorianus
atgggttccagaagatacgattccaggacaacaattttttcccctgagggacgtctataccaagttgaatatgctctagagtccatttcacatgccggtaccgcaattgggatcatggcatctgacgggattgttcttgctgcggagcgtaaagtcacaagtactttgttggagcaagacacttccacggaaaaactatacaagcttaatgataaaattgctgtcgctgttgctgggttaactgcagatgctgaaattctgataaatacagctagagttcacgctcaaaactacctaaaaagctacaacgaagacatacctgtggagattttagtaagaagattgagtgatataaaacaaggttacacgcaacatggtggattaagaccattcggtgtatcatttatctatgctggccatgatgatagatacggttaccaactgtatacttccaatccatcgggtaactatacaggctggaaggctatcagtgttggtgctaacacttcagcagcacaaacactacttcaaatggattacaaggatgatatgaaggtggatgatgcaattgacttggctttgaaaacgttatccaaaactaccgacagtagcgcgttgacatacgacaggttagagtttgccactattagaaagggcgtcaatgatggagaagtgtatcagaagatttttaagcctcaagaaataaaggatctactggtgaagaccggcatcaccaagaaggatgaggatgaagaagcagacgaagaaatgaaataa

SEQ ID NO: 1011 - DNA, 774 bp, Saccharomyces pastorianus
atgtctgcatcactaataaatcgttcattgaagagtataaggaatgaattggactttttaaaggagtccgaagttatatcagacgacatcttcgatttgatcaatagtaagctacctgaaaaatgggacggaaactcggggacattccacaacgcatccgtagaagagtgtgccgaagccttatatgattttgaagctcaacaagaaggcgaccttcctttgaaagcaggtgataaaattcaaattttagagaagatctcccctaattggtatagaggcaaagcgaacaatagggtgggtatatttcctgcaaactatgtaaaacctgcatttgcaagatcagcttcacctgatactgagggaagtagcttaagctctaaaatatctcgtcctagtgcgccgcctccatcttatggaccagtagtctcatcatactcttcacagcaagccccagcatcttacgctcctccaatgggttacgtccaagcaccacctcctcaacaacagcaagctcctttaccctttcctccatcttttactaattactaccaacagccacaacaacagtatgcaccacctccacaagcaccagtgcaaccaccagtgcaaccaccagtgcaaccacagcagccacagcagccacagcagccacaacaacaccaaagtagcggggctagtagtgcattcaaaagttttggtagcaagttaggaaatgctgctatatttggcgctggttctactatcggtagtgatatcgttaatagcattttttaa

SEQ ID NO: 1012 - DNA, 2325 bp, Saccharomyces pastorianus
atgtctgttcgaaaccttaccaataatcgtaattccaacagtaggaatagtattgcagaaagtgaaaattccttctattcctcgaacggtcaatcaagggaaagctcgtcagtggaccccacagacgatcgccatgttagtggaagcggtaacccttttcttggaagtgaagagttcgatgaagactatatcccgcccagtgaggatgagcagaacaaagcacgtgaatattccacttcttcatctgtgaactacaataatgacccgaacagcgatacctctctgcttgctagtgaaaaacattctcctgtaaggaatgatcgaagaatgtctgactataaaggttattacgccaagaataatttaacgtccgctaataacttcaacaatcacaacagcaatgacaataacaatagcaacaataataatatcataagcagtagtaacgaaaatagctttgcatcacatttacaactgccggacagacacttgccgtctcatccatcctccaataacatgagtacgttttccaataatagccttatcaagtccccaccaccttttgataggtacccattagtaggcacgaggcatactccaatggcacaatctcaatcacaaaaccttatcaatgaaaagaaaagagcgaatatgactggctcatcttcttctgctcatgactcttcgttatcttccactaatttattcttgggtgaacaagatttttcaccctttggtggttatccagcatcattttttccgttgactttagatgagaaagaagatgacgactatattcacaatccaaatgatgaggaagaagcaagactagataaaagacgatttattgaagattttaaacatatggacagaagatccttcctcggtcttttaggtatcctattcttgtttatggctgctgtagtcgtattcattgttttacctgccattacattttctggggttgtgtaccacgaccatcatcatccagcgaatacgaacaatacctcatcttcaaatagcacgtcaaagttgttgacagagtaccaatatcctaaacttgctgccatcagaacaactctggttgatccagatacacccgatagtgccagcaaaagagaggccaaagacggatccaaatgggagttagtcttttccgatgaatttaatgctgatggtagaacattttacgatggtgatgatcaattttggacagctcctgacattcactacgatgccactaaggatcttgaatggtattcaccagatgccgttacaacttccaacggtactttgacactgagaatggatgcattcaaaaatcacggcctttactacagatctggtatggtgcaaagttggaataaaatgtgtttcactgaaggcgctttggaaatttctgccaatctacccaactatggtcgtatttcagggctgtggcctggtatgtggaccatgggaaatttgggtagaccaggttatttggccagcactcagggcgtttggccttattcttatgaagcatgtgatggtggtataacaccgaatcaaagttctcctgatggtatttcttttctgccgggtcagaagctaagtgtctgtacttgtgatgatgaagatcaccccaatcaaggtgttggtaggggagcaccagaaatcgatattttagaaggtgaagctgacacgattttaggtgttggtgtggcatctcaatctttgcaaatcgctccgtttgatatttggtatatgccggattatgatttcattgaggtctacaatttcacaacaacaacgatgaacacatatgctggtggtccctttcaacaagccgtctctgcgatttctactttaaatgttagctggtacgaattcggagaggaggccggctatttccaaaaatacgctattgaatatctcaatgatgacgatgatggttatattcgttggtttgtcggagaaaatccaaccttcactctttattcaacctctttacatcctaatggtaatattgactggagaagaattagcaaagaaccaatgtcggccgttatgaatctgggtatctctaataattgggcctatattgattggcaatacttatttttcccggttacaatgtcaatagactacgtcagattgtatcagcctaaaggctctaactcgattacttgcgatccagaagactatccaacatatgattacatacaggatcatttagctgcttattataaccccaatttgacaacttgggagcaggctggatatactttcccgaagaatatcttgacgggagattgtaaaagttcgaaattttcattgtcgtga

SEQ ID NO: 1013 - DNA, 2127 bp, Saccharomyces pastorianus
atggttttgaagtctacatctgccaacgatgtatcagtgtatcaagtctccggtacaaacgtttcgagatcattacctgactggattgctaaaaagcgtaagagacaattgaaaaatgatttagaatatcaaaacagagtggaattaatccaagattttgaatttagcgaagcttctaataaaatcaaggtaagtatggatggacaatattgtatggctactggtacatacaaaccccaaattcacgtttatgacttcgccaatttatcgctaaaatttgatagacatacagatgccgaaaatgtcgatttcaccatcctttctgatgattggaccaaaagtgcacatttacagaatgacagaagtattcaatttcaaaacaaaggtgggctacattataccacaagaattcctaaatttggaagaagtttagtctacaacaatgtgaattgtgaactatatgttggtgccagcggtaacgaactatacagattgaatttagaaaaaggtagatttttgaatcccttcaaactagataccgagggtgtcaaccatgtttctatcaatcaagtgaacgggttattggcggcaggaacagaaaagaatgtggtagaattttgggatccaaggtcacgttctcgtgtttccaaactgtacttagaaaacagtattgataataaaccatttcaagttactacaaccagtttccgtaatgatgggttgaattttgcttgtggtacatcaaacggttattcgtacctctacgatctacgtacatccgagccctccatgataaaggaccaaggttatggctttgatattaaaaaaatcatttggttggacgatgttggcacggagaataagattgtaacatgtgacaggagaatcgccaagatatgggatagactcgacggcaaagcatatgcctctatggagccaagtgttgatatcaatgatattgaacatgttccaggtacaggtatgtttttcacagctaatgaaagtattccaatgcacacatattatataccaagtttgggaccatctccacgttggtgctcattcttggattctatcacagaagaattggaagaaaaaccaagcgacacagtttactccaattacaggttcattacaagagatgatgtcaagaagttgaacttaacacatttggtggggtccagtgtattaagagcatacatgcatggtttctttatcaacactgaactttacgataaggtttcattaattgctaatccagatgcatacaaagatgaaagggaaagagaaattagacgtagaattgaaaaagaaagagaatccagaattagaagctcaggtgctgttcaaaaacctaaagtcaaagtcaacaagacattggttgataaattatctcaaaaacgtggtgataaagtcgccggtaaggttcttacggatgatcgtttcaaagaaatttttgaggacgagcagtttcaagttgatgaagatgattatgatttcaagcaattgaacccagtaaaatctatcaaagaaacagaagaaggtgctgctaaacgtatcagagccttgactgctgccgaagaatctgatgaggaaagaatcgctatgaaggacagcaggggtcactatgactacgaagatgaggaatctgacgaagatgaagaatctgatgatgaagaaaagaagaatgtggataaggaagaattgagtgaaaaggatttgagaaagatagaaaagcaaagagcactaatcgtacgtagaaagaaagaaaaggaacaaagtgaacgatttatgaatgaaatgaaagcaggtccttccgtgggaacgcaagagggcgaaggtgctcatgttacattcggtgaacaagtcggagaattacacgaagaggaagatgggaagaagtctaaggaatctatcttacatcgtaatcatcgtggtgaagcagaacttacgtttgttccccaaagaaagagcaaaaaggatagacacagtaaaaccaaacgtcctgaaaattcatcggacgaagaaaatgttgatgaggacggtaataagaaggacaacggtagatcaagagctagatttgaaaatagaagaagggctagtaaaaacgtgttccgtggcatgtaa

SEQ ID NO: 1014 - DNA, 639 bp, Saccharomyces pastorianus
atgagcaccgcattcaacgattactgcactgtttgtgatcgtcttattccttcatctccacagaaaacaaacaatagcaataagaaaatccaaagggacaatgaaaccaagaacaattcgcagtcggataaactgtattgctccgaagattgtaagctcaaggactcaaaccctttaaatgagaagctattgtctcacctacataagaagataaaggcttctcattcgcaagatctcacccctccgttttcatattccaaaaatataactgcatcaaaccttttcgagccggccacttcattatcttcttctccatcgtcatcaactattccctttgacgaattggataagttagattctttgctcatttccccattgctgctgccccaagatggtgtcgcaaacgctaaaaaggaattccattccactcacgtcaacggctacgacgatactaatgaacactatttgaacctaaccgactgtctcaaactcgactccggctaccaattgcattcaaaggcacacttgggctacgaaaatgatttaccaaggtcaaacgataccaatgacaatagtttgatctcggatcaaatcattgaaaacaactacaacctatggtttagactatcttctagttag

SEQ ID NO: 1015 - DNA, 870 bp, Saccharomyces pastorianus
atgatggtgcctagaaataatccgctactagttttcaataggctattccttcgatgccggggtgtgagttcaccaatgcagagaaacttatgtcagataccacacaggaacctcagtttttcccgtacaccattaggagagaaccctttactacgatctgcgaccaatatttcgttggtgcggaacaaaaggttctacagcggtggggggaagaataacgagtttaaggaagatgaaactaaaagtgaagaaagaaagaaagatgaaccgcgcggtatcaaagggttgatggcaaaatacggttattctgcattgatcgtatatatcctgttaacatgtattgatttgcccctatgtttcttaggagtccattcactaggtgaggaaaaaatcaagatatatctgaatagaggtaagcagctaattgggatggacgggtcagatgaaagcaaagtgatcgaagaagtgaggaagaagcaagcccgccgcgaagccatccaggcgaaaaacgccaatgatgtagaggacgcgtcgaagaagacgctcaatgaaagatggcaagagatgaaggacagcacgctgttagcagaactgctgatcgcgtacggtgtacacaagagtttaatcatcgtaagagtgcccctgacggcactgctaacaccatccttcgttagattcttgcagaagtttggcatcgacctaatgaagaagcagaagaaagcattccaaatgatggcctcggaagctaaattaaggtacaaggggaacaaccctagcgatttcataaagaacgagagcacaagcgcactggaaattacgaggcgcaaaccgaaaactaagggccagaaatggttcaatggcctaatgtaa

SEQ ID NO: 1016 - DNA, 468 bp, Saccharomyces pastorianus
atgaaggttgaaatcgattccttttcaggtaacagaatctacccaggtagaggtactttgtttgtccgtggtgactccaagatcttcagattccaaaactccaaatctgcttctttgttcaagcaaagaaagaacccaagaagaattgcttggactgtcttgttcagaaagcaccacaagaaaggtatcactgaagaagttgccaagaagagatctagaaagaccgtcaaggcccaaagaccaatcactggtgcttctttggacttgatcaaggaaagaagagctttgaagccagaagttagaaaggctaacagagacgaaaaattgaaggctgacaaggaaaagaagaaggctgacaaggctgccagaaaggctgaaaaggctaagtctgttggtactcaaggttccaaattctccaagcaacaagccaagggtgccttccaaaaggtcgctgccacttcccgttaa

SEQ ID NO: 1017 - DNA, 819 bp, Saccharomyces pastorianus
atgagagactacaaattggtggtattaggtgcaggtggtgttggtaaatcctgtttgactgtacaatttgtacaaggagtttatttggatacgtatgatccaacaatcgaagattcctacaggaagaacatcgagatcgataataaagttttcgatctggaaatcctagacacagcagggattgcgcaattcacagcgatgcgagaactgtatataaaatcaggaatgggtttcctcttggtgtattcagtaacggaccgacaatctttagaagaactgatggaattaagagaacaagttttgagaatcaaagattccgaccgtgttccaatggtcctaataggtaataaagccgatctaaacaatgaaagggtaataagcgtagaagagggaattgaagtaagcagtaaatggggcagagtcccattttatgaaaccagcgctttattgagaagtaatgtcgacgaagtgtttgtggatctggtgagacaaatcattcggaatgaaatggaaagtgttgccattaaagacgcaagaaatcaaagccaacagtttgatatgaaccagtcttcatcgtctaggcttcctagctctgcaaaaaaagatacaaagcaatcaaaaaataaacaatcatccagagatttatataataagtcatcacatggccaagccaagacaaaaaaatctacatcagttaatgaaaagcgtaaaccatcacacccagcttctaaacccggggttaccaacagaacagattctaactcatctttacagcaaaaaatgaagaaaaagaagaactcatcatgcagtattttgtaa

SEQ ID NO: 1018 - DNA, 1524 bp, Saccharomyces pastorianus
atgactaaatctgaacagcaaactgattcgagacatgacgttatcgacttggtcggtaacaccccattgattgcactaagaaaattgccaaaggccctaggcatcagaccacaaatctatgctaagcttgaattatacaacccaggtggttccatcaaggacagaatcgctaagtcgatggttgaagaagcagaagcttccggcagaattcatccttccagatctactctgatcgaacctacctctggtaacaccggtattggtctggctttggtcggtgcaatcaagggttacagaactatcatcaccttgcctgaaaagatgtccaacgaaaaagtttctgttttgaaggcccttggcgctgaaatcatcagaactccaactgccgctgcctgggactctccagaatcccatatcggtgttgctaagaaattggagaaggaaattccaggcgctgttatcctagaccaatataacaacaagatgaacccagaggctcattacttcggtacaggtcgtgaaattcaaagacaactacaagacttaaaccttttcgacaatctacgtgctgtcgttgccggtgccggtactggtggtaccatcactggtattgctaaatacttgaaagaacaagacgagaaaattcaaatcgtgggtgctgatccactcggatccattttggctgtacctgaaaatctaaataagactgacgtcactgattataaagtcgaaggtattggttacgatttcattcccgatgtcttgaatagagatttgattgacgtctggtataagaccgacgataagccatctttcaaatacgccagacaattaatttctaacgaaggtgtcttggtgggtggttcctccggttccgctttcgctgcggtcatcaattactgtgaagaccatcctgaattaactgaagacgacgtcattgtcgccattttcccagattccgttagatcgtatctaaccaagtttgttgacgacgagtggttaaagaagaacgatttgtgggatgatgaaatcttgacccgtttcgatacatctaagctggaaacttctaccaacacatacgccgatgtcttcggtgacgctactgtaaaagatctacatttgaaacctgtcgtttccgtcaaggagactgccaaggtggccgatgtcatcaagattttgaaagacaatggctttgaccaattgcctgtattggccgaagacggcaagttgtccggtttagttactctatctgagttgcttaagaaactatctatcaacaacgctgctagcgacaacactataaagggtaagtacttggacttcaagaaattaaacaatttcaacgatgtttcctcttacaacgacaacaaatctggtaagaagaagttcatcagctttcatgaaaactctaagttgggtgacttgaaccgtttctttgaaaaaaactcctctgctgttatcactgacggcttgaagccaatccatattgttactaagatggatctactaagttacttagcataa

SEQ ID NO: 1019 - DNA, 1284 bp, Saccharomyces pastorianus
atgacggatcccagaagaagaacaggtcgtcacttcttgacaccagaaaatttatcgtctacgatacagatcacaagcttacccccagaatggaaccaagatataattacatcggtcgtggcaggttctggtccaattatagatataaaacctaagaatgatccgagaactggtaaacttaccggtgtgctgttcgactatctgactagtaaagactgtaaacgtgcttgggaaactttaaatagaattgaaaattttcccgtaaagatagaacaaataattccttcaaactataaagagcatcttaaagaagcagcaagtaataataataatatcaataatattaatagtcaaaagcaagtgttacagcttaatagagactcttatccctttgaagcgggattagaattgccattcgaaatggtgacagaggtccctattcctaggcgaccaccaccaccgcaagctttgaacaataccaattccgcttcaaacaacacaaatattcaatttcctgatatattaagtaaagcatccaaacacttgccaactttccaagatggctcaattactgctccagataaaatttcgcaaaatttaagtaaaattccgccattacaacttattgaaatcatatcaaatttgaaaatcctatctaatcaagagaatatccagaaatcgcaattggaatccttcttgaacaccaacaacgatatcaccatatctgtgacacaagccctattggaaatggggttcatagattacagcgtggtaacaaaagtgttgaagtctcaaactagtgaggttccatcgatgctttcaagtaacaatacaagcaattcaaacacccctatgggcggaatcagaaacaatactccgctgcacgtttcgtccaatgacgtcaataaccacgccaacaatatgccagtgaacatgggtatatcaatgcccatggcaacacctccatttattcctccccctttacaacagcagccgtttggctttatgccaccaggaccgttcatgcctccaactcaaggctctgtgcccatgaaccaaccctcgttggttcagcaacaaagtataaacactgcagaagcgccatccggagcaagcaaggatagttccaatggaaccatcaatattgcgaaactgcagctgctacccgaaaaccaacaagacatgatcaaacaagttcttactttgacgcctgtccagatccaaagtttaccaagtgaccagcaacttatggtggaaaactttagaaaggaatatatactctaa

SEQ ID NO: 1020 - DNA, 1158 bp, Saccharomyces pastorianus
atggctaagactactaaagtaaaaggtaacaagaaggaagctaaggcttccaagcagaccaaggaagaaaaggctgccgcagtctcttcctcttccgcttcatcctcctcatcttcatcttcagaatctgaatccgattcatcttcatcctcttctgacagtgaaagtgaaactgaaaccaagaaggaaaccaaggatgcctcctcttctgaatcttcttccgacgaagaagaaagtaagaaagaagaatctaaagaatcttccagctctgattcctcttctgacgaagaagaagaatctaacgacaagaagcgtaaatctgtagacgctgaagaagaagaagaagaagaatccaacaagaagcaaaagaacgaagaatctcaagaacctgccactatcttcgtcggtagactatcatggtccatcgatgatgaatggttaaagaaggaattcgaacccgtcggtggtgtcatcagcgctagagttatctacgaaagaggtaccgacagatctcgtggttacggttacgttgacttcgaaaaccaatcttatgctgaaaaggccattaaagaaatgcaaggtaaagaaatcgatggtagaccaattaactgtgacatttccacaagtaagccagccggtaacaacaacaacaacgatcgtgccaagaagttcggtgacactccatctgaaccatctgacactttattcttgggtaacttgtccttcaatgctgacagagatactattttcgaaatgttcgctaagcacggtgaagttgtttccgttcgtattccaacacatccagaaaccgaacagccaaagggtttcggttacgttcaatactccagcttggacgacgccaagaaggctctagatgctttgcaaggtgaatacattgacaacagaccagtcagactagactactcttctccaagaccaaacaacgatggtggccgtggtggtagccgtggtttcggtggtcgtggtggtggccgtggtggtaaccgtggtttcggtggctcccgtggcggctcccgtggtggtgctcgtggtggccgtggtggtttcagaccaagtggttccggtgccaacactgctccattaggcagatcaagaaacactgcttctttcgctggttcaaagaaaacatttgattaa

SEQ ID NO: 1021 - DNA, 795 bp, Saccharomyces pastorianus
atgatcgtcactcaaaaaacagtaaatatgaacagagaaccaaaattcaagaaggctgtggccaaaccatcaagagatagacaaacctctgttaccagagccattaggccagtcatggcacgtgatgtgcacagattatcgacgtcatcgtcatccacctcctcctcttcagcatcagggcaaaggaggctttcgagggaagagataataaacgagatggaaaaagaacaagacgctatagtggttagactgcttcgggaaattgaggctttaaaagaggaaaattctagattgaaaaatcaactacaccacccattgccagcaagaagatcatcgccctctttggagagcgaatcggctgttttcgacgatgatgactgcagttacggctacacgttcgacactccaaccctcaagttttcagaggttgcctccaaacgcaccgtgcttcctctaactcccaaggattccatgacacacattgcccaccgccctggaagatcaagccggaatgcttctatgtccagcatgacaaacatctcagacacaatcttccccatagaaactaaaaccaatccaacgcccatatccaagaggaacctttctgccgatctctctcaccatacccacctcccacgctcacttagtggcggcctttctcccagcgactggactgaaacgggcactttgcttcatgatagaagaaggcgttcttccaattacagtatcgatggctcgaactctttgaaggctgatctcatggcgaaaaggtttcaaacagggtcgttgaaataa

SEQ ID NO: 1022 - DNA, 2886 bp, Saccharomyces pastorianus
atgacagacgagactgttcaaccgacacaatccgctccaaggcaggattctgctgcgccaaacgtatcaggcgatgatcagcagcaacagcgtggctataataactacaaccaaggtagtaattacaaccaaaagaagccttacaatagcagcagacctcaccagcaaagaggtggtaagtttggcccaaatagatataatagccgtggcaactatagtggcactggtagttatagaggtgggcacatgggtgccaacgggtccaacagttccaacggttccaacggttccaacgcgccatggaccggctactacaataactaccctgcctattatcaaccacagcaaatgggagccgcaaatgctattcctgtcaacgctgttccagccgatgagaattcctctcctgtcccaaccaagattgagatcactaccaagtctggtgaacatttggatttaaaggagcaatataaagctaaactgcagtctaaggaaggatctaccacacctgcacaatcagattctaaaagtgaaaaatcagaagaaacctctgattccactaccactgctactcctactccttccaccactgattctaaagccagtcctgaagaaactatctctgaagctgaaaagacgagaagaaacttcattgaacaagtcagacttcgtaaggctgctttagaaaagaagagaaaggaacagctcgaaggtgccagtaccagcagtaatgttccaaccggaaccacagctgaaaaggttgaagaaaaggcaccaaccacatccaaggaagctgaagaaactaagcctgccgaagagaaacctgccgaaccagaagctaaggaagacaccccagtcgaaggtaagcaagaagaacaaggtcaaaaagaggaagagtctgctccaaagttattgacttttgccgaacgtttgaagttgaagaagcaacagaaggaacaagaagaaaaggatgaagaaaaggaaaacaaagaagaaccagtacaggaagaaagcgagttccctacaaatccttctactgaacacaatacaaaagaaagtgtagtcaccgaaggtgaagagtcaaaggttgaagaatctgccgaaatctctgaggcacctgccgctagctcagccaaccctgcagaggccgatgacgcagcagcagaagcagaagccgatgaagcagaagccgatggcactgaagccaatggtgaaaccgaagtcgctgctgctgaagccgatgacggcacaaataccgtttctcacatactgaacgtattgaaagacgccaaacctattgaagatgtcttttctttcaactatccagagggtattgaaggtccagatatcaagtataaaaaggaacatgtcaaatacacatatggcccaacttttttgcttcaattcaaggagaagctgaacgttaaggcagacgccgaatgggttcaaagcacttcctccaaaattgtcattccaccaggaatgggaagaggaagtaaaccgagagaccctagtagattcggcaacaactctagccgtggcaacgaattcagaaacaactccgtgagaaatatggacgacagagccaattcaagggcttcatcaaagagaaggtcaaagagaacgactgacgacagaagatctaatagatcgtacacatcaagaagagaccgtgaaagaggttcttacagaaatgaagataggagagaagatgacaaaccaaaggaagatgttgctccattggtcccaagtgctaatagatggattccaaaatcaaaggttaagaagactgaaaagaaattggctcctgatggagagaccgaattattagacaaggatgaagttgaaagaaagatgaagtctctactgaataaacttacattagaaatgttcgacaccatttcatctgaaattttagctattgctaacatatctgtatgggaaacaaatggtgaaaccctaaaggctgtgatagaacaaattttcttaaaggcttgtgacgaaccccattggtcttctatgtatgctcagttatgtggtaaggttgttaaagaattaaatccagacatttcagacgaaactaatgaaggcaagaccggtccaaaattggtcttacattacttggttgctagatgtcatgcagaattcgacaagggttggaccgataaattaccaacaaaggaagatggtactccattagaacccgagatgatgtctgaagaatattatgccactgcctccgcgaagagaagaggtttaggtttagttcgtttcatcggtttcttgtaccgtttgaacttattaaccggtaagatgatgttcgaatgtttccgtagattgatgaaggatttgactgactctccatccgaagaaaccctagagtcagttgttgaattgttgaatactgttggtgaacaattcgaaacggatagtttcagaacaggccaagccacattggaaggttcccaattactcgatagtttattcggtatattagacaatataatcgaaactgctgagatttctagtagaatcaaatttaaattgattgacattaaggaattgagacacgacaaaaactggaatagcgacaagaaagacaatggtccaaagactatccaacaaattcatgaagaagaagagagacaacgtcaactaaagagcaactcaagatcgaattcgagacgtacgaataattctagcaatagacattcttacagaagagacgcccctcctgcattaaaggatagctttattacaaccagaacatattctcaaagaaacactcaaagggctccacctccaaaagaagaaccctctgcaccaacttccactgccacaaatatgtttagtgcattaatgggcgaaagtgatgacgaagaataa

SEQ ID NO: 1023 - DNA, 1215 bp, Saccharomyces pastorianus
atgacaactttaaaaatgattgaagtgtatacgcaaaatggactacgaaaagtacgaccctactataacacgagatcagcgtttgtaaagggacgctggttggggaggcctttgatagacgtccttgctagtgaatttaagctgcgttcaagggattatcatcttgggcagatacagaaaggcacatataggctgattcgagatggcgagccgttgatagccagtcagcttatatccacagttattaagaatcatgatattttagaaacaacaactcataagcatgagccgccagtaaaacaatggtgtagccaggcagctgaatctgatgattcggccaggacgatagcgggattcaaaactgtttttgaagatgagaacatcttggtcatcgataaacccaatggtatacctgtgcaccccactggccagtttttccagaatacaataactgaagtactaaaatctcacggtgtagatgcttttccatgctaccgactggacaagatcacatcaggtttgttgatactggctaagaatagcctgagcgcaggagaaattcagaagaatattcgcgcaaggaatatggataaatactacttggcaagagttaaagggaaatttgcccattccgactcggtactgaacggcgaatttgcaatgaatactctttttgacgacattgctaatactacgatagagaagtcgcccatatattccatcgatccaaagagacaattcccggtcggtttatcggcgtcgaaggatgctattaccaaattctacccgataaggtacattccccacgccgatgaaagtgttgtagcttgcaagccaatcactggaaggacgcaccaaatccggatccatttagccaggcttggtcatcccatagtcaacgataatgtatattgttcacagattaccaagtatcctgaaaggctaaattttatcattcaagttctcaaatgggaggatcatccgggactggataccgacaaattgagagtgagttttcaaaaaattattgaagaaacgaaaagtaattgtcagactatgaaatcatcgtgttcagaatgcgatgtcatcgaattaaaagacccattgctgtcagacttagaattatggctgcacgcttggaagtatgaggacgctgaaggcaagttcaagtttgaaacagaactaccaaactgggcgcaaataatcaatagttag

SEQ ID NO: 1024 - DNA, 279 bp, Saccharomyces pastorianus
atggggaaacgcttttcggaatccgctgctaagaaagcagctggtatggcaaggaaaagagaccaagctcgtattaagcagagagaagaaattgaaaagctagaagcagaggaggcttctaagtgggagcaaggctcgaaaaaagaaaactctagaaaacaagaagaagaacagaaaaagcaagaaaaattaagggccaagaaagagcgtgaagcgttactagctgcagaggaagaagaattgggcaagggtggcaagggcaagagaaagaccaagtaa

SEQ ID NO: 1025 - DNA, 3432 bp, Saccharomyces pastorianus
atgaggatcatcaaaagtagaaaacgaggcaaaaataagaaaccatcgttgatcttaaaaattcatgtcattcaagcggagaatatagacgctatcaagactttcaattgtaaccccgtatgctttgttaccaccaacacattttatagtcagaagactagcaagctgaagaactcaaatacacactggaaccaaacgttaaagatcaagcttccgagaagtccgaaatctgagtggctgaggattatagtatatgacgctttgccaacgggtaccgctccaacgacccctaacagatcaaggacgactacagcgaatacttccacaaccacgctgtcgaattctggacaaaattcccactctcactcatccagaaatttagccctaacgtccaaaagtaaccaaacttccacatccatcaattcagcatcgaccacaaccgcgactgtcgcttccaattccgcttcatctctatctacatcaaactccggctcgacacacaagactaagacgagtagctacttgtacctaggtgaggcaaaaatctcattgcttgatctatttaaaagaagggatactacaacgagctataagttttcgatcgaacctcaatggtaccatctgtacgatatgaaaagaggaaatcagcagaatcaatcgagctctgattgtttcgtgggtgatattttgcttgggtttaagttggaatgtaatttgaaaaaaattccaacatttcaggcttttaatagctggaggaatgaattaaatgattattggggcaaaatggatagaaataaagcccgtatgagatcttctagttctttaccgcctccactagaagacacaccgagtaatagttcaggctttagcgaacaagagatatcacgtaagaaagcatacagtgatgacgaactagtccatgaagaagaagatgaagaagaagaggccgatgctgaagatgatattgatgacgaggattttatagaagatgaaaacagtagcgacaatatatctatagaaaggacatatgatatagataacgatactgtatacgattcaatgtccgaagttgcctcgctaaatgatgaaggactagaaattttgaacgatttcgaagatgtggataatcctagcatggcagatactagcgtgcatgacatcgaagaggagacatgtatgagtttatcttcgatgataacggcgctagatgaatatgacgtcgtagaaccagaagatgttaggcgattcccagtagtatcggaaaatgagataacatcgatggatgatgatgaatctgaaaaccaacgggggagtgatgaagaattcgacatatataatgaagacaaaaacgaggatacagattctcggtccaacgaatacgttggaagtcgacttttacatttacaaagaggaaaacgtaacagatcctatgcgagttacttacacagaagagcgaaaagtaacttcttcatatccaaaaaagagcacgccaccggggttgtatttatgcatatagaagctatcaagaatttgcccgctttaagaaatagattatctaagaccaattatgagatggatccatttgttgtcatttcatttggtaggagagtatttaaaacgtcctggagaaagcatactttgaacccggagttcaatgaatatgctgccttcgaagtattccctcacgaaacgaattttgctttcaatattaaagttgttgacaaggactcattttcgtttaatgatgacgttgcaaaatgcgaacttgcctggtttgatatgttgcaacaacaacaacatcaaaacgaatggataccttatgaaatacccttggatcttacagtggaaccgccacacgcgcccaaacaagcaacgttatactcgcacttcaaatatgtttcctatacttctttgaaaaacaacttttggaaagaagccgttaacacatcaatcactttagaaaggctcgatatcgttcaagtgatgctttatctcgaacgtcttggttcatttgcgatgactgattcttttgaactattccagcattttgataaactagtttgggcgggagagaccatcactagatctcaattggttgaagggttacaaacatggaggaaatccaccaattttaggcgtatttggacatgccctaggtgctttcgttcatgcaaacctaccagaaatgctagacgatccaaattagttctggaaaatgacttgataacacatttcgctatatgcacattttcaaaaaaacacaaaactttgaaaccttcatacgtttcctctgcatttgcttccaaaagatggttttcaaaaattctaataaaattaacctatggtaagtatgctctaggatctaacaacgcaaatattctggtacaagaccgtgacacggggataatcatagaggagaaaataagcgcacatgtcaagttagggatgagaatcatctacaatggcaagagtccagagtccaagaaatttagatccctattgaagacattgtccgttaggcaaggaaaaaaatttgacagcactgcatctgctaaacaaatcgaacctttcgttaaatttcactctctggatctttcgcaatgccgagatagggacttcaagacattcaatgaatttttttatagaaaattgaaaccaggaagtcggtcacctgaaagcaccaacaaagaaatattcttctcaccggctgattcaaggtgtactgtattctcaactatacaggaatcaaaagaaatatggataaagggcagaaaattttccatcaacaaattagccaatggctatagtcccgaaatatttaacgatagtaagtgcagcatcggtatatttagactggcgccacaagattatcataggtttcattcaccatgtaatggtaaaattgggaaacctatatatgtggatggtgaatattatactgtaaacccaatggctgttcgcagcgagttggatgtctttggtgagaacataagagttgtcattcccattgattctcctgagtttggcaaactgttgtatataccaattggtgccatgatggttggatcgatattattgacgtgcaaagaaaacgatgtagttgaaagtgggcaagaactaggatacttcaaattcggtggatccactattgtaattgttatcccacaggacaacttcatgtttgactcagatcttgttaaaaattcttcggagcgtattgaaacgctagttaaagttgggatgagtattggacatacatcgagtgtaaatgagttaaagagaattcgtatcaaagtagatgatccaaagaaaatagaacgaattaaaagaacgatcagtgtaagcgacgaaaacgctagagccgctgggaatgtcacatgggaatatcatacgttgcaggaaatgatgaacaaaagtttggctgagctttga

SEQ ID NO: 1026 - DNA, 1107 bp, Saccharomyces pastorianus
atgggtgttattgacaaaatcaaggctatcgaggaagaaatggccagaacccaaaagaataaggccacagaacatcatctgggtcttttgaagggtaaactggctagatatagacagcagctgctggcagatgaggctggcagtggtggcggtggcggctctggatttgaagtggccaagtcaggtgacgctagagttgtcttgataggctatccttctgttggtaaatcgtccctattgggtaaaatcaccactactaaatcagaaattgctcattacgcgttcacaactttgacctctgttccaggtgtgttgaaatatcaaggtgctgaaatccaaatcgtggatcttccaggtattatttatggtgcttcgcaaggtaaaggccgtggtagacaagttgtagccactgcaagaaccgccgatctagtgttaatggttttggatgccacaaagagtgaacaccagcggacatctttggagaaagaattggaaaacgtggggatcagattaaataaggagaaaccaaacatctactataaaaaaaaggaaactggtggtgtcaaagttacattcacctctcctccaaagaataatttaacggatcaagcaatcaaaatgatcttaagagactatcgtatccataacgcagaagttctcgtaagggacgacgagtgtactattgatgatttcattgatgtcatcaacgaacaacatagaaattatgtcaaatgtctttacgtttataataaaatcgatgcggtatcattagaggaagtagacaaattggccagagaaccgaacaccgttgttatgtcatgtgaaatggatttaggattacaagatgtcgttgaagaaatttggtaccagttgaatttgagccgggtctatacaaagaaaagaggtattagaccagtgttcaatgatcccctagtagtgaggacggattcgaccattggtgatctatgccatggtatccacagagacttcaaggataagttcaaatatgcattggtttggggctcatccgccaagcattctcctcaaaaatgtgggttgaatcacaaaattgatgatgaggatgtagtttctttatttgcgaaatga

SEQ ID NO: 1027 - DNA, 1491 bp, Saccharomyces pastorianus
atgtctgctataaacgttgcgcctgagttaattaatgctgacaacacagtcacgtacgatgccattgtcatcggtgctggtgttatcggtccttgtgttgctactggtttagcaagaaagggtaagaaagtccttatcgttgagcgtgattgggctatgccagacagaatcgttggtgaattgatgcagcctggtggtgtcagggccttgagaagtttgggtatggtacaatccatcaacaacattgaggcatacccagttaccggttacactgttttctatgacggtgaacaggtcgacattccatatccttacaaggccgatattgctaaggttgaaaaattaaaggatttagtcaaagacggtaacgacaaggttttggaggacagcactattcacatcaaggattacgaagatgatgaaagggaaagaggtgttgctttcgttcatggtagattcttgaacaacttaagaagcattactgctcaagaaccaaacgtcactagagtgcaaggtaactgtattgacattttgaaagacgaaaagaacgaggttgtcggtgcaaagattgacattgatggccgtggtaaagtggagttcaaggctcacttgacctttgtttgtgatggtatcttttcccgtttcagaaaggaattgcatccagaccatgtcccaactgtcggttcctccttcgtcggtatgtccctattcaacgctaagaaccctgctcccatgcacggtcacgttatcctcggtagcgaacacatgccaatcttggtttatcaaattagcccagaggaaacaagaattctttgtgcttacaactctccaaaggtcccagccgatatcaagagctggatgattaaggatgttcagcctttcattccaaagagtctacgtccttcctttgacgaagccgtcagccaaggtaaatttagagccatgccaaactcctacttgccagccagacaaaacgatgtcacaggtatgtgtgttatcggtgatgcccttaacatgagacacccattgaccggtggtggtatgactgttggtttgcatgacgttgtcttgttgatcaagaagattggtgaactagacttcagtgaccgtgaaaaggttttggatgaattactagactaccatttcgaaagaaagagttacgactctgttatcaacgttttatcagtcgctttgtactcgttgtttgccgctgatagcgataacttgaaggctcttcaaaagggttgtttcaaatacttccaaagaggtggagactgtgtcaacaagccggttgaatttttgtctggtgtcttaccaaaacctttgttgttaaccagaatcttcttcgccgttgccttctataccatttacttgaacatggaagaacgcggtttcttagggttgccaatggccttattggaagatatcatgatcttaatcacagctattagggtattcactccattcttgtttggtgaattgattggttaa

SEQ ID NO: 1028 - DNA, 2169 bp, Saccharomyces pastorianus
atgaagggaaacttcaggaaaagagacagctctacaaactcaagaaagggtggtaatcctgacaataactacaccaatggaggcggttcaagtaaccaaaataatggctcaatgttctatgagaatgctgaaactaccaaaaatttcaatgaccgccaagattatttactagtcaatagtattggctccaatgtcaccgtgactgtcacttctggtgtgaagtacgacggtttgttagtctcctgtaatttggagtcctccaacggtgttgatgtggtcttgagattccccaaagttgttgatgcaggagtaagtaactctgtagatgacttggccagaactttgggagaaacccttttgattcacggcgaagatgtcgctgagttggaattaaagaacatcgatttgtctcttgatgagaaatgggaaaattccaaaattcaagaggcaacacccgctagagattctgaaaaggaaaaggttaatagcgaattgaatgaaaacggtaagttcagaactgatgttgacatctctcgctctggtaaagaaattaaggagcgtaaattagaaaaatggacacctgaagaaggaaccgaacgtttcgacatcaataagggacaaaccttggaagacgattcaactgcgtgggatcaattcgctgtcaacgaaaaaaaatttggtgtcaagtcgacttttgatgagcatttgtatacgacaaagattaataaggaagatcctaattttgggaaaagattgcaagaggcagaaagaattgccaaggaaattgaatctcaagggccctcaggtaatattcatatcgcagaagacagaggtattaatatcgacgattctggcttagacgaagaagacttatattcaggtgttgatagaaggggcgatgagttgttggctgctttgaaaagtaactcaaaacctaatgcaaacaaggcgagcagatatgttccaccaactttgaggcaacaacctcataatatggatcctgcaattatctcttcaagtaattctaccaacaacgaaactgttgctgctactactgttaccactcctgcagaagcagaagcaacaaaggaaaaagtctctcaaaagtccctcaagagcaagaaaggtttaagtagcaaagaagctcaaatcgaagaattaaagaaattttccgagaaattcaaggttccttacgatataccaaaggatatgccggaagttttgaaaaggtcaaactcgacattgaaatccaattcttcgcttccaccaaaaccaattagcaaaacgccttccgctaagactgtttcgccaactgctcaggtcattgcgggaaaatctgaatctagaaggagtacaagcaacatgtctcaaggtcaatcatctgcggctcacaccaccagatcgagcacttcgtccagaagacgtaaccatggttcatttttcggagcaaagaatccacataccaacgatgccaaaagagcagccttcgggaaaagtttcaacatgttcatcaaatccaaagaagcgcacgatgaaaaacaaagacaacgtaacgcatctgaaagcatggaaccatttttcattgaaaagccttacttcactgcgccaacttggttgaatacgattgaagaatcatacaagatttttttcccagacgagaatacagccatacaagaagcccaaaccaggttccagcaacgccaaatgaattccatgggtcatggcgggcctggaatgaatccaaacataggcatgaacatgggcgggatgatgggcttccccatgggaggtccaaacgcttcaccaaccccgatgatgaatggtttcgccgcaggatccatgggaatgtacatgccattccagcctcaaccaatgttttaccacccatcaatgccgcaaatgatgcctgttatgggaaacaatggagctgaagatggaggagggaacatatcacctcatatgccctcaggtttcatggcaggtggtccgggagcacctatgggtgcatttgggtatcccggtgggatgccatttcaaggaatgatgggatcaggtccatctgggatgccggcaagtggttcggcaattcacagtcatggtcatggtagaaattatcaccaaagcaaccaccatggtcatcgtaacaatagtactagtggccataaatag

SEQ ID NO: 1029 - DNA, 318 bp, Saccharomyces pastorianus
atgggtctatcttctatcttcggtggcggagcaccatctcaacaaaaggacgcagcttcaagtgctaagacttcatcaaacccaatagccattgaactaaagaaccagatcgctcaagagctggccgtggccaatgccactgaactggtgaacaaaatctctgaaaactgctttgaaaaatgcttaacctctccatacacttctagaaatgacccatgcattgaccagtgcttagccaaatatatgagaagttggaacgtcatatcgaaagcttatatttctagaattcaaaacgcctctgcttctggtgaaatctag

SEQ ID NO: 1030 - DNA, 5853 bp, Saccharomyces pastorianus
atgtcgttcaccgataacggtttgggatcgttgaaagctcatatcaggagaactctacgatcgattcacaacctcccctattttaggttcacgagaggccctactgaaagggctgatatgagcagagccctaaaggaatttatctatagatatttgtattttatcatttccaatgatggtgaaaacttatcaactttatttactgctcatcccaagcaaaagtcaagtaatcaggaacttgctgttttccccgaaagtttagaagatgccctcgacgttgacaagataacatctcaagggacctttcccttttacaagatagacgaatctaaaataggtgatgtccacaaacatactggcaggaactgtgggagaaaatttaagattggagaacctctgtatagatgccatgaatgtggctgtgatgacacttgtgtgctttgcatccattgtttcaatccaaaggaccatataaatcatcatgtttgtaccgatatctgttctgaatttactagcggaatttgtgactgtggggatgaggaagcttggaattcttcgctccattgtaaagctgaagaacaaggaaacgatacatcggaagacccaagtaattttgacagtacaaagcaaaaagatgtatggaatgatccagaatgtattgccctagtagaactagttctttccgaagtattcgactatttcattgacgtttttaatcaaaatattgaacctctgcccacaattcaaaaggacatcaccatcaaactaagagaaatgactcaacaaggtaagatgtatgaaagagctcagtttttaaatgatttgaaatatgagaatgattatatgttcgatggaaccacaacggcaaagacaagcccttcgaatagccctgaagcatccccatcgctcgcaaaaattgatcctgaaaactacaccgtaataatctacaacgacgaataccataactattctcaagccacaacggcattgaggcaaggtgtacctgataatgtccatatcgacttgttaacctccagaattgatggagaaggtcgtgcaatgttaaaatgttcgcaagacttatcgtctgtattaggcggatttttcgctgtgcaaacaaacgggttgagtgctactttaacatcatggtcagaataccttcatcaggaagcctgtaagtacatcattctttggatcacacactgcttaaatataccaaacccttcctttcaaattacttttagaaacatgatgggcaagtcgctctgttcggaatatttaaatgctacggaatcccgtgatatgacacccgtggtagagaaatatttcagtacaaaatttgataaggatgacccatatagatatatcgatttatctgtccttgccgagggcaaccaaattcctttgggtcaccataaagttttacctgaatcaagtacccattctctttccacactaataaatgacgtagaaaatctaacatcaaaggaatactctaacacaagattacagcatattttgtattttgataataggtattggaaaagactaagaaaagatattcaaaatgtaattatacctacgttagcgtcatcaactttatacaagccaattttttgtcaacaagtggtagaaatattcaatcatatcacaagatcagtggcatatatggatagagaacctcaactaacagccataagagaatgtgtagttcagctttttacatgccccacgaacaccaggaatatctttgaaaaccaaagtttcctagatattctctggtcaatcatcgatatcttcaaggaattttgcaaagtagaggccggtgttttgatttggcaaagagttcagaaaagtaacctgacaaagagttatagtctatcattcaaacagggtttgtatacagtggaaactttattaagtaaagtaaatgatcctaatattacaataagaccgaaggtatttatatcactgctgactcttggtaagctcttcaacggggcttggaagatcaaacgcaaggaaggtgaacatgttcttcatgaagatcaaaactttatctcttacttggaatacactacttctatttatagtattatccaaactgccgaaaaagtccttgaaaaatcacatgattcccttgatttaaatctagttttgaatgctattagaatagtcagctcgtttttgggtaataggtcgttgacttataaattaatatatgattcacatgagattatcaagtttagcgttagccatgagagagttgcatttatgaatccgatacaaacaatgctttcattccttattgaaaaagtttccttaaaagatgcatacgaatctttagagaattgtccagatttcttgaaaatcgcagatttctctttaagatccgttgttttatgctctcaaattgacgttgggttctgggtcagaaatggtatgtctgttttacatcaagcatcatattataaaaataatcctgagttgggctcctattccagagatatacatttgaaccagttggctattatctgggagcgcgatgatcttccaagagtgatatataacattctcgatagatgggagttactggactggttcatgggtgaggctgagtatcagcacacggtgtacgaagacaagatttcgttcatgattcaacaatttattgcctttatttatcaaattttgactgaaagacaatatttcaagaccttttctttattgagagataggaggatggacatgattaaaaactcaatcatgtacaacctttacatgaagcctctttcatattcgaaattactaaaatcagttcctgattatttaaccgatgacactactgaatttgatgaagcacttgaagaagtttccgtgtttgttgaacctaagggcctggctgacaacggtgttttcaaattgaaagcagccctgtatgcaaaaattgatccattaaagttgctaaatttagaaaacgaatttgaaagcagtgccaccatcattaagacacatttggctaaaaacaaagacgaggtatctaaggttgtactaatacctcaggtttctacaaaattattagacaaaggtgctatgaatttgggtgagttcacaagaaatacggtatttgccaaagtgatttataaattactacaagtatgcctggatatggaggatagcacttttcttaatgaattactgcatttggtccatggtatattcaaagatgacgaactgataaacggcaaggactctataccggaagcttatttggcaaaacccatatgcaacttattattaagtattgcgaatgctaaatcggatatattctccgagagtattgtccgtaaagctgactacttgttggagaagatgataatgaaaaaaccagatgaaatattcgaatcactgatagcaagttttggtaaccaatatatcgataattataaagacaaaaaactaagtcaaggcgttaacttgcaggagactgaaaaggaacgtaagagaagaatggccaaaaaacaccaagcgagacttttggcgaaattcaacaaccaacaaagcaagtttatgaaagagcatgaatctgaatttgacgagcaagataacgatgttgatatggacggcgaaaaagtatatgaatcagaagatttcacctgcgcactttgtcaagattctagttctaccgatttctttgtaatacctgcataccacgaccatactccaatatttagacctggtaatatttttaatcctagggagtttatggccaaatgggacggattttacaatgatgatgacaaacaggcttatattgatgacgaagtcttggagtctttgaaagaaaatggcacccgtggatctaggaaagtgttcgtatcttgcaatcaccatatccatcataactgtttcaaaagatatgtccaaaaaaagaggttttcatcgaacgcatttatatgtcccttgtgccagaccttttcgaactgtactttgcctatttgtccaacttcaagggcaaatactggtttatcccttgacatgttcctgaagtcggaattatctttagacatactttccagattattcaaaccttttactgaagataactatcgtaccataaactccatattttcattgatggtatcgcaatgccaaggttttgataaagtggtaagaaaacatgtcaattttacccataaggacgtttccttggtattaagtgttcattgggcaaatacaatttcaatgctggaagttgcttctaggttagaaaagccacacaatatttcgtttttcagaagcagagagcagaaatacaagactttgaaaaacattctaatttgcatcatgttatttacttttgtcatcggaaaaccaagtatggagtttgaaccatatccagtagaatctgacataatatgtaaccaaaaccagctcttccaatacatcgttcgcaaatctctattctctccagcttctttacgggaaacgattaccgaggcattgactgttttctgtaagcaatttttggatgattttgttcaaggactttctgatgcagaacaagtggataaactgtatactgaagcaaaaaaattaggagatgtttataatgtagacgaaagtatcctcatcacgttaatgagcataaccgttgtaaaaacggaagggttagaatccaggtcaatttatgatttagcctacacttcattgttgaagagcttacttcctacaataagacgatgcttggttatggtcaaagttttgcacgaactggtgaaggattctgaaaatgagacaatggttatcgatggctttgatgttgaggaagaactcgaatttgaaggtctccctgggtttgttgataaagcattgaaactgattactgataaagaatcatttgttgatctctttaaaacgaaacaagcaatcgttccatcacatccatatttggagagaattccctatgagtactgtggtattgtaaagttgatagatctatcaaaatttttgaatacttacgttacgcagtccaaggaaatcaagctgcgcgaagaacggtcccaacatatgaagaatgccgataataggttggatttcaagatatgtttaacatgtggtgtcaaagtgcatttaagagcagaccgtcatgaaatgaccaagcatttaaacaagaattgcttcaagtcgttcggcgcctttcttatgcctaattcaagcgaagtttgtctgcatctgacgcagcctccttccaatatttttgtatctgctccatatctaaattcgcacggtgaggttggtagaaatgcgatgagaaggggtgatttaacgaccctaaacttgaaaagatatgagcacttaaacagattgtggatcaataacgaaattccgggatatatcagtagagtaatgggtgacgaattccgagtgaccatactttctaacggatttttattcgcatttaatagagaaccaagaccaagaagagtgcctccaacagatgaagatgatgaggacatggaagaaggggaagaaggatttttcaccgaagaaaatgatgatatggatgtagacgacgaaactggtcaggcggccaacttattcggcgttggagcagaaggtattggtgatggtggagtacgtaattttttccaatttttcgagaactttagaaacacacttcaacctcagggaaatgatgatgaggacgcacctcaaaacccgccaccaatattacaatttttagggccccagtttgatggagcgactatcataaggaacacgaatcaaagaaatcttgatgaagatgactcttctgagaacgatgattctgatgaacgagagatatggtaa

SEQ ID NO: 1031 - DNA, 1185 bp, Saccharomyces pastorianus
atgtcttcttccgctactgttgaacctaatgaggcgtttgaacttattaccaagaacttgcaagaagtcttgaacccacaaatcatcaaagatgtgcttgaagtacaaaagagacatttgaaattgtactggggtacagcacccaccggtagaccccactgtggctacttcgttcctatgaccaaactagctgacttcttgaaggccggttgtgaggtcaccgtgctcttagctgatttgcacgccttcttggataacatgaaggcacctttggaagtcgtcaattacagagccaaatactacgaattcaccatcaaagctatcttgagaagcatcaacgttccaatcgaaaaactaaagtttgtcgtgggttcttcctaccagttgacagcagactataccatggacatattcagattgtccaacattgtctcacaaaacgatgcgaagagagctggtgctgatgtcgtcaagcaggtcgctaacccactgttaagcgggttgatctatcccttgatgcaagcattagatgaacatttccttgacgtagactgtcagttcggtggtgtcgaccaaagaaaaatttttgtcttggctgaggaaaacttgccaagtctgggctacaagaagagggcacatctaatgaatcccatggttccgggactgactcaaggtggtaagatgtctgcatctgatccaaattccaagattgacttattagaagaaccaaaacaagtcaagaagaagatcaatagtgcattttgtagccctggtaacatcgaagacaacgggttgttgtcctttgtagaatacgtcattgcaccaattcaggaattgaagtttggcgcaaaccactttgaatttttcattgatagaccagaaaaattcggtggcccaataaccttcaaagccttgaaagacttaaaattggctttcaaagaagagaaactgtccccacctgatctgaagacaggggttgctgatgccatcaatgagctactggcaccaatcagagaggagttcgccactaacaaagaattccaagaagcctccgagaagggctatccagtcgcagcaccacaaaagaccaagaaggccaagaaaccaaagaacaagggttccaagtacccaggaggcgccaagactgatgaggttgctgccaaattagaagaaaccaagttgtaa

SEQ ID NO: 1032 - DNA, 2196 bp, Saccharomyces pastorianus
atgtctagacggaatccaccacccggtagaaatgggggaggtccgactgatgcatctccattcattaaaagagacagaatgagaagaaatttcttgaggatgagaatgggtcaaaatgggagcagctctagttctcctgggctgccaaatgggaatggcagcagagggtcccttgtcaagaaggatgatcccgagtatgccgaagaaagagaaaagatgcttttgcagattggtgtcgaggccgatactggtagaagcaatgtcaaagtaaaagacgaaagttcaagcgaatataacgaattccccttgagagccattccgaaggaagatttggaaaacatgaggacacatcttttgaagtttcaaagtaaaaaaaagataaaccccgtgacagacttccatttgcctgttagattgcatagaaaggatacaagaaacttacaatttcaactaacaagagcagaaattgttcaaagacaaagggaaatttctgaatataaaaagaaggcagaacaagaaagaggcacccctaactttggtaacaacaatatgaacaaaccggctatgggcccattcaataatgcatccaaggatggttctcaaacgcctgctattgactcagctactaaagacgtgccagacggtatgaattcttctaccactgctgctgcccctactacccctgctcttgctacccctgcttccactatcgaaagtaatgatgtgtcaaacacaccaagcaccgccgttggtggtatagacaatagtaccgcaggagttaatccggttgatggaaaacttttagtgacaaaactggaggacgcaggcccagctgacgacccaactaaagtggggatggtcaagtatgacgggaaagaagtggctaatggaccggaattcgaagaaggtaccatggatccgttggcagatgtggctccagacgggggtggtagagccaaaagaggtaacttaagaaggaaaacacgtcaattgaaagttctcgatgagaatgccaagaaactaaggttcgaggagttttatccatgggtcatggaagatttcgatgggtacaatacatgggtaggttcttatgaagctggtaattcagactcttacgtgctattaagtgtagaggatgatggtagctttactatgatccctgcagataaggtgtataagtttactgcaagaaataaatacgctaccttgactattgatgaagcagaaaaaaggatggataagaaaagtggtgaagtgccacgttggttgatgaagcatttggataatataggtacaactactacaagatatgatagaacaagaagaaagcttaaagcggttgctgaccaacaaaatatggacgaagatgatcgtgatgataattccgaagtggagttggattacgatgaagagtttgccgatgatgaagaggcaccaattatagacggcaacgagcaggaaaacaaggaatcagaacaaaggatcaagaaggaaatgttacaagcgaacgcaatgggtcttcgtgatgaagaagccccatcggataacgaagaagacgaactgttcggggaaaagaaaattgatgaagacggtgaaaggactaagaaggcattacaaaagacagaattggcagcattgtattcttcagacgaggatgagattaacccatacctgtctgaatcggatttggaaaataaagaaaatgaatcgccagttaaaaaagaagaagattcagatagtttatccaaatccaagaagtcatcacctaagaaacagcaaaagaaagcaacgaacgtgcataaagatcctaatttaagagtaaagagtattaaaaactgtgttattattttaaagggggacaaaaaagtactgaaaaacttcccagaaggagaatggaatcctcaagttgcaaatggtacaactatcaatagtagcgagccaaccatggcatcgtcacccatcaaaacagaggttggagcggaatctgtagcagtagaaactccagtgcctctcataacagagcaagatattgttgacgctattggtgatggaaaggtaaacgttaaagcgtttggtaagtccattagaagaaaataccctggtgctgagaacaagaagctaatgtttgccatagtcaaaaaattatgtagaaaagtggacaatgaccgcgagcatatggaattaaaaaaagagtaa

SEQ ID NO: 1033 - DNA, 1203 bp, Saccharomyces pastorianus
atggcgtcccaactagatgaactagtggaatttttacattccccacaacctgccgtgagacaaattgctattgataatttggttggattcagtgcgggcccaacttcaaagattttcaagaatgataacttcagacctattaaggatatcataaagatgattatggaccctgagcatggtacccgtattattattcagcaaggtgttactatcttggtaaacttgtctgaggatagcttggtgagaaatattatattaaataacgataaacagttcctaaagtttttagcttggagaattgttgatttgactaatcctaacgctgatatcatgtgcattttattgagcaatttagcaaaggatgatgatatacttgccattttgaatattagaagaaattctagtggtgaagaaatcgatgatggcttgaagctaacagctttggatacaagcatattcaagagtctgaaagctatggactgtttgatggactgttttgttaaaggtaatgatagaaaattgacaaagttcgctaacttcaactatttagcctatttctttgctgatatttccagatttagattgggtaggatgtatttcattgaagaacaagaatatgatcttgttgtccccatttccaaactgctagtctttactgaaaagtatgatgcaaagattagaagagaaggtgtcgcttctacaataaaaaattctttatttgactcagaaactcatgaaagactactcaaagataaaaatataaatctgttgccgtacattttgttgcctattgctagtgcgaaggattccgaaatcgatgaagaagacatgtttaatttgcctgatgaattacaattattgccagaagacaagcaaagagatcccattcctgccatcatatgctgccacttagaaagtattcttctactgtgtacaacaaatgccgccagagagtatttaagaagcaagtccgtttacccgcttgtaagagagttgcacaaaaatgtagaagatgaggatattggtgaattgtgttatagaattgttaatatgctaatgagaggtgagcctgatgccggtgtcgtagaagaaatgccatcaaaaaatgctgaagatgttgaagacgaaaacgatgaaaatgaagatgaagatcaggatgaagatgaagatgaagacgacgatgaaattgttgaagtggcttag

SEQ ID NO: 1034 - DNA, 1812 bp, Saccharomyces pastorianus
atgcccaagaacccattaaagaaggaatattggacaggtgtggtcgatggattcaagccaagtacttcaacaggctccgaaaatgagaaggactcaagtgcgttcgtaacagaacaaaactccaaaactgattcagcatttccattaagccctaaagactcggctggcgtaaatcaaactacaaacgatgtcacatcatcggaacgcttccgtggtggtgatgacgtacaacaagaagatatcaacaacaccaacttaagcaaagagctatctgtgagacatcttttgaccttagccgtcggtggtgccataggtacaggtttattcgtgaacacaggtgctgctttatccacaggtggcccggccagtttagttattgattgggttattattagtacatgtcttttcactgtgataaactctcttggtgaattgtctgctgcttttccggttgtcggtgggttcaatgtttacagtatgaggtttgttgaaccttcgtttgcgtttgccgttaacttgaattatctggctcaatggttggttctattgccattggaactggtggctgcctctattactattagatactggaatgacaaaatcaactcagatgcctgggttgctatcttttatgctgcaattgccatggctaatatgttggatgttaagtcatttggtgaaactgaattcgtattatcgatgatcaagattttagctattattgggtttaccatcttaggtatcgttctatcctgtggtggtggacctcatggaggctatattggtggcaaatactggaatgacccgggtgcatttgtagggcacgactcagggaccaaattcaagggtttgtgttctgtttttgtcactgctgcattctcttactccggtattgaaatgacagccgtttctgctgccgaaagtaaaaaccctagagaaactataccaaaggcagcaaagagaacattttggttgattactatctcatatgtgactattttgactttgattggttgtttggttccatccaatgatcctagattactaaatggttctagttcggtggatgctgcatcctcccctctggtcattgcgattgaaaatgggcgtattaaagggttaccatcattgatgaacgccattattttaatcgctgtcgtttctgtggccaatagtgctgtctatgcgtgttcaaggtgtatggtggccatggcccatatcggtaatttaccaaaatttttgagacgtgttgataagagaggtagacctatcaatgctattgtgttaactttgtttttcggtttgctttcgtttgtggctgcaagcgataaacaagctgaggtctttacctggctgagtgctttatcaggactatcaacaattttctgttggatggccattaatctctctcacattagattccgtcaagccatgaaatttcaaaaaagatccttggacgaattaccattcatttctcaaaccggtgtttggggatctatatacggtttcgtcgttttgttcctagttttgatagcgtctttctggacttctatgttcccaatcggcggttcaggcgctagcgcagaatctttctttgaaggctacttatcgtttccaattttgattgtctgctactttggacataaaatatacactcgtgactggagattattcgtgaaattagaagacatggatctcgacactggtagaaaacaggtggatttaaatcttcgtagggaagaaatgaagattgagcaagaaacattagcaaagcgctcttttatgacaagatttttgagcgtctggtgttga

SEQ ID NO: 1035 - DNA, 999 bp, Saccharomyces pastorianus
atggttagagttgctattaacggtttcggtagaatcggtagattggtcatgagaattgctttgcaaagaaagaacgtcgaagttgttgctttgaacgatcctttcatcaccaacgactacgctgcttacatgttcaagtacgactctactcacggtagatacgctggtgaagtctcccacgatgacaaacacatcatcgtcgatggccaaaagattgctactttccaagaaagagacccagctaacttgccatggggttctctaaagattgacatcgccattgactccactggtgttttcaaggaattggacactgctcaaaagcacattgacgctggtgccaagaaggttgtcatcactgctccatcttccaccgccccaatgttcgttatgggtgttaacgaagacaaatacacttctgacttgaagattgtctccaacgcttcctgtaccactaactgtttggctccattggccaaggttatcaacgatgctttcggtattgaagaaggtttgatgaccactgtccactccatgaccgccactcaaaagactgtcgatggtccatcccacaaggactggagaggtggtagaaccgcttccggtaacatcatcccatcctccaccggtgccgccaaggctgtcggtaaggtcttgcctgaattacaaggtaagttgaccggtatggctttcagagtcccaaccgtcgatgtctccgttgttgacttgactgttaagttgaacaaggaaaccacctacgatgaaatcaagaaggttgtcaaggctgcctctgaaggtaagatgaagggtgttttgggttacactgaagacgctgttgtctcctctgacttcttgggtgacgctaactcttccatcttcgatgctgccgctggtatccaattgtctccaaagttcgtcaagttggtctcctggtacgataacgaatacggttactctaccagagttgtcgacttggttgaacacgttgccagagcttaa

SEQ ID NO: 1036 - DNA, 1239 bp, Saccharomyces pastorianus
atgctaagcgcaatatccagagtctccactttgaagccatgtacgagatatttagccagatgcaattaccacgcatccgctagactgtttgcagcaaagccgttttgcatgcccgcaatgtcccccactatggaaaagggcggaattgtgtcttggagatataaagtcggtgaaccattcaatgcgggcgatgtgatactagaggttgaaactgataaatctcaaatcgatgtagaggcactggacgacggtaagttcgccaaaatcataagagatgaaggctccaaagatattaatgttggtgaacctattgcctatatcgccgatgtggatgacgatctagttaccataacactgccccaggacaaagctgatacgaaaaaaccaaaacaatccactagtaaaatgccaaccccagaaaaaaaagaggcaggaaaccaacagcgcaatgaacctacgaaaaaagaaacgaagagaactaacgatagccaggccagtcccgaacagaccttcctaccatcagtatcattactactcgcagaaaatggtatatccaaacaaaaggccttgaaggaaattattccatccggattcggcggtagattgttgaaaggtgatgtgctagcatatctagggaaaataccacaagattcagtcaccaagataacagaattcatcaaaaagagtgaacgtctcgatttatcgaacatcaaacctatacaactcaagccccaggaaaatgaacaagcccaaaagaaagttcctagcaaacaggaaatcccacccttacaattcgaagagcagttggtgttccatgctccagtttctgttccctttgaaaaactgcgtgagtcacttaacactttcatgaaggaggcttaccagtttactcatgaagagccactaacagacgcaaattctaaatattttgatcctgtcttcgaggatcttgtcacgttgaacccaagagaaccaagatttgaattttcctacggtttcattcagatccccaaggcgaacaacacgcaggatgcttacggacaagaggatatattcgatctcctaacaggcgcagatgccaacgtctcatcagagaaatccgtcgaaaaggactccttttccggaaagaacgaatacttgctaaccttaaatgttaatgtcaataacaagaaatttaatgacgccgaggccaaggcagaaagattccttgactacgtaagagaactggaatcattttag

SEQ ID NO: 1037 - DNA, 741 bp, Saccharomyces pastorianus
atgtcaagattagaaatatattcaccagaagggctacgtctagacggacgtcgatggaatgaactgcgtcgtttcgaaacttccatcaacactcatccgcatgctgctgatggctcttcctacttagaacaaggtaacaacaaaatcatcactctcgtgaagggtccaaaggaaccaaggttgaagtctcaaatggatacttcgaaggccctgttaaacgtttccgtaaacattacaaaattctccaaattcgaaaggagcaaatccagtcataaaaacgaaaggcgtgtccttgagattcaaacttcgttagtaagaatcttcgaaaaaaacgtaatgttgaacatttaccccagaacagttatcgatatcgaaatccacgtccttgagcaggatggtggtatcatgggcacactgatcaatggtatcacgctcgctctgatagacgctggtatatcgatgtacgattacataagtggtatctccgtcgggctgtatgacaccaccccactactagatatcaattcgctagaagaaaacgctatgagtgcagtgacactaggtgtcgtggggaagtcggaaaaactatctctattattgatagaagataaaatccccttggacagactagagaacgtcctagccatcggtattgcgggtgctcatagagtaagagacctgatggatgaagagttaagaaaacatgcccaaaaaagagtcactaatgcctctgccaggtaa

SEQ ID NO: 1038 - DNA, 786 bp, Saccharomyces pastorianus
atgtctggaaagcagcaattacgtatattagtcccagtgaaaagagtggttgattatcaaattaaaccacgagtaaataaggctttgaccggaattgagactaatggtattaaattcagtatcaacccttttgatgatattgcagtcgaggaagctatcagaatcaaggagaagaacaagaacttagtggaatctacgcatgctgtttctatcggccccactaaggcccaagatatcctaagaaattgtctcgcaaagggtatagacacctgtagtctaattgattccatggataaagaaaacatagagcctttagcaattgccaaaatcttgaaagtcatcgttgaaaaaagaggtttcaacttggtattgatgggtaagcaagcaattgacgatgactgtaacaataccggtcaaatgttggcaggtttattgaattggccgcaggcaacaaatgcagccaaagtggaatttctggacaatggtagagtccaagtaacaagagaaatcgatgacggtgaagaggtcatcgaagcccccttgccaatggtcataaccacggatttaagattaaataccccacgttatgtgggactgcccaaattaatgaaggctaaaaagaaacctattgagaaattggacataataaaggattttcccggtatcaatattgaaccgcaattaaacactatatccattgaagaaccaaagactaagccacctggtgtgaaattgaactctgtagatgaattgatcgaaaagctaaaagaagccaaagtcatataa

SEQ ID NO: 1039 - DNA, 930 bp, Saccharomyces pastorianus
atgtcgaagtttgtcgttacctgtatagcccatggtgaaaagctcccacaagaagccattgatcagatcgccaaagagattgtcaagagctcgccacaggaaataacaatcaacagcaccaaaaaactatcgacaagagccaccgatttgtttgccgagattacagggtccattgtacaaaaagatttcaagaataaattggccagcgtaattgaaggtcatgacgatgttgatgtgattgtttctgctgacaatgaatatcgtcaagccaaagagctatttgtgttcgacatggactcaacactaatctaccaagaggtcattgaattaattgctgcgtatgccggtgttgaagagcaagtgcacgaaatcacagaaagagccatgaacaatgaactagatttcaaagagtccttgagagagagggttaaattattgaagggtcttcaaattgacacattatatgacgaaattaaacagaaactggaaatcaccaagggtgtacccgaactttgtaaattcttacacgacaaaggctgtaaacttgctgttttgagcggtgggtttatacaattcgctagttttatcaaagatcaacttaatttggatttttgcaaggcaaacttattggaagtagatactgaaggcaagctaactggtaagacactgggtgctactgtagatgggcaatgcaagagcgaaacacttttacaactgtgtgccgagttcaaagtcccggtcgagtcaagttgcatggtgggtgatggtggtaatgacctaccagccatgggtaccgctgggttcgggattgcatggaacgcaaaaccaaaagtacaaaaagctgcaccttgtaagttgaacaccaagtccatgaccgacatcctatatattcttggttacacggatgacgaaatacatggcagacaatag

SEQ ID NO: 1040 - DNA, 1404 bp, Saccharomyces pastorianus
atgaagcagaaactatctggcttagaggaatactttctttatagaagtaaattgaatttgcactcgtgcttttacgttggcatcaagctcaacgagctacctcagaagcaccagctgatatctgctcttaaatatgctgtgattgaacatgaacgtttgagttgcaacgtgttttgcgagaaatcagacaatgaggtttacttgaaaagtattaccgaaccgtttctatttgacgatatagcggaataccaccacgattgggatcaactgaaacaaaacgaaattaattgcatattccaaacgtataactttacctataacgtggctacacctttatggaaaattctgatcattccaagtcaaaatgaaatgctactggtgacagaccatgttctcatggatgggatatctgctgtccatgtttgggaaacgttcatggagggattgcgagaagaagcgtcaatcgaggatgacgaaacaatttattcacccctgtttagctcatcgactgacttgatttcagcttcgccgtttgaaaactggcccataccttggagttggcgtataatacgccaactggccagtagcctgtactatttgtcccctaaaaccattgtaacaaacaataagaatctaatccagttcgccaactattcgtttccggaaagtttcctggaatacgagccaactggagatactgacctatataaagtgaggaacactaaccatcaatgggaatttcgattgttaccggcacatctcaaaaacgtgttaagtgagtgcaaggcccataacgtttccttaacgtcctttttgggtgccttggtgtgtttaagtttcgaaaaaacagctagggaagtttataagggaacgtatttgaagatggatttaccaatgaacacaagaaaaatctgtagaaaaaccttacaatttttatcagatgaagaactcgttataggaaacttcgttgcgcccatcgaatacaagcataagctgcaccaggaccttggattgtgggataccgcttctgaaattcaagaagcagtaaaatacagttctaaggacaaagttatagatacaatgaataacgtcaagttgttagaggttgtctctcctcaacagttcataaaagataaaataaatttgaacagtgggccttcttctacttttgaaataacaaatttagggctccaagcattcaaggatgcgtgcaacaccgagctgccgtttcatgtcgtagacgctatattcaacgagccacaaggtatgtctgatattttcacattaagtgtgatttccactcctgctggtgggctgcattgttgtgtaagttacccaaacacgcttgtcgaagaattgaagcctaattggcaatatataaaagaacacctacatctatactaa

SEQ ID NO: 1041 - DNA, 333 bp, Saccharomyces pastorianus
atgagcgtgcccaaagctagactgctaaaggtagccgaattatccgcgaaaatatttgaccagaattttaatcccaccggtattagaacaggttccaagattctaaatgaacgattaaaaggcccttcgattgcaagctactacggaaacccagatatactaaagtttagacatctgaagacactatatcctgacattgaattcgttaaccttgacgaacagtaccgattatctatggtagaagccaggaaacgtcgtggtaaaggtactccaaagaagatgaagaaagaagcagctgcagctgcaaaggggaagggcaaaaagaaaaaatag

SEQ ID NO: 1042 - DNA, 1830 bp, Saccharomyces pastorianus
atgccgaattatatcttctggccatacgagtcattttttgagaagtctggtgccgaaggggcacaggtagccttggcaatctcttttcaagagactcattttgtcgtcttgggtgtttgtagctcccagcacctggaaaaggtaatcatacgtccaccgtattatatattagctacgagggaatttggggagaacgactgggactacaaagtttccgaaccctgcaatgttcactttaggatacccaggttgaagtatatgcaattttattcttctgaccctatatcactcatcataccagaaaaggcagtcgatcttcaaagcagtgtgggagaaaccttaaattttaccaaatttgaggagcacccaaggtacaagagtgacaacaagaagctaagggaaactttaaatataatcaacctttttcctacatacagtaaatcattgagtgacctttatccatttgttcaaacatcacaggaaaatttgcgagacactatatttagtgatgttgcgacctggtactcctctacttatgtttatcggctatccacgaatatctgcgtttatatgacactaatagtttgctccattgctagttttgtgtcttcatttttgaattatccgcacttccaattagtaaattactcagcatttgtgcagcaaatagatcttcgatgccaacagatttgctactttcctgtgcagtatgagcgtattaacatgaaggataccatacgcaaagttgaacctatcataaagcaagagaatattgatgccgaattgccgaattcaagtatgccttgtaagtattatcccgattatattttattttacaataccatttggcttattattaacgacatctcctttggcctaatattaggagctatacttacagagaatcggaattttttggtgtcaacatcccatagattattaaagtttttcttatatgattcactgaaaacgataaccgtattgctagcaagcaatccctttggtatcaaattgaatgcagaactggcaaactttttgagtgaattgttcctttgggtcatagaattttcttatagcgctttcataaaagttctcattgatccagaaaccttgtcaaacttgctcacggtgatgatatacttgatgtttctcgttggttgctcctttggcgtttcgttagcaattgatttttttgcgatcctaagttttccaatttatgtgttttatcgtatcagcagtaaactgtaccactgccagctaaatatcatgggcagtcttttcaacttattttgcggtaagaagaaaaacattttacgaaacagagttgatcataactatttccaattggatcaactgttattgggaacgttgctgtttattattctggtgttcttaactcctacagttatggcattctacatgtcatacacggttttgagaatgctaacaataactattgaaatatctttagaggctattattgcgctcatcaaccatttccctttgtttgcattattactgagaataaaggaccctaaacgcctaccgggtggtatttccatagaactccaaaccacaacctcaagcatgcctactacgttggaacttaaaaacaatccgattaaatttaaaagcatgttcaagccgtatagcctattgttggcgcaaatgacaacgaattatttttcatttgtcactgtacggcaaattgttcgaggagagtctataatggtcaacaggaataagttatatcacgttctatattctgcattgccaagtaagccattaggtgcaagggctttatataaaaggctgatcacacaagcatag

SEQ ID NO: 1043 - DNA, 3255 bp, Saccharomyces pastorianus
atggaaggaattttgaatttttctaacgaattagacattactttactggatcaggtggtcacctccttctaccagggttctggtgttcagcagaaacaagctcaggagattctgaccaaatttcaagacaatcctgatgcttggcaaaaagctgatcaaattcttcaattctcgacaaatccgcaatcgaaatttattgccctatccatccttgataaattgattactagaaaatggaagttattgccgaatgatcatagaattggtatcagaaactttgttgttggtatgattatttctatgtgccaggatgacgaagcgttcaaaacacaaaagaacctcattaataagtctgatttaactttagtgcaaatcctgaaacaggaatggcctcaaaattggccggagtttattccagaactgattggtagttcaagctcttctgttaacgtttgcgaaaacaacatgatcattttgaaattgttatcagaagaagtcttcgatttctctgcagaacaaatgactcaagctaaagctttacacttgaaaaactcaatgtcaaaggaattcgagcagattttcaaattatgctttcaagtcttagaacaaggttcttctacttctttaatagtagctaccttggagtctttattgagatatttgcattggattccttaccgttacatttacgagacgaacattttagaactattgagtaccaaatttatgacttcttctgatacaagagccatcacattgaaatgtttaactgaagtgtcaaacttaaaaatcccacaagataatgatttgataaaaagacaaactgtacttttctttcaaaacactttacaacaaattgccacaaatgtcatgcctgttacagctgatttgaaggccacctatgcaacggccaatggtaatgatcagtccttcctacaagatctggcaatgtttttaaccacttttctggcacgcaatagagttctattggaaagcgatgaatctctaagggaacttttattaaacgcacatcaatacttgatccaattatctaaaatcgaagaaagagagctgtttaagacgactttggactactggcacaatttagtagcagatttgttttatgaagttcaacgtttacctgcaaccgaaatgagtccattgatacaattatcagtcggttcacaagccatatcgactggatctggtgctttgaaccctgaatacatgaagagattccccttaaaaaagcacatttatgaagaaatttgttcacagttgagattggttatcattgaaaacatggtgagaccagaggaagttttagttgtcgagaatgatgaaggggaaattgttagagaattcgtcaaagaatcagataccatccaattatacaaatccgaaagagaagtccttgtatatttaacccacttaaatgttattgatactgaagaaatcatgatcaataaattggcaagacaaattgatggttcagaatggtcatggcataatatcaacaccttgtcttgggctattggttccatctctggtacaatgagcgaagacactgaaaaaagatttgtggttactgttataaaagatttattggatttgaccgtgaagaaaagaggtaaagataacaaagctgttgttgcatcggacatcatgtacgtggtgggtcaatacccaagatttttgaaagctcactggaatttcctaagaacagttattttaaagctttttgaattcatgcatgaaacccacgagggtgttcaagatatggcatgtgatacattcatcaagattgttcagaaatgtaagtatcattttgttattcaacaaccccgtgaatctgaaccattcatccaaacaataattagcgatattcaaaagacaactgctgatctgcagccgcaacaggttcatactttttacaaagcttgtggtatcatcatctccgaagaacgaaacgtggcggaaagaaacaggctattaagtgatttgatgcagctgccaaatatggcttgggacactatagtagaacaatccactgcaaacccagcattactattagattcggaaaccgtcaaaattatcgcaaatattataaagacgaacgtcgctgtttgctcttcaatgggtgcagatttttaccctcaattaggccacatttattacaacatgcttcaattatacagagctgtttcctcaatgatttcttctcaagtggctagcgatggcttgattgccacaaagacaccaaaggttcgtggtctgagaacgattaagaaagaaattttgaaacttgttgaaacttacatatctaaggccagaaatttggatgatgtcgtaaaagtgttagtagaaccactgttgaatgccgttttagaagactatatgaataatgttccagatgcaagagatgctgaagtactaaactgtatgaccacagtggtagaaaaagtaggtcacatgattccacaaggtgtcattttgattttacaaagtgtttttgaatgtactttggatatgatcaacaaagactttacagaataccctgagcatcgtgtagaattttacaagttactaaaagtcatcaacgagaaatcctttactgcatttttagaactacctcccgccgcattcaaattatttgttgatgctatttgttgggcattcaagcataacaacagagatgttgaagttaacggtttgcaaattgcattggacttggtcaaaaatattgaaagaatgggtgccgtcccatttgctaatgaattctacaagaattatttcttcgtttttgtcagcgaaacattttttgtgttaacggattctgatcacaagtccgggttttccaagcaatcgttgttattaatgaagttaatttcattagtttacgacaacaagatatctgtaccactttatcaagaaaatgaagcaccacaaggtacttcaaatcaaatttacttaaaccaatatttggctaacatgctaaatagcgcattccctcacttaacatccgaacaaattacaagtttcttatctgcattgactaaacaatacaaagacttagtggttttcaagggtacattaagagacttcttagtacaaatcaaagaagtaggaggtgaccccacggattacttgtttgctgaagataaagaaaatgccttattggaacagaatagaatagaaagagaaaaggctgccaagatcggtgggttactaaaaccttctgaacttgacgactag

SEQ ID NO: 1044 - DNA, 1578 bp, Saccharomyces pastorianus
atggatgcgaaggaaaatattgctaacgataacaatgatgtactggacgaagaaccagctattcagttaattgctccaggaatagcgagaaacctaacacaggaagtcattaccggtatcttttgtaatgtggttttttatccactacttttactatacttcgttctcactttccgttacgtgacatcgaagatagtaccttatgaatttatagatgagaaatttcacattggtcaaacgttgacttatctaaaaggtaattgggctcaatgggaccctaagataaccacacctcctggtctgtacattttaggcttcataaaccatcactgcataaaaccaattttccaatcatggagcacgttaaccatattacgattagttaatttatttggtggggcgatagttttccccatcgtagtactcagaccaatatttcttttcaacgcattagggttctggcccgtttctttgatgtgtttcccactagtgacaacgtattattacttgtattacactgatgtttggtctacaattttaatactacaatctcttaactgtgtgttgacgttaccttttggacctgtaaaaagcatatggctgagtgctttttttgctggcataagttgtctcttcagacaaacaaatataatatggacgggcttcataatggtccttgctgtggagcgtcccgctattttacaaaaacaattcaatacacacacttttaataactacttaaagttatttattcatggaattgacgatttctcacacctagtgctaccttacatgataaattttgtcctgttcatcatttatctggtttggaacagatcgattacattaggtgataaatctagtcattcagctggtttacacttggtgcaattattttattgcttcacatttatcaccgttttcagtttacccatatggatctctcgtaattttatgaagctatacaagataagaataaaagggaagccaattaaaacattttttgagtgtatttgcatcatgctaattattagatacttcacaaaggttcacccatttttattagcagataatagacactacacattctatcttttcagaaggctgattggcagtaaaagtagattaatcaagtattttttaatgacaccaatctaccatttttctacttttgcataccttgaaataatgagacctaaccagctcaccttccacccgatcaccccacttcccatcaaggaagcgatacatttgcccatacaattgacacatgtgtcatggaccgctttgatattatgtaccatggtcactattattccatctcccttattcgaacctcgttattatatcttaccatatttcttttggagaatatttattacatgcagctgtgaaccgttaataaaagacttgcaacccgccaaagaaaatgagattccaattactgtaagtagtacgaagagattgtttatggaacttttatggtttatgctattcaacattgcgactttagttatattttccaagttttcattcccttgggctacagaaccctaccttcaaagaatcatatggtaa

SEQ ID NO: 1045 - DNA, 1563 bp, Saccharomyces pastorianus
atggatatgtttaaaagaaaagtcaaagaatgggtgtattctctcagcactgacgaccactatgcagagtataaccccgaccaatcccccactttcaacatgggcaaacgtctggacaataacaatgggcaagccaatccctcccaaatgcatctgaatagcgtggatgaagaaatgagcatgggattccaaaacggtacgacatccaatgacgatataaatattgatgaatttacttccgcggtctctaatgacggtgtttccgaagctctcttggcttggagacacatcgaattttggactagtgaacacaatccagacttaaatgcaactttgagtgacccttgcacccaaaatgatatcactcatgctgaggaagacttggaagttagctttcccagttcggtgaaggcctccttcagaattcacgacgggcaagaagatttggagtcgatgaccggtacttcaggcttgttttatggactcgaattaatgactttagatcaggttgtagccatgactcaagcttggagaaacgtcgcaaagaatttgaacaaaagatcccaacaaggcttgtcacacgtcaaatccacaggttcctcttcatccatggaaagaccactcagtaacaagttcaagttaccaaacatcccagatcaaaaatctattccaccaaatgctgtacaaccggtatatgctcatccagcttggattccattaatatcggataatgctggtaaccatatcggtgtagacttggcacccagtcccaacggtaaatatgctcaagtcataacatttggtagagactttgataccaaattcgttgttgccggaaattggggagagttcttactattatttgctaacgatttggaagccggtaattggtatttggtagatgacaacgatgactactttagcggtgatggtgagttggtctttagagataagaaatccaatgggcccatacaagactattttgaggttttgaaaagaagagcttgggttaaataccaagacaacttgaagttacagcaacagaaacctcaacctgaaccacctcttcaacagcaaaaatacatgcctggcgcgcaaaataaaccggaggcgccagtggcaaatgagcaaccttctacttttggtgacgaatctataaaagatgaagatattgatagtgtaaacgcaaaatctatccaaaatggcgaaattccaaagcatgccacgagcgcacctaatgaaactttaagctccgctgaagtggcagctgaggccatagaaacagagaaaatcagccaagtagagcaagaaaccaaggccgaacaaaagaacgacgaagaacaagaacaagaacaagaacaagaagcagaagcagaagaagcaaaggtagaagaaagcgaaaatgttgaagatgaagatgtcgctgaaccaaaaaaagatgataacgacaataacgatataggtgaattaaccgccaaagagggagaagaggaaaagaaagaagatgatgatgatggtaaagttcgtaaagtaagagaagaatttgaaaacatagccctatga

SEQ ID NO: 1046 - DNA, 687 bp, Saccharomyces pastorianus
atgtctggacaccctttgcaccaagcgtgcatggaaaatgactttgtcaaagtacaagaactgcttcattgcaaaccttcgttgctgctagagaaggacctggatggcaggatcccgctacactggtcggtttccttccaagcacacgaaatcactagttttttgatttctaaaatggaagatgtgaatctggatgattatccagacgaatctggatggacgccattccatattgcctgctcagtcggaaatttagacgtggtgaaatctctatacgatagacctatcaaaccggatttgaataaggtcaccaaccaaggcgtcacatgcctacatttggcagttggtaaaaaatggtttgaagtgtccaaattcttaattgataatggcgcctccgtgagaatcaaagacaagttcaatcaaatcccactacacagagccgcatccgtgggctctttaagattgattgagttgctatgtgatgtgggcaaaagccttgtgaattgggccgataagcaaggttggactccaatattccacgctttagctgaggggaatggtgacgctgccgtattgttagtagaaaagtataacgccgagtacgatcttgtggataataaaggcgttaaggcagaagatgttgccctcaatgaacaagttaaaaagtttttcctaaataatgtataa

SEQ ID NO: 1047 - DNA, 702 bp, Saccharomyces pastorianus
atgacaaagaacttttaccgcgagttagacccagtggaagagaagattgttccgccagaaaacgctacagtaatttcctcagacgctaaagaggccactattaatgaaaaggaagccaagcaaggcgttctttcgcaaagagttatgaggtttattggagaaaatgaacttgtagacggtatttcagtacgtgatccagcgtacatgaaaaaatttttcaatgaaagaagactaaagttgtctgccaaatgggataaagcagcaacgaaaatagatgaggttgtcgggaagtattacgctcgtgaaaagagttttacgtcgactattgcaagcttacatactgacccagaagaacgtctaataccaggcttatcgtccactttagttgcctttatgacaggatctgtcttaacgagaagaagaacatggctacttcgtgctaccatgccccttatattgggctcatgttgctttgcgtatgtaatgccaagcacattcaataatgtcatgggtcttgctcatgatttagagaagaactcctttcctaaatttgttcaaaaacaagatcgtgcatggggaaaaatcaaaagattcagtaacacatctgcccagtattaccacgatgcaaagaagtggctgaacaaagatgtagaaaaaacaggggacgcaatcaaagactggactggggtgaatatcaaataa

SEQ ID NO: 1048 - DNA, 2364 bp, Saccharomyces pastorianus
atggcgattgcaaaggaattcactaagcacatctcgtttgatgatctagcaccttctctaattgatgatcaagcaactattataaagaatgacagccaccatgttggcttgaacaatcattttttgcatatacctcctcagttcaatccgatctacaaaaatagtttggatggcagccaaggttttgacgaacttgttgtcaatgacaatcaagattcacttgaagaggaaggacgttctcgacaatcccgaatggaaagtccgacacctaccgttcctctgttttcaacccagatgttttctcctgtagcgcatgatccttccaaaagctatctaaggtcacccagtgatggaagaagcagaagtgagtctccaatgtttcggtcgaaaagaggaacctcagtgagactgccccctcctccaaaagtgtctgtgctaagaaagactcaaaaggctgctgatgaacaggggcctattgaggatattgacatcggagacatagatttcgatcaggaaagaaggatgaacagaacgactgaaaaaaatacgcaacaaaattcagggtcaaggaggggctatactcaagctgcgtttgccaatcttaacgaagtagaagatagaatagaaacaaagtctatggtcgatttatctgaaggaaatgcagatacttccaagaaaagatctaaatcttttgctgggatgacagatgaagaattaaccaagttggaagaattttacataagtaaagggaggtcgaacaaaactaaaatagatcagtttgattttggtgaacaactcccggtctatttggacacaaccgcatcaaaaacagattccaattcagaagatatgacagatcctttggctgcaatttacccatcaaggcctacaattgttcataatgcaatctcaatgaccattgatcacccagattatgaaagttatgtatccaagagaaaacaaaagctaagctgtaaagagaaagaagatgacatcgatttaagagtcgtttcatgctatatatcaggtaggaggtatacatggtcatcagtagattggtatgttgagaacctggcaagagatggtgatcatttggtaattttcacgacaatccctgagtttgaagccaaaattgatagtttagcctataaggaaaaaagaaaacatcgcttagaaagaatggccagcgatacaagtgaaaacatgactacggcatcacatagtcttgcgagtgctgattcatcggttccgctatctaccggaataagaatcgaagctattcacgatgaggcaaagaagacctgtagcaaaattttagattactattccaagagattggcagccaaaattgttaggattagtattgagatggtgaaagaggattcaacaagatcggccataattcttgcgacttccttacatagaccgagtttacaagttattagcacagttagtgccaatattcaaattaaattcagaaacgggaaagttaaattgccattctttttaatgagacattttgcaatgccagtgtttgtagttccatttgaatttatcaaaccggaactcttgattaagcccaaaacagggcaaaacgaaaacgaaaagaaggaagaaatagttgacgatttgaagacaaaggtgaaaaaagaggagagattgcagtggctcagtgggttggtcaacagaactttagaaaacccgttcgctgaccatgacaaggcggtgaattcagatgatgaagataacgacagtgacgagtcagttgcctccataaatgaatatttcccaatttcaccagaaaaaaaggaagaaatggagtttttcgataaaatgggatatataaggccaaaaccttccaggcaaatattattggatgataacaccctcatgaaatacgatagttcgggcagaaaattaactcccgttgagtcaagaagttccaagcgtagttccaagcgtagttcaaggatacaatttagtaacaacggtatttataaagtaaaatctatggttgatgacgtttatgatcataatacagcctctacaccccacaccaaaagtgttttaaaatgggataatgaagacccaaaaccaagatttacctcacatccaatgaggaaaacaaaatcagctggcctatcaccaagaacgtcaactacatcatcttcttcagggcagcggaaggttcaccaccatcatcaccatcatgtttcaaggacaaaaaccgcagagagcagcaaatcaggtgggaacagcaaaaaagggagtttttcgtcttcaacgaatgaacatcaatccaaaaagtctgaaaagaagaaaactagtaaaatcggctcgatcttcaaaaaggtctttggctga

SEQ ID NO: 1049 - DNA, 438 bp, Saccharomyces pastorianus
atgtcagcatcagcctttaattctgccttcagaagatttttaaacagtgagacgggacctaagaccgtccacttttgggcgcccactttgaaatgggggttggtctttgcagggctaaacgatataaagagacccgtggagaaggtctcaggagtacagaatctgtccttattggccacggcgctgatttggactcgttggtcgtttgtcattaagcccaagaactacctgctcgcctctgtgaacttcttcctgggttgcactgctgggtaccatctaacgaggattgccaattttaggatacggaacggggacacgtacaaacaagccctacactatataataaagggggagacacctgcggctgtcgcggcaaagtccgcatctgcctcggtgaatacaggtgttatcagcgctaatccgcctataacacactga

SEQ ID NO: 1050 - DNA, 726 bp, Saccharomyces pastorianus
atggcgatagctttatggtactgtccaccacaggggtcagtggcttacgagacgctgcaaatgctcatattttcatttcaaacacttttcccaaactcgccggtctttgagcctcacataacagtgacgtctcacttggtatgtaacaatagagacgatgtcaacaagatccttacttcctgtgcggccgctattcaatcggtaaggtcccaccagaagaccgcgaagaaaggacacaaggcacaagcctcccatgctgctgctgcagcgcccctagtttcattcaacgggtgtagtgtaggcaaagggtatttcaagaaaattgtacttgagtgtaaccagaataatgtactttatgggatagcgcagatcatgagggagatgtacgttgaaatagatactgagacacgaagtagccgtgccgctacgtgggtacacgaagaatttcagccacacgtctcgctgctatattctgatattcgtccagtgagccaggcatcgttgcgggtagttcaacagagaatcgaagacgccttggacgtgcaattggtgacaagagagaaaagtaagggttctggaaacactgacgggtccaacgaggtgcagataagatgggacttcgacatctcttcgtcgctgtcctggaacatcccaggtacattcaaaatcgtgaactgcgtgggacctgttgaagagtgggtggtactcggacgcgtggatgtctag

SEQ ID NO: 1051 - DNA, 768 bp, Saccharomyces pastorianus
atggtgaaattacagagatttgcggaaagcaacgctttggtacatgagtttggaaagtatatccttgagaagcaggactcggcgttagcgggtaactcacacgcagtgttcaatatcgccattagcggcggctctatgaacaaagtgctatacgaaggcctggtgaacgacaaagacactttcccgcatataaaatggccacaatggagaatctttttctgcgatgaaagactagtcccctttgaagaccccctgagcaactacggccagttcaagaagaccgttctggaccccctggtgcacaaaggcgaccaattgaatttgggccccaccgtgtacaccatcaaccagtccttgatcggcggtggcgagacggccaacaagaagatcgccgaggagtacgcgtctttgctgccggcctctttcgacctggtcctactgggatgtggcgacgacggacacacatgctctttgttccccggagaagaattcaactacctcgtggaagaaatgacccgcaaagtagtctggtgctacaattcgccgaaaccgcccagcaacaggatcactatcaccctgcccgtgatcgcggacgccaagaacgtttgcttcctcgccagggggagttccaagaaggacatcatgcatgatgttctgatcattaagaacagcgagctccccagtgtcttggtcaatgaaatgatcggaaccagagttacatggttcttagacgacgccgccggcgcactaatcccgcaagactgctag

SEQ ID NO: 1052 - DNA, 1395 bp, Saccharomyces pastorianus
atgcagcctaagactttcgttcaccagctccattcaattctcttggaaccggaggtaaaccaatggatatattggtctccgacggatagcatggttttctttctgaaaccgtatgaccctaacttcagcacacatgttttgaagcgatattttaagcatggcaacgtgaacagttttgttcgtcaattgcacatgtacgggttccataagctatcgcatccttcccctgaccaaacttccaccaataacggcaacactaaagaacttgttgaatggaaattcactcacccatctggatttttctttaaagaagccaatgctggtgtcttgaataaaattcaaaggaaaagcaccggtgtgggcaaggatggtaaacgaaaaaatattctattgcccatatctgtcagttatgtcgacgcgtcaagattgaatgtcctctctcagcaacctgctcgtggcgcctcaacggaacccacgagcatgtttatgagcaatggcgcacaccactactcattgtctcaaggcccaccgcaagtgtacttacaacaacagcagcaacaacagcaactaaataatggaccctacgttatgtcttcactgcctcctcagcaaccaacggtcaatataatgcgaaggcaaagtatctccgcaagaatgatgaattcttacgactatcccaaccaatttccctcacaggatgacgtgctgcggcctcaacagcagcagcaacaattggtttcttcgcaatcgctatcgggtcctccaatgaaaaaatctcgaacgttatcttcgacagatgacctgaaggctactactaccttgccaatcgtcaattacccaatgccgtttcatccaggttctttcacgcaacagcttcctatggccccatcatattcatcttattcttcaccaatccctcctacaatgaactctgtttgtaactctgtttccaattctggttgtaactctgcttctgactctcctagtttggcagtgtgtaacaataatgtaacattacagaaaaaaaatgacctaagtgaaagacagtctttggacaaccatatacaaacattgaagaactctttatctacaattactgatttggtaaaaaggcatacaagcgatttaccgcaacaagaccttaatatacagacgaacgaggccctgaataaagatcttcgaacaagcttgtctcttttacagaattctaaggaagaaatattacagttggaaagtaaatggacgtcgatgcaatctttcaggacgataccattgcccttacaagaaactacaaacacctcttcatccttaacaccactgacttccaccatcacccctaaaagtatgccaataatgacgaaaagcgaagctgcaaataaatctgcctcttactga

SEQ ID NO: 1053 - DNA, 1320 bp, Saccharomyces pastorianus
atggttgcaaaacatcaggttgaaaggtatcaatcagatgaggctacgacggatccggaagtcaaacgggtaaaattagaaaatgactacgaagacacaaaaccagaagaggatggacccaatggaaaagaagccacagacaaagtgaataacggaaattttgggaaggaaacagaaagaattggaggatctgaagtcattacagatgtggaaaaggggattgtcaaattcgaattcgatggtgttgaatacacatttaaagaaagacccagtgtggtcgaggaaaatgaagggaaaatcgaatttagggtggtaaataatgataattccaaagaaaacatgatggttcttacaggcttaaaaaacatttttcagaagcaattaccaaagatgcccaaagaatatattgccaggttggtttatgaccggagtcatctttcaatggctgtcattaggaaaccattgactgttgtaggtggtataacgtatcggccctttgataagagggaatttgcggaaattgtgttttgtgccattagttccacagaacaagttcgaggttatggtgcgcatttaatgaaccacttaaaggactacgtcagaaatacctctaatataagatatttcttgacatacgcggataattatgcgatcggttatttcaagaagcaaggcttcacaaaagagatcaccttagacaaaagtgtatggatggggtatattaaagattacgaaggcggtacattgatgcaatgctctatgttaccgagaatacgatatctagatgcaggtaagatcctgctactccaggaagcggcactacgaaggaaaataaggacgatttctaaatctcacattgtaaggcccgggctagaccaattcagagacttaagcaatatcaaaccaattgacccgatgactattcctggtttaaaagaagctggttggacccccgaaatggacgccttggcgcaacgtccgaaacgtggtcctcacgatgcagcgatacagaatatcctcacggaatcacaaaaccatgcggcggcctggcctttcttacaaccagttaataaagaagaggtgcctgactactatgattttatcaaagaaccaatggacttgagcacgatggaaataaaattagaaaacaataaataccaaaagatggaagacttcatatatgatgccaggctggtatttaataattgtcgactgtacaatggtgaaaacacatcttactacaagtatgctaataggttggagaaattcttcaacaacaaagttaaggaaatacccgaatattctcatctgattgattaa

SEQ ID NO: 1054 - DNA, 783 bp, Saccharomyces pastorianus
atgtttttaactagaagtgaatatgatcgtggtgtaagcacattttctccagagggtagattgttccaagttgaatactctttggaggctatcaaattaggatctacagcaattggtattgccacgaaagaaggtgttgtacttggtgttgagaagcgtgccacctctccactattagaatcagactccatcgaaaaaattgtggagatcgatcgccatatcggttgtgcaatgagtgggctcacagcagatgctcgttctatgatcgagcatgcgcgtaccgctgcagtaacacacaatttgtattatgatgaagacatcaatgtcgaatccttaacacagtcagtttgtgatcttgctctaaggttcggtgaaggtgcctctggagaggaaagactgatgtcgagaccattcggggttgccttattgatcgctggtcatgatgcggatgctggctatcagcttttccacgcagaaccatctggaaccttttaccgttacaacgctaaggccatcggttctggttctgaaggtgcccaagcggaacttttaaacgagtggcattcttctttaactttgaaagaagctgagcttcttgttctaaaaatcctaaagcaagtcatggaagaaaaactagatgaaaacaatgcgcaattgagttgtataacaaaggaagacggattcaaaatatatgatgactcaaagactgctgaattgataaaggaattgaaggaaaaagaggccgcggaaagtccagaagaagcggatgttgaaatgtcataa

SEQ ID NO: 1055 - DNA, 1314 bp, Saccharomyces pastorianus
atggctgtctctaaagtttacgctagatccgtctacgactcccgtggtaacccaaccgtcgaagtcgaattaaccaccgaaaagggtgttttcagatccattgttccatctggtgcctccaccggtgtccacgaagctttggaaatgagagatgaagacaaatccaagtggatgggtaagggtgttatgaacgctgtcaacaacgtcaacaacgtcattgctgctgctttcgtcaaggccaacctagatgttaaggaccaaaaggccgtcgatgacttcttgttgtctttggatggtaccgccaacaagtccaagttgggtgctaacgctatcttgggtgtctccatggccgctgctagagccgctgctgctgaaaagaacgtcccattgtaccaacatttggctgacttgtctaagtccaagacctctccatacgttttgccagttccattcttgaacgttttgaacggtggttcccacgctggtggtgctttggctttgcaagaattcatgattgctccaactggtgctaagaccttcgctgaagccatgagaattggttccgaagtttaccacaacttgaagtctttgaccaagaagagatatggtgcttctgccggtaacgtcggtgacgaaggtggtgttgctccaaacattcaaaccgctgaagaagctttggacttgattgttgacgctatcaaggctgctggtcacgacggtaaggtcaagatcggtttggactgtgcttcctctgaattcttcaaggacggtaagtacgacttggacttcaagaatccaaactctgacaaatccaagtggttgactggtcctcaattggctgacttgtaccactccttgatgaagagatacccaattgtctccatcgaagatccatttgctgaagatgactgggaagcttggtctcacttcttcaagaccgctggtattcaaattgttgctgatgacttgactgtcaccaacccaaagagaattgctaccgctatcgaaaagaaggctgccgacgctttgttgttgaaggtcaaccaaatcggtaccttgtctgaatccatcaaggctgctcaagactctttcgctgccggctggggtgttatggtttcccacagatctggtgaaactgaagacactttcattgctgacttggttgtcggtttgagaactggtcaaatcaagactggtgctccagctagatccgaaagattggctaagttgaaccaattgttgagaatcgaagaagaattaggtagcaacgctgtcttcgccggtgccaacttccaccacggtgacaagttgtaa

SEQ ID NO: 1056 - DNA, 1098 bp, Saccharomyces pastorianus
atgagtgatcacaattcaagtagcctaaccttaaaagaacgaatgttaagtgctggtgctggatcagtacttacctctttgattttgacaccgatggacgtcgtgagaatacgattgcaacagcaacagatgattcctgattgttcatgtgatggggctcccgaggtaactggtactgttgagcgaggatcgaaactaaagactttaacgaatgtcggcggacagaacctgaataatggaaagatattttgggagagtgcatgctttcaggaattgaactgcaagaactcaccattaaagttcaacggcactttggaagcattcgcgaaaatcgccaacgtagaaggtataacaagtttgtggaggggtatctctttaactttattgatggctattccagcgaatatggtatactatagcggttacgaatacataagggatatttctcctatagcgacgacgtatccgacattgaaccctctcttttgtggggccattgcaagggtttttgcagcaactagtatagcgcccttagagttggcgaaaaccaaattacaaagtatacctagatcttcgaagtccacgaagtcttggatgatggtcaaagatttagtaagtgaaacgagagaagaaatgaaaatggtgggtccgtctagagctcttttcaaaggtttagagataactttgtggcgagacgttccatttagcgcaatatactggggttcgtacgaactttgtaaggagaacttatggctagatgctaaccagtattcacggaaagatagcaactggattcatttcgtaaacagttttgccagtggttgcgtaagcggaatgatagctgctatttgcacccatcccttcgatgttggtaaaacaagatggcaaatatctatgatgaataatagtgattcgaacagagttcatagatccaaaaatatgttcaagtttctagataccatacggcgtagagaaggtttcgctgctctctacacaggcttggctgccagagtgattaagatagcgccaagttgcgctattatgatatctagttacgagatctccaaaaatatatttggtaataaattgcatcaataa

SEQ ID NO: 1057 - DNA, 1605 bp, Saccharomyces pastorianus
atgaccaacgaattcgcaatgaagtcgcctaaggatttggtagacgatgtgctttttatatcagccaccaacgatgattcagaagaaaaacccacgacaatcaccttccaggaagatgaggcgcatgatgctgacttgcacaatcgtaaccacgacaagaagtcggacctagccctcgaaagagaaataatggccaccaccacagatgatgatgggatcccatctccttcccacccaatggaaaagcaagttttgcgcaagatggacatatacttaattccgctcatgggactgctatactttctttccaacttggataaatcgaacattggtaacgcagaagtcgcagggctttcgaaggatattaatcttgtcgggacacagtacaacacatgtgtcactgtattttttggtacttatgtgcttttcgaccctataggtaccaatcttctaaaaattatgggtccgccattaatgatgagtatctgtttgacctgttttggtgctatttcactcgggaccgcttgggtcaagaactacgctcaactgatcgtggtcagactgctgctcggtgcctttgaaggtatgatttatcccgctatcaacatgtatctttcagtttgttatagaagagaacaatacgccctgaggtttgccttcgtcttcagtgcagcctgtttgtcttcatcttttggtggactgatcgcttatggttgttccaagatcagtggggctctaaaagactggcaatacatttacattgtggaaggttgcatctctttggggtttgtgcctttctatgccttcggcttgagtaaaaatttggaggattcatggtttttcaacaaagaagaaagagaatacattactgaaagatacaagaccatgaacacttttaatccagatgaaaaattcgaatggttccaagtttgggaagccgttaaagatatcaagacttgggccagtgctgtggctttattcggtatcgatttaaccacttttggtctaacggttttcttaccaatcattattaccagcatggggttcacaaacgttagagcgcaattaatgaccgtccccatctttttcctcacggcaattgtcttcttcatttgtgcagtttggtccgatcgtgtgaaattaagatctccatttattctaggagcctgtataaccacgtcgatcggtatagcaatcgtccttggttctgaggttcacggtgtaagatactttggtgttttcatcctttgtatgggtatttacgtcaatgccgcttgtaactgtttgtggttaagcggtaatactggtaattatttcaagagagcaacagctttaggtattaatctgtttatgggatctggttcaggtttagtctctggccaaatattcgtcgccaaagacaaaccaagatacgttaagggtttgtccatcagtttagccttccaagtcttctccatattcatgactgtcgtacaagttttcttatataaaagggaaaatgacaaaaagaaagcgatcattgatcgttgtaatgaattgggtgaacccatcccatacgatgaaagattaagcgataaaaaccctgaattcaaatacatgtactag

SEQ ID NO: 1058 - DNA, 786 bp, Saccharomyces pastorianus
atgacacaggaatttattgataaagtgtccgaatacctgacgcaagatataaatattacgcccatctcgcagggcgcagaagccattgttttctcaacgaccactcacccatatctaccggaaacaaagggcactcacgagaagtatattatcaagtacaggccgccaaaacgttacagacacccacagatagaccaggcgctgactaagcaccgcaccttgaacgagtcacgtttgctggcgaaattacacttgattccaggattatgtgtccctcaactaatagcatgcgactcatacaatggatatatatggctagagttcctcggagaagatcttccagaagggtatggtttcagcaacttgaagaattttctgtggatgcacgacaaagacccatacagtgatcttgtggcagctacgttgcataaagtgggccgccagattggcttactgcattggaatgattactgccacggcgatttgacaagctccaatattgttcttgtcaaagatggtgccggatggatgccccatcttattgatttcggtctggggtctgtttcgaacctggtcgaggataaaggggtagacttatacgtattggagagagccatcttaagtacgcattccaagcatgctgaaaggtacaatgcttggatcatggagggatttgaagcagtctacctcgaacgaggtgcgaaaggtaccaagaaactgaaagaagttagtaagagatttcaagaggtcagactgcgtggacgtaaaagaagtatgcttggatga

SEQ ID NO: 1059 - DNA, 1275 bp, Saccharomyces pastorianus
atgacagtgaggcctgatccgtactccaaaacagcgtactatcatcttcaagaaaatgaaataaccaatactgcgtcaaaagaagaagatggtctaaatgatgcgactttccgatggagtgacttacatctgcatgtgtaccatggtttgaaatttactgttctactactcacggtagtcccagtatgtataatctacaactccatgaaaataatagttcaacgcaaacgtccgttttgcctcgaccatgtgaatagaatctttttaagacaaagttcatggattcttgatgaacacatttgtcaatacgtgctgaatcctttatttgtttgcttatacccatccactttctctattccaacgtatgtcagttatgacgttcccgtagaagatcaggaatcttcagagaacaacattttccgaactcgagctttgaatgcacctaaagtcgttaacacgaagttttacaaatacgtaatgccccaagtatttgaccccagcacagatcctattctagtgttctatcatggtggaggttacgcactaaagctgactcccacctcgttatcgttcttgaataatatgcgaaacgcattcccgaagatggccatccttgtgccagattatacagttactgccacggatgaacaatccaagaagtatcccctacaagttctacaaagcgtggccattttcgactacattaccaagactatgggctgcaagaacgtgattattatgggtgattcagcaggcggtaacgcggttttaaacattgttttatatttgaaaaagtgtcatagagatgtctatccaaaaaaagtgatagctataagtccctgggccaatgccacttttttccatgaaggcgaaaaagagcatatgctacggacgcagcaatgggatggtctgtgcttaaaaagccactcgatgtttggaaggatgttcgtaggcaacaacccaaacgttgatttcactaatgacccttttgttaatattgaaaagaattttgaaacaggagattggcgagaaatcttaaaaaaatgctctgtgatgattacttacgggagtgacgagctgctgagtttgcagaatgagatcttagcaaaaaaaatgtgtgaagccagtgacggattagaccatttcacttccaaaaacgtgttggtcgaacatcaaggctttcacaccggccccatagttaattactcccgaaacatggaccggtggacgaggataccatctatttcacgtatcctcgagttcatgcagacctaa

SEQ ID NO: 1060 - DNA, 732 bp, Saccharomyces pastorianus
atgcaaaatatccaagcagtgcaggagatagaaaggcacgaaaccccgttgaacattagacccacctctccatataccttaaacccgccagttgagagagatggtttttcttggccaagtgtagggacaagagatcgtgctgaggaaacggaagaggaggaaaaagaacgaattcagcgtatttcaggcgcaattaagaccatcctgaccgaactaggtgaagatgtcaacagagaaggtctactagataccccacagaggtatgccaaagccatgctttatttcaccaaaggttaccaaacaaacatcatggatgatgtcatcaagaatgccgtctttgaagaagaccacgacgaaatggtcattgttcgtgatatcgaaatctactcattatgtgaacatcatttagtgccattcttcggtaaagttcatatcggctacataccaaacaagaaagtcattgggttgagtaaattggccagattagcagagatgtacgcaagaaggctacaagtccaagaaaggctcacgaagcagattgcgatggcgttaagtgatatcttgaaaccattgggtgttgccgttgtcatggaagctactcatatgtgcatggtttcaagaggtattcaaaaaacaggatcttctacagtaacttcatgtatgctgggagggtttagagctcataagacaagagaagagtttttaaccttactaggaagaagaagtatttga

SEQ ID NO: 1061 - DNA, 588 bp, Saccharomyces pastorianus
atgcctcaagacacacatgacgatggcttgccgagctacgaggaagttctaaaggaagaagagaggttgcagtcccaacagcagcgaccaccaaggccacggcccaatgcgccaccaaggccccagaggccctacacagtgccaccagcttcgtcttcccattcccattcacactcacagactcactctcacacgtcctcaagttcccatgcaccccctccagcgaagccgcaacaaagctcaagcttgccctggacataccctcccaagttctattgtaccaaatgtggcaatacaggctacaaggtcaagaacggaaggtcttgcaagtcgtgttggagaaggtttgcacctcaaaataacattactgctgccccttccctttacacaaactaccaaatgcccgtatacactagcgcatggcagggaaacgggcccttgtgcgttcaaccaggggaccctcggcttgggggcgtcttgtgtggtgaatgcagaggttctggacgtactaggttcctcttggacgaagatatgtgctccttgtgccatggcgtaggcaggatcatcacccagcctcaacgctattag

SEQ ID NO: 1062 - DNA, 3207 bp, Saccharomyces pastorianus
atggcaaagcagcaggagtctagcaagtccaacttggctaacgaggatgatgcctatgatgcaatcttcggtggtgagtttggtactttagagatcgggtcatatattggtgcgaacaaaactaccaatacaaaggactatacggaacatctaccggatgctgtggattttgaagacgaagatgaattggctgacgacgatgatgatttagcagaagatgtggctactggtccacattcaagtatgatggatatgggtgtgtatgataacaatgagaatagtgctgttatgcgtatggattcaaatagtttgaatctacaattacctgagattggaggagaagtgtctcgagaatttattttggaaggtgacggaagtgtacctgcaacaaccaatgcgttgttcatggggatggatgcaaatgaaatccatcttgccactgaagcaggtgttcttgatgcgggtggtggacatgaaattgctcattctcaactttctctcaacgacgtcaatgctgatagtatggcaatgaacaatagatttaccatggaacctcaagaatttcagatgtcagataacaagcacaagaaacccactaaattggatttaataaaccacgaaaagtatcttctaaaaaaatacttccctgattttgaaaagggaaagattttaaaatggaacaggttgatttacagaaggtatgcgtcgtaccattggcatcgagatgtgtctagagtaaagaaaccgttcatgcctttgaacttgaaattcagagtccaacaagatgacaaaaggctattcaactcgaaggctacatcatgcctctcttctatttaccaaggaaaaaacaacatgtatcaagacagctcttctgcgtcacgtaggggtttaatacatttctctattgatgaactttttcctgtcaaagagcagcaaaagaaacgcaagatcattcatgatgaaaagacaatatctgaagacttgttgattgctaccgatgattgggaccaagaaaaaatcatcgatcaggagaccataccaaatatgacaccaacggagccatccataacacctaacttgaatcctccaggtggttataagctgaagaatctgatcgaagatgttgccgaggattggcactgggatgaagatatgattatagatgctaacttgaaagaatcgaaatatgctgaactaaatatgaatgatgaaaaactattattaatggtcgagaacactgataatttagtgcagcgaaagcagcagttagaaaatgataatctaatattacccattaatgaaaaaactttacaacaaaaactcaatttgtctaatgatgataaatatcaaattttgaagaaaactcatcaaacaaaagttcgttccactatatctaatctgaatatccaacattctcagcccgctataaatctgcagtctccgttctataaagtggctgttcctagataccacttaaggcatttccatcgtgaaaactttggctcgcacattagaccaggcaccaaaattgttttcagtaaactgaaagcacgtaaaaggaaaagggataaggggaaagatgtcaaagaatctttttctacatcccaagatctgaccattggtgataccgctcctgtatatttgatggaatattctgagcaaacaccagttgcattatccaagtttggtatggctaataaattaattaattattatcggaaagcaaatgaacaagatactttaagacccaagctacctgttggtgaaactcatgttttgggtgtccaagataaatctccattttggaattttgggtttgtggagcctggtcatattgttcccaccttgtacaataatatggttagagcgccagttttcaagcatgatatttcaggaacggactttcttttgataagaagttcgggatttggtataagtaatcgattttacttacgtaatataaaccaccttttcacggttggacaaactttccctgttgaagaaattcctggacccaattcaagaaaagttacttcgatgaaagcaacaaggctgaaaatgatcatttacagaattttgaatcataaccatagcaaagctatttcgattgaccccatcgcgaaacatttcccagatcaagattatgggcaaaatagacaaaaagtgaaggaattcatgaaatatcaaagagatggacctgagaaggggctttggagactcaaagacgatgaaaagctattggataatgaggcagttaagaatttgattacacctgaacaaatcagccaagttgaatcaatgaatcaaggtttacaattccaagaggataacgaatcttataattttgattctaaactaaaatccttggaagaaaacttactattatggaacatcacaaaaaatttcataaattcgactcagatgcgagcaatgatccaaattcatggtgttggtgacccaactggctgtggagaagggttttcgtttttaaaaacgtcaatgaaaggtggatttgttaaatcaggctccccctctggtaacaacaacgcttcgaacaaaaagggtaccaacactcatagctataatgtggctcaacaacaacgggcgtatgacgaagaaattgcaaagacgtggtatacacacacaaaatcgttgagtataagtaatccgtttgaagaaatgaacaatcctgacgagatcaaccaaactaacaagcatgtaaagacggagagagatgacaagaaaatcctgaagattgttaggaaaaaaagagatgaaaatggtattattcaaaggcagacaatcttcataagagatcctagggtcatccaagggtatgtaaaaattaaagagcaagataaagaagacgttaacaaactgttagaagaggatacttcgaagataaacaatttggaggaactagaaaaacaaaaaaaattgctgcagttagaattagctaatcttgagaaatcacaacaacgtaggacagctagacaaaattcgaagaaaaacagcggcgcaacaaagatggaaggtgcaatggacaatggcagcgagttttccggtgcaatagacggtaaaataacaaaaaacaaaagcaaaaacacaacaagaagatgcgctacctgtggacaaatcggacacattagaacaaacaagtcctgtccgatgtatagtagcagagatgatccaatttcaccaaagtag

SEQ ID NO: 1063 - DNA, 1662 bp, Saccharomyces pastorianus
atgcaagtacaagggcccgatactaatgtggtgagcactgtggctctgggaacaaaaaaaagaaggctatccaaggcttctgttcaggaagaaagtgaacacacggatgggaagctggaggtgaagaagaacaagaagaaaaagaaggagaagcccatgacatgtactttgcagaagactgctgttgataaaggtattggcgtcaaggatgtaagggatatgactcaatacttgttacaggctgaaaacaactctcctaagtggatagatattagtaacagatcaagtttacaaaaaatggtggttttatttattccaggcttgcagccaagtgattttgggggcggcaggagtgcgttcagtgagatcaatgatgacaagtttaagtatattcccgaacaaattgcatctaagttccacactttccctgtgatggctcccggttcgaagatgacgctattttcaccatacaattcatttatcaatgttgggttgtccaagctggagaagataaatagactgaaggagctgcaaaagaaaaggaaaattaccatcaatgacttggttttatctgaacagcagcttgtggccaacgattacccattaacttctggagactctaacgatgcaggctgggtgcagactgccgagtttgcccacgatggttcacacatatttgcattagattgtgaaatgtgtctttctgaacaaggtttggttcttaccaggatttctctggtgaatttcgataatgaagtcatttacgaagagctagtgaagccagatgttcctatagtggactatttaactcggtatagtggtataaccgaagaaaagctggctgctggtgccaagaaatctttaccagaggtgcagcaagatttactaaagataataagtcgttcagatattttgatcgggcactcgctgcaaaatgatttgaaggtgatgaagttaaagcactcattgattgtggacacggccatcatataccatcacaaagctggtgatcccttcaagccaagtttgaagtacttgagtgagacattcttgaacaaaagtattcaaaacggcgaacatgattctatcgaagacgcaagagcatgtcttgagttgacaaaactgaagattctaaatgggttagcatttggcataggcatcaacacggagaatttgttcactaagttgcatcgttttgaagtaagaaccatgttacttaatgacatgatcgtcaaagatcatagcgaagacgactctaaaggctgtttgatccgttgtgttgaggataacgaaacgtggacaaacattcatgaaaatttaaataaggacgttaaacttattgtgggcagattgaaaaatttggagagatcgcgtaattacaacaaaaagccacgaaagggggatgatttattggaagaaaccacggttcttcgtgatattggacagcacctgacacaggtatacgagaatgccgcaccaggcaccatgattctggtcatgtcaggtacaggcgatacacggccatggaataacctttcgactgaattagacgtcatccaagataagaaggagagactggacaaaagacgtgaaagggaacccgaaatagcagacgccataaagctggcccgagatggtgtagcatcctttactgtaaaatag

SEQ ID NO: 1064 - DNA, 1155 bp, Saccharomyces pastorianus
atgcgtctctccaacttgatcgcttctgcttctctattctctgctgctgctcttgctgcccccgctaaccacgaacacaaggacaagcgtgctgtggttaccaccaccgttcagcaacaaaccactattgtcgttaacggtgccgctccaacgcaagttgctgctttgcaggaaaatgctgttgtcgactccgctcctgccgccgccaccacttcagctgctgctgctgcttctccagctgctgcttctccagtttccgacgctgctgtttcttctgctgccgttgttgtttcttctgctgccgcaactccagcttccagctcagctgcttcttctaccgcttcttccactgcctcttccagccaagacgtcagtggctttgcctccggtgtcaaaggtatcacatataccccatacgaatccagtggttcttgtaagagcgccgacgaggtcgcttccgacctggctcaattgaccgacttcccagtcatcagattgtacggtaccgactgtaaccaagtcgaaaacgtttacaaggccaaggcttccaaccaaaagcttttcctaggtgtctactacgttgaccaaattcaagatggtattgacaccatcaagtcggctgttgaaacgtacggttcttgggacgatatcaccaccgtttccatcggtaacgaattggtcaacggtaaccaagccaccccagctcaagtcggtgaatacatcgacaccggtagagccgctttgaaagccgccggttacagcggtccagttgtctccgttgacaccttcattgctgtcatcaacaacccagaattgtgtaactactcagactacatggccgtcaacgcccatgcttactttgacaaaaacactgctgcccaagactccggtaaatggttgttagaccaaatccaaagagtctggactgcttgtgacggtaagaaggatgttattgttactgaatccggctggccatcaaagggtgaaacctacggtgttgccgtcccatctaaggaaaaccaaaaggacgctgtctcttctatcaccagctcctgtggttccagcactttcttattcactgccttcaatgactactggaaggccgatggtgcttacggtgttgaaaaatactggggtattctatccaatgaataa

SEQ ID NO: 1065 - DNA, 759 bp, Saccharomyces pastorianus
atgggtttggcagctacaaggacgaagcagcggttcgggatggaccccagaaacacggcgtggagcaacgacacgtcaagattcggacaccagtttttagagaagctgggatggaagccagggatgggccttgggctttctcctatggactcgcctacgtcgcatatcaaagtgtcgattaaggacgacaacgtggggctgggcgccaaactgaagcgtaaggagaggaaggacgagttcgacaacggcgagtgcgccgggttggacgttttccagcggattctaggtcgtttgaacggcaaagaaagcgagatctcgcaagaattggacacgcagaggaagcagaagatcatcgacgggaagtgggggatccattttgtcaagggagaagtcctggcaagcacctgggacccgaagactcacaaactcagaaactattctaatgcaaagaaaagaaagagcgacgacgacgacgacaagagtgagaagaagaagcacaaaaaacacaagaaggacaaaaaggagcacaagaagcacaagaaggagcacaagaaggaggagaagaagaagctgaaaaaggagaaaaaggccaaagagacgaaacgtacatcgaagttgaaatccagcgagtctgcgtccaatattcctgattcggtgaacacgaggctgtcggtgcgctccaaatggatcagacaaaagagggcagcactaatggactccaaggcgctgaatgagatcttcatgattacaaacgactag

SEQ ID NO: 1066 - DNA, 942 bp, Saccharomyces pastorianus
atgcgtttctcttctacactcgctactgcagccactgcactattattcacagcttcccaagtttcagctatcggtgaattggctttcaacttgggtgtgcaaaacaacgacggttcttgtaagtctacttccgattatgagagcgaattgaaggccttgaagggctatacttctaccgtcaaggtttacgcttcttctgactgtaacactttggaaaacttaggtcctgctgccgaagctgaagggtttagtgtttttgttggtgtttggccaaatgacgatacccattatgccgctgaaaagactgctttacaaacatatttgccaaagattaagaaatccactgttgccggtttcttagttggctctgaagctttgtaccgtgacgatttgaccgcttcgcaactatcggataagattaacgatatccgtagctttgttgctgacatttctgattccgatggaagctcttactctggtaagcaagttggtaccgtcgactcctggaatgtcttggttgctggttacaactccgctgttatcgaagcttccgattttgtcatggccaacgctttctcctactggcaaggtcagaccatgcaaaatgcctcttactctttctttgatgacatcatgcaagctttacaaactattcaatctactaagggttctactgatatcactttctgggtcggtgaaaccggctggccaaccgaaggtaccaactttgaaagttcttacccatctgtcgacaacgccaagcaattctggaaggaaggtatttgttctatgagagcctggggcattaacgttattgtctttgaagcctttgatgaagattggaagccaaacacctccggtacctctgatgtcgaaaaacactggggtgttttcacttcaagcgacaatttgaaatactctttggactgtgacttttcctaa

SEQ ID NO: 1067 - DNA, 933 bp, Saccharomyces pastorianus
atgtcttatagaggacccaatggaaattttggcggtatgccaatgtcatcatcacagggatcatactccggtggtgcacaattcagatcaaatcagaatcaatcttcttttggcatgttgaaacagtggaagcagtcttttgaaaagtttgcttccaggattgaaggactcactgacaatccaattgttcacaaattgaagccttatattccaagtttgtcaagatttttcattgtggccaccttttatgaggattcgtttaggattctgtcacaatggtccgaccaaatcttttatctgaataaatggaaacattatccatacttctttgttgttgtgttcctggttgtggttacggtctctatgttggctggtgccagtttgttagtcctaagaaagcaaaccaactatgccaccggtgtgttatgcgcttgtgttgtttctcaggccttggtttatggattattcacaggctcatcatttgtcctaagaaacttcagtgtcattggtggattattgattgcattcagtgattcaattgttcagaacaagaccacgttcggtatgcttcctgaattaaacagcaaaaacgacaaagcaaagggttacctattgtttgcaggtagaatcctaattgttttaatgttcattgccttcacatttagtaaatcttggtttactgtcgtcataaccatcatcggcaccatttgttttgccattggttacaagacaaaatttgcatccattatgttaggtctgatcttgactttttacaatgttacactaaacaattactggttttataacaataccaagagagactttttgaagtacgaattctatcagaacttaagcattatcggtgggctattattagttaccaatactggtgccggtgaattatccgttgatgaaaagaagaaaatatactag

SEQ ID NO: 1068 - DNA, 1128 bp, Saccharomyces pastorianus
atgatgtctactatctaccgtcatttatctaccgctagaccggctttaactgaatacgcaaccaatgccgcagttaaatcgacaactgcatcctcagaagctagtactctgggtgctctacaatatgcattgtctttagatgaaccaagtcattcgtggacaaaatcgcaattaaaagaaatttatcataccccactgctcgaacttactcatgcagcacaattgcagcacagaaagtggcacgatccaaccaaagtgcaattgtgcacattgatggacatcaaatctggtggttgttctgaggactgtaagtattgtgcgcagtcttcgagaaacgataccggtctaaaggctgagaaaatggttaaagtggatgaagtgattaaagaggcaaaagaggccaaaagaaacggatctactagattctgcctaggtgctgcatggagagacatgaaaggtcgtaaatcagccatgaaaagaattcaggaaatggtgaccaaagtgaatgatatggggctagaaacgtgtgttactttaggtatggttgatcaagatcaagcaaagcaattgaaagatgcaggtttgactgcatacaaccataacatcgacacttccagagaacactatagtaaggtcatcaccacgagaacctacgacgacaggttacagaccatcaagaatgtccaagaatctggaataaaagcctgtaccggtggtattttgggtctcggtgaaagcgaagacgaccatataggattcatctacacattatccaatatgtctcctcatcctgagtccctaccaattaatagactagttgctatcaaagggactccaatggctgaggaacttgccgatccaaagagtaaaaagttgcaattcgacgaaattttgagaaccattgccacagcgagaatagttatgccaaaggccattataagacttgccgctggtcgttatacaatgaaagaaacagagcaatttgtctgtttcatggcaggttgtaacagtatcttcaccggtaagaaaatgctgacgacaatgtgtaacggttgggacgaagacaaggcaatgttggctaaatggggattgcagcctatggaggcatttaagtacgacagatcttga

SEQ ID NO: 1069 - DNA, 1758 bp, Saccharomyces pastorianus
atggtcgctcaaactgttttgcgaaattgcttacaatgggcccaagataatggggcctttattgatccaaagatctccttcaggatcacacaagaggccggagtagctgcctttattaacgagaaatgctctcccaagccggaccaagcattgatcaaggttcctgaaagtctactaatcacttctcagcaagctttgaaagaatttccacagggggccgatgagaagggccttctaaactctatcacccagttatatctatcgaaattgaaattcggctctaatgccgttcacttgaagtccttctataaaccttacctggacgtgctacctctagaactaccacaaccgtatttttggtctaccgaggaaattgtgaacttacacggcacagatgtgtacttaaccatgagagacaccttgaataagctaaccaaggagtggatgggactatgccaggttttgtccatcgagcatgctccgcaagacaagcagctcttgctcctgttcgaggagaagccagaggcggccgtagtgccattggaaaagttcagcgcgcacattaattcatgtaaactagaaactttaacttggaactcgtttgcggcatacctttggtcgcattgcattttcaactcaagagcgttcccacgtgttattttaaacaagagtgacacgaaaggcagtgatttgaacgaaggatttctgtacccgatagtagacttactaaaccataaaaacgatataccagtaaaatggcagatgaatgaacacaacgaactctgcttcatgtcgcaatccggtgggtttagtgcaaatgatgaattgttcaacaattatggtgacatctccaacgaaaaatgtttgttgaattatggattttgggactcatcaaacaaatacgacttttcaagattaactttaaaattgcccgctgccttgactaacagtgtgccaatagatttcaaaaaatcaggcaattatgtcagtgaagatagagaaaccgctatccttcagtttaatttacagccttcaggaccgctacccgcgaagttgctaccgttatttacttatttgagtaaacttaaatccgaggaaacccccaccgtaagaagtgtgttagaaggtatcgaccaactggcatctgtggtgtctcaaaggttactattttataagaatttcaaaattaaaacggcatccaatcaaaagctacatccgcacatcgttaaactgatcaaactatactatcaagataataaaaaaatcctgaatgtcacagttgaaaaactatctgttttgcaaaagaaaatcttcaatgctaacaaggaattctctttatcattcaagaccattttcaaaaacgaccaaaaatttgccaattcgctcttattgatgtttggtgctattaattatgaagacctaatcaccaaagactgtctcaatgacgcgttattgctctggataatcagatcggtcaacgatacaaccagcaagcaagaaagttttatcaagcaaatgttcaaacaagtaagtgattcaatcgtaatccaaaaagaagacgtcatggagtacttgccattttacaagaagtattttcccaatttaacagaaagaatcccagaaatttacaacattggtgagtgggggataaggcaattcatcgtggcagataccgtcattgacaggttggtttggatcaggaaatcaaataatgaacctattttcttgatgaagaaagattacgagttgcagatttaa

SEQ ID NO: 1070 - DNA, 888 bp, Saccharomyces pastorianus
atgtccactgaaattgaagaagctactaatgccgtaaacaacttgagcatcaacgactctgaacaacagccaaaggtcccaacccacaagacagtaattgatcctgaagacacaatctttattggtaacgttgcacacgaatgtaccgaagacgacctcaagcaattgtttgtggaggaattcggggttgaagtcagcgtagagatcccagtgaaggagcacaccgacggccatatcccagctagtaaacacgctctcgtcaagttcccatccaagattgatttcgacgatgtcaagagcaagtacgacaccaacgtggttaaggacagagagattcatatcaaaagagctagaacccccggccaaatgcaaagaggtggtttcagaggaggtagaggcgccttcagaggcagagctggtttcagaggcggtttcagaggtaccttcagaggtggtgccagaggtagaggtaacttcaggggcagaggtggtgccaggggtggttttaatggccaaaaaagggaaaagattccgttagaccaaatggaaagatcaaaggataccttatacgtcaataacgttccattcaaggccaccaaggaagaagttgccgaattcttcggtgctaacgccgactccatctctttaccaatgagaaaaatgagagatcaacataccggtagaatcttcacttccgattctgccaatagaggtatggcctttgtcactttcgaaggtgacaacatcgatatcgaagctaaggctgaagagttcaagggtaaggttttcgatgacagggaattgactgttgacgttgccgttgtcagaccagaaaatgaagaagaagaagttgagcaagaatctggacctgaagaaaatcaagaatga

SEQ ID NO: 1071 - DNA, 771 bp, Saccharomyces pastorianus
atggctccaggtaagaaagtcgctccagctccattcggtgctaagtccaccaagtctaacaagaccagaaacccattgactcactccaccccaaagaactttggtattggtcaagccgtccaaccaaagagaaacttgtctagatacgtcaaatggccagaatatgtcagattacaaagacaaaagaagatcttgtccatcagattaaaggttcctccaaccattgctcaattccaatacactttggacagaaacactgctgctgaaaccttcaagttgttcaacaagtacagaccagaaaccgctgctgaaaagaaggaaagattgaccaaggaagctgccgctatcgctgaaggtaagtctaagcaagacgcttctccaaagccatacgctgttaagtacggtttgaaccatgttgtctctttgattgaaaacaagaaggccaagttggttttgattgctaacgacgtcgacccaattgaattggttgttttcctaccagctttgtgtaagaagatgggtgttccatacgccattatcaagggtaaggctagattgggtactttggttaaccaaaagacttctgctgttgccgctttgaccgaagtcagagccgaagacgaagctgctttggctaagttggtttccaccattgacgctaacttcactgacaaatacgatgaagtcaagaagcactggggtggtggtgtccttggtaacaaggctcaagccaagatggacaagaagactaagacttctagttccgcttaa

SEQ ID NO: 1072 - DNA, 2130 bp, Saccharomyces pastorianus
atgtattcctccctttgtcatcttgtagcatcatctaagcgttatatactccgaacaccccagcgcctttacactagcttgacgcaagaacaaagccgcatgtctagaataatggaagatttacacagcgaatacgtgccgcttattgccagcgtggacgttgggaccacctcgtcccggtgcatcctgttcaacagatggggccaggacgtctcaaaacaccaaatcgaatactcgacttctgcctccaagggtaaaatcggggtctctgggctcagaaggccctctactgcccccgcccgcgatacgccaaaacccagcgacgtcaaggccaagggcaagcccatcttctccgcagagggctacgctatccaggagaccaagttcctcaagatcgaggagctggacctggacttccacaacgagccaacgctgaagttccccaaaccgggctgggtcgagtgccacccgcagaagatcctagtgaacgtggtccagtgccttgcctcgagtttgatctcgttgcagactatcaacaccgaacgtatcgccaacggtctgcctccctacaaagtaacctgtatgggcgtggccaatatgagagagactacaattctgtggtcccgtcgcacaggcgagcccattgtcaactacggtattgtctggaacgacacaaggaccatccagattgtcagagacaaatggcagaacaccagcgtcgaaagacaactacagctgagacaaaagactggtttgccgctactgtccacgtatttttcgtgctccaagctacgttggttcttggacaacgagcctttatgtgccaaggcgtacaaagaaaacgacctgatgttcggtacggtggacacatggttgctgtatcagctgaccaagcaaaaggcgttcgtgtctgacgtgaccaatgcctccagaacagggttcatgaacctttccactctgaaatacgacgacgagctgttaaagttctggggcatcgaccgcaatctgattcacatgcctgaaattgtgtcctcgtcccaatactacggagacttcgctatccccgagtggatcatggacaagctgcacgatttaccaaagaccttactgcaagatctagtcgacagcaacttgcctattcaaggctgcctgggtgaccagagtgcctccatggtgggccaactcgcctacaaacccggtgcagccaagtgtacctacggtactggttgctttttgctgtacaacacggggaccaagaaactaatttctcagcatggtgcgttgaccaccctggcattttggtttccaaacctacaagagcatgatggccaaaagccggaattgagcgagcctcatttcgcgctggaaggctccgtcgcagtggcgggcgcagtggtccaatggctacgtgacaatttacgcttgatcgacaagtcagaagatgtaggccccatcgcatccacagtacccgactccggtggtgtggtgtttgttccagcattcagcggtctattcgctccctactgggaccctgatgctagagccaccatcatggggatgtcccaattcacgaccgcttcgcacattgccagggccgccgtggaaggtgtttgcttccaagctagagccatcttaagggcaatgagttcggacgcatttggtgaaggttccaaggacagagactttttggaagagatttccgatgttacgtacgaaaagacaccgttgtcggttctggctgtagacggcgggatgtcgaggtccaatgaagttatgcaaattcaagcggacatcttgggtccctgtgtcaaggtcagaagatctccaacagcggaatgtacagctttgggggccgccatcgcggccaacatggcattcaaagatccaaaatcacgtccattgtggaaggacttgcacgacgtcaagaaatgggtgttctacaatgggatagaaaaaagcgaacagatctcaccggatgttcatcccaacttaaggatattcgcaagccaatctgacgatgcggaaaggagaaagcactggaagtattgggaagtcgccgttgaaagatccaaaggctggctcaaggacatcgagggagaacacgaccaggtcctcgaaaacatcaagtaa

SEQ ID NO: 1073 - DNA, 672 bp, Saccharomyces pastorianus
atgagctcacaaccatctttcataactatcaggggcaaggccatctcgctcgagacccagacggagtctctcctctcgaagtactccacgttcgcgcagaccaccagctcagaacagactggggaagagaaggcaatagacacgcagctggaggccatcctgggccagagacaggacgtggtcgagtcgctgacaaagatctgcgactccaacccggcgatctccgcctcgaagctgtcgcagcttcagcgccacaaggagatcctgcaggaccactggaagagcttccgcaacatcaggtcctccatccagcaggagcgcaacaggctcaatctgctatttagcgtgaagaacgacatcgctaactccactacggatgcccccgctcccatcgctgacgctgacgagtatatccagaacgaaacaaggcggattgaccagtccaacaacgtcgtagaccgcctcatctcccaggcctgggagacccggtcgcagtttcactcgcaaagcaacgtcctaaacaccgcgaacaacagggtgctgcagactctacaaagaataccgggcgtcaaccagctcatcatgaagatcaacacaaggcggaagaaaaacgccgtcgtattggccacgataaccaccctctgtatactgtttttgtttttcacatggtaa

SEQ ID NO: 1074 - DNA, 5637 bp, Saccharomyces pastorianus
atgtccatttctgccgatgaagtgaaggagaaacagctcgtggaaaaggtcgaattgcgcctggcgatcgccgactcccctcacaagttcgaaaccaacctacacacctttttgccgccgttgctgttgaagctggcgtccccgcacgcctccgtcagaacagcggtgttttctgctctgaagagccttatttctaggataaacacgctgccccaggtccagctgcccgtgcgggcgcttatcgtccaggcgcaagagcccaatttagccgctcatcaagactccaccagtgttcgtctctacagcttgttgttggcctcgaagggtatagacaggctctccgtgcaagataagcagctgttgctgcccctggtcgtatcaaacattgcgacgctcacgggcacggtagccgccaggatgttccatattcttttgaagcttattctggactgggtcgcaccgcaggactcgtcgcgtgagcaagaggagtttgtggagcttctgcaactggacgacgtcagcttcgcgtttttgatgcgccagttcaccaactttttcctcctggtgccctcgaagcagccgcaggcctcgcaacagcctctgtcgagggggtatacgtgtccagggctgtctctcacagatgttgcgttcttcacgtacgatgcgggtgttaatttcaacaaggatcagctgctcaagtttaaaaatgcgattttccggttcgtttgccacgggatggcggcagttaatcgtgataagcaaccatccaaggacaccgaactgatgaagtttctgtgcgtagcctctaccgattcctcgactttgtctgattccgcggcacagtttatgaaacggtttgctgtgccgtacgagaaccaagagtttgtcgcgttcttacagtcgatgtacattggcgacaatgccaaggggagatcacccgttaagcctgccttgcaagaaaaaatcctgtccatcttgaataagagtcacgtcgcaaccaccagcccagaacgcatctctttaatttgctccattgggttgcattcatctgaatacaagctaaggtctttgacgctttcgttcattcgtcacgtcgcaaaattgaactaccaaaacttacaccctctttcctcctcttcctcctcctcctcctcctcctcctccttgtcatcgtcgactgatttttccacgagtattgtttccttagtcagaaacaatcttcacgcagagggttggcccaggctacagttgggacctcaaacccccgccttcaatacggccatttcgcagagacagctacagtacgaaactctgggcgatatcttgaaaagagattttgacctggtaagagacttgtcctatatcgaattcttattcgaatccttacaaggtgacttaccacaattccgctccagcattcaagagtctctgctttctttagttgttcatttaccaaacctacctcctcaatccaaagcaaatttgaagactctcctcaagaaaaacttttatattgatgagcaacaggaagaaggtaataatgacgccattaactctattatggcgcttaaattcgtctctataaagttcactaatgccgcattttcctttgatgaccctgaggcaagattgttcaatctttggggtaccgcgaggacaaatagattccatattattgaggagtcgtttaaggggctacagcctttctggttcagaatcaacaacgcatcattgaacacttcgtcgattgtaaaaacatctgatttgttgggctcgcaagtgtcggagacgaaatttcctcaattcggtgaatttattcgcatttttatcaagcatttggattccgagttttcattgattacacgcaaatctctgaataacactgttagattcatcaaacaatgtctcatatcaaatgcaatttatggcaaaaaaacaatggtaattcaagatgaagactggtcgattagaatagataaagctttggaactagacgaaacggttacttcgcaagtaaatggaatggttcagacaataaatgatgatatattcatccgctttttaactcttttggcaaatgaatttaccattacgaaccgtaatggtgaacaggttgcggtttctccataccaggatcctattttcggttccgttttattgacgttattgaattttgtaaacagcaatgttttgcaaaaactagaaagtatagttccagatctataccatttactcattacgaaatttcaatcatcaagtgataatgatttagaagtctgtgcaagcagcatcggtatcgtttccaccgccattgtagattctgttcatatcgaacagattacaagtatagccgaatcacaaacacttgcagaaacttatgttgcctcttacgttgttccgagattatatttaaagaacaaaacagcccgtatccaagaaactaatgttgtgaatttgttgaagaacttggaatcccatctatcccactctactaccaataaaagtatgatattgaagttaatttgtcaagtaactaaatttggtttacttctccaagtgaatacccaagaacggaaaacatttttgtcccaaatcatgaatacaatacaagataaattaattaacgatgtgactgctattcaaacgtggtcatatttatctttatattcaaacaatctagacaattccgattttttccaagaaaagctactcgaaacgcacgtttccaaacaaaatgattttttgttttcagtaggtgaatcgttaactgtcttggctggtaagtggtcaagtaagtacctaatcaagcagattgatattccaaatttcgatgttacgactattcaggaagattttccacctacaaacgtcaccaccatactcaatgaaattttatcaggttgtgattccacaaaaccttccttaagaaaggcatcttgtatttggttgttatcatacatccaatacttgggtcacttgccggaaataatatccaaatgtaatgacatccatttaagatttatgagattcttagccgatagggacgaatttattcaggattctgccgcaagggggctttcgctaatatatgaaattggtggatctgatctgaaagaaagtatggttaagggactactcaaatcgttcacggattcaaccacgggtgctgcatccaccagtgctacaggtgtctcaggttcagtgtcagaagagaccgaattatttgaacctggtgttctaaacactggcgatgggtccattagtacttataaagatattctaaacctggcatctgaagttggtgacccagcacttgtttacaaattcatgtctttagccaagagttcggccctatggtcatcaagaaaaggtattgcattcggtcttggtgccatcatgtccaaatcttctctagaagaattattgataaaggatcaacaaaccgccaaaaaattaattccaaaactgtataggtatagatttgatccataccaatcagtttcatgttccatgacagacatttggaatacactgattgccgattcctcttccacgatatctctttatttcgatgatattctagaagaacttttagctggcatggccaataaagagtggagggtcagagaggcaagtacctcggctttgttacaattggttcaatctcaaccacaagaaaaattctctgaccagatgctgaaaatttggacaatggcatttagaaccatggatgatatcaaagacagtgttcgtgaagttggtaccaaatttacaactgtgttgtctaaaatattagcgagatccattgatgtggaaaagggtgtgaaccctgccaagtccaaggaaattctagacaatatcctaccatttcttttgggaccacatggtttaaacagtgacgctgaagaagttaggaattttgctctcaccaccttaattgacctggtgaaaaactcctccggtgccatcaaaccatttaccccaggtctggtctatgatttcatcacattattttcttccattgaacctcaagtaatcaactatctcgcattgaatgcagcaaattataatattgatgctaatgttattgatacgcaaaggaaaaatggtgttactagctcaccgttatttcaaacaattgaaaaattgatctccaattcaaatgattgtatgatggaagatataataaatgtagttatcaaagccgccaaaaaatgtgtcgggttgccatctaaggtggcatcatcacttgttattattcttctagtgaaaagatcttctattcaaatgagaggatattctgggaagctattgaaagtttgcatgactatgtttgaagatagaaatgagtccgttaatatcacatttgccattaccatgggatatttgttcaaaatttcggcgctggacaaatgtgtcaagtattctgaaaaactggctgccaaatacttcgagtcaacatcaacggaaaataacaagaaaattgtcggcacagcaattgattcaattttaaattatgcaaggtcagactttgataatgtggcaagtatattcatgcctctgattttcattgcatgtaatgatgaggataaagatttggaatctctatacaataagatttggacggaagcgtccggttcaggtgccggtaccgttaagctatttctgccggagattttaaacatactctcgataaatatcaaatcaaacgaccatgtcattaggaaaacatgtgctaaatctgttatacaattatgcggtaaaattgatgaaaacattcctcatgagcagattgttaaactatttgatatctcgaaggaagcactaagtggtagatcatgggatggtaaagagcatattgtgggtgcaatggtttcattgacgaaaaaattttctcagactgtgattggtgatacagacttacaaaattcaattaatgatgtaatgcgaaccgagatttcaaggaaaaacgagaaatacactaaaaaaatattaccgctatatgccaagtacgttagtgtaaatccgcaagatgcaacgatcgtactattaatggaaaaatccaaagagacgattagatccttaggcaatgaatctgctgacgatgaagattccaccagacatacatctgatgaaaccgcaataaaaagaatcaaacccaacactgacattacacaaaagtcgtctaagcagaacatcgagaacgaagagtacgtgatcaatttgttaaaggtcattgtcgatgtgtgtaacaattctaaatcgaagtatccgatgaatttattagaattcgtactgaacgaaatcgcatacctcttccacaacgacaagatcatttacacatggagaacgcaacttgctgcgagtgagattggcatttcgatagttggtaaattcaatacgatcagtagcaccgatttcataaagaatgtgaaagaactatggaacgaaattttccaaatgaactgtaacaaagaaaccgttgaaaatgttaaattgcaaatgataaaacttggtggtttgattattcagaaaatccccatcatacaaaacaatatcgaagagaatttaaggcagttgaattcgatagattcaacaagcagaattgaattggaattgaagaatattggtctatga

SEQ ID NO: 1075 - DNA, 2058 bp, Saccharomyces pastorianus
atgcacgacaagaagtcgccaatggcgaactctcattatctgaagaatttgaaacagcagttccgcaacaaaaaccttatcgagacgacgatccatctggtaaactgcaatgaccatgattcgctggccttcctggcaagaacgtacgggattccgccgcagttgaggcatgtggtgtggccgatcttactgaaataccatccgatgtgcatttcaccgaatatcacctccaacaccatctcctgggaccccatcaccaatgattttatactcaatgaccctttcttgaacagcaagtcttgcgctggcaagcaggacacgtcggacaacgggaatgttctcccgtacgatatcgagtctgtcattctgcatgacttaaagaaatacttccattccaggtcaaaccccaccgccactcccagcagtagcaacaccaacaacattgccacgccgacgcctctttcgtcctcggatgcgtccacagtctcctccatggagctgatgcccccctcactggactacgaattccaaatcatagagaccctgaagaatgccatcgtaaagtttctacggaaatggtccaaaatcttcaaatacgaaagcggtcttgcctggattgccctggggctggccgaatggtatcccatctacccttacgaggccgtgtccactttcagcgagactcgctcgttttatgacgtggacgactatattgtattgagcggcagaaaacatgctcatctaagcactagcacgagcaaaaacaatggtagcaacaatacatccaactccaatacaaacggcaccagtgcgaatataatgtcaggtatgaacaacctgagtttgaacacaaacaccggctcgcacaattcagcttacatatctcacacgctatcgtacctttataaagagtacccactaccatatgaactacgatcgaaattgcccacaacaccaatcttcacattcgatgctcttttcgaaagactggctcttgtcattttgcattgtcctgatactatcttggcacacaaacagttgaaaaatgactcaagcgcaccatccactacaaagacgaacatgaatttcaacacgaactattttcctatcatatctggtggtgatctatcatttcaaacccaagtgtttttcaaagtcttttcttcaatattgcccgagttatatcaacctttaacagaagagtcttcattgcaaccttcatcgtcaagaaactcctggatttactggtggttgaaatgctctggatccaaagctctacaaagacaagatagaggacgtgtatgggatctgctgctcggatggaggcccaaaccaaacatgaacacaataaatttctttttgaattataatgacaaacaaatagagcatctctatcacgataccccgcaatgtgataacgagcagtattggatgaaagattggatagcattgtaccacaatgatcctttttggtttcctgatctcgacagtatggaattaggttccaaacaattcccatacgattacagcgtcttcaaagagttactcctgagaaacaaatacggggatacgcaaaataaagctcagacgaatggtacgccaccatcttccaatagcgattcaaacgatggccgtaacggtagtaattcagaacttaaactaccgttttcttccatcgaccctcatatgcaactgattttcatttttatcgcgattttacaattcaatgagttcaaactattagagtttgaagaagccgagatttcagaatttttaaataacgtccctctgttaacaaaattcgatgactcttcctataagaagctatacgagaacacagattccaatatatccagcccgccctcatcaccaacaatttccacctcttcatcattacaatccaacctcaactcaagtgtccatatttccaattctcatatgctgattgaagtcggtaacgacgccaaagcctcgcactgtttcgatgatcttttaaatatggctggggatatttggagaaaatggttatggagagaattagaggagagctcgatttga

SEQ ID NO: 1076 - DNA, 1881 bp, Saccharomyces pastorianus
atggtgccactggaagatttgctcaataaggaaagcgtcgctatcacgcctcagacagaccacgatcctgtggtaaatggcaagaccggcatttccagtgtgatgaagaaggatgggctgcctagtcccaacttatcgaaaagggcctccgactgctcgaagaagcccatcatcacgtgcacaacggacgctattggtttgaaacgacaagaagatgaacgtatgtcatctggcagcgcttcttcaacgtccccggcatttcatggctcttcgcatttgaatactcccccatatgaacccttgggcccatcagttgtgtctccttcgtctccttcgtcaggctcttcctcctctccctcaccatttgcgcggggccacaacccggtggacgatgacgaagatgttttggacggcgatgatgaatctgaagacgtaatactcttctgtaagtgggagcactgtaatgtgacgttcaaccagccggagttgttgtacaatcatctgtgccatgaccatgtcggcaggaagtcgcataagaacttacagttggactgccattggggagactgtacgaccaagacggagaaaagagatcatattacctctcatttgagagttcatgtaccattgaagccgttcggctgctccacttgctccaaaaagttcaagcgtccacaggacttgaaaaagcacttgaagattcacttggagtccggaggaattttgaagcggaaaagaggccccaaagtgggttcaaagagaaccagcaagagaaacaagagtggctcgaaggatgcattgtcgtcccgtaccgcatctcttcctcctgccgctgctgccggttacaagtctcactccacttctccacaaatactaccacccccattacctctagaaatggcgcaccatttaccttcgcaacagcagcagccaatttctttaaaccaattgtgtacggacgaactgtctcagtataagcctgtttactctccacaattgagttccagactacagacaatcttgccaccactgtactacaataacggcaaaacggcagttcagaacgccaacagccaaggattgcacgtttacgaagacggctgctccaataatgcggtagccagcgctacccagttcttcactaaactatcaagaaacatgactaacaactatatattgcagcaaagcggcggcagttctgcctccacgtcatcctctggacacatcccaatcgcacaaacgagttatgtccagccacccaacgctatgccttaccagcctatgcaagtcactacaacgaacacaacaacttatgtgccaattcagttgaccaaatacccggcaggtaacttagttaccgaacatttgccacctttgcactcgaatactacaggtagtattatgaatcaccatcaccagccccatcacgctatggctacgacgccacactatcaacctgcccgtgctatgcccaattactcttctacaagctgttccatcttaccgccactacaatcaaagataccaatgttgccatctcgtcctacgatggtgagcggaaacccattgaaaccaaactgggaattcagcctgaatcaaaagagctgtacgaacgatatcatcatgagtaaactggccaacgaagagcaggaagacgaaagcaatgtggaggacgatttcatggagacgttgggtatagtaaatatcattaaggactacttgctgtgctgtgtcatggacgattacgaaagcgaagaaggcgactacgaagatgaagacgatggtttattgcaagcttcgctagaaaaactgagtttgcagaacccaatgggaacagactcaactcgcattttggccaagtatccaacaattctggtatga

SEQ ID NO: 1077 - DNA, 1062 bp, Saccharomyces pastorianus
atgggcgttgtcaagaagaaaaggtcacaccatgggaaggcgtcgcgccaacagtactacactggcgctcaagtcgctggaggcggcagcatgggcgccgtgaacagcaccatcccgtcgctgacgagctttgcggaggaaaacaactatcagtacgggtacgctgggcccagtgcgggcgggaacggccgggcactaacatacgcgcagcagcaactgaacaagcaaagacaggattttgagcgcgtgcgcctcagaccggagcagcttagcaacatcatacacgacgagagtgatacgatatcgttccgatcgcaccagctgaagaatttcatcagttcgaacgacgcgttcaacatgctgagtctgaccacggtaccgtgcgacaacatccggaactcccgggtgtttagcgagcagatggcgaagtacctcacgcagaagcagcgggagcttctagaagctcccgctgcctcgtcgtctggggaccccgagaacgagccgccgagggccctaaagtactcggatctcatactagccgccgagaacggcacccgcagctccaaggatctggtagaagccgtctttgtgcgcggcggcccactgaggcaccagcgtgacggcgtggtcgtgcgtcgcgacgacgccgcgctggtgggcaagctgcgcggagacctccgggaggcgcccgaggactattggacacatatgtatagggaggtgctggctcagtaccgcgaggccaggctacgaatcagacagaaggactccactgcagaggagaggcaggaggacgcacggttggagccgcaacaacaggactcacagcaagatcagcaggaaccgctatcacagcagcagcagcagcagcaacaacaacaacaacaacaacaacagggggcagacgcagccccacagaatcccagtggagcctcgacagaaaaggaagcggtgcctgcagtcgacgacccgctggagaacatgttcggagattactccgccgagcccttcaatacaaactttgacgacgagttcggagatctcgacgctgtgtttttctaa

SEQ ID NO: 1078 - DNA, 2106 bp, Saccharomyces pastorianus
atgagaacagaaatcactactgcggattcccttcgtgatcctcactccagcggtctaaagcccgactctgagctggttatcagagaggacatagaccagtttctgccttcggaagtgtcttcggtggagtcggaccatcgcaacgatggcgaggattcagacactgacagcgacaacttcctgcaagatcctgaagacgacgtggacgaagacgccaccggcaaggagaacgccgccgcctccgttgaatcaagaggccgtccctcttcttgcattttcgtggcaagtttggcagcggctttatccgacgacgaactatgcctttcggtgacggaaaacttcaaaagatatggtgatttggctagagttaaagttttacgcgataacgccaacaggccttatgcctttgtccaatacaacaacgaccatgatgctaaacacgctttgatccgtgctcagggcactttactgaacggcaggcggttacgttgcgagcctgcgaaagtcaacaggactctgtacttgaaaaaccagcagagtatcgactttaacgaaatcacccagatatgtgaaaaatttggtaatttggaacagatcgttcctgatagaactgacaaccagtacacaagaagatacacgtatcctatatcttcagcaagctcttggttcgttcaattcgtctatagagacgacgcgattagagcttatgcgaacttgaggaccgatccaaactggataatcgaatgggctcaaaatatcaatgtgcccaggaattacaatcttttgcacaagaacaaattcaaaaattccaaggatcaccaggcaaacgatatcaaagttaacaaaaatgaggactcgaggaggagcagtgccattatagaggaagacgaacgcgagctcgaacacgaagaaggatacgaacatgaatgtgggagtgatttggacgaaaaaatagcatgcgacagcattgatgacggggaggataaagattctgagattaccatcgataaaaagtccatattcgtaggtcagttagacaaagaaaccaccagagaggaattggatagacgattttcaacccacggtagaatccaggacatcaacctgatcttcaaaccaacaaacatatttgcctttatcaagtacgaaactgaagaagctgctgctgctgcgttggaaagtgagaaccatgcgatttttttgaacaaaacgatgcatgtccagtacaaggaagttggtggtcgtcacaatagaaagtttttcaacaaaaacggcagtggcaacttcaaccatcaccagtttttcagtatgagatccggtaaatcattcactggacccgaactgaacctagcacctccaccaatcaatatgtacagaaagatgagcggcggatctcaaccagaaaacgagaacatcatgccatatatgccaatgggcccgatgcccatggggccacctccacctaacgccgccaatttgaacgattttgaaatgttcccaccaaattactccacgttcatgaaggggatgataccactgagacgtaaatctatgcccaatgcctggtcttcgccctcgtctaagagtttgaactctgagaacgcaagtgttaatggcggtgatgagacttctgaactgccctctgaaattcctgaatcatctggaagatacaacgctgctaattcctttactacttacaataactcctcagccggcagctctaacaacaataacaccaacaacaagtttcaatacaaaaaacgttatgcaaggagatcaagttatggatataatgaggtaccaccaaaaccatactatttccagccttattactatcacccaatgcaataccacatgggccccatgggtccaatgcatccttcccagggttcggccggcaacaaccatccatacatgatggtttaccccatgccgcctcctcctccttctgggctagatggaaatatgatgcctcccccattaaatatgggtcaaccccacagtgctaacaatagcagtaccaatatacaagcaaatgaattcgtgccacatgatacaaacgacataaacgaagacggtaaggctgcttacagcttagactactaa

SEQ ID NO: 1079 - DNA, 3444 bp, Saccharomyces pastorianus
atggatgaatgcttgcccaactcatgtctgctgggtgttcacctcgtcatttcaactcattcgggaccacaaatagtttaccactatccaccttccaatacagcattcttaacaaataatccagcaaagcatcagcatttttatggaaatcatgatgtactggggaaaaacacagataagggagacaaatcgttcaataccggggctgccaaaacaacttcccaaggcccccaaaatgactcaatgaacaattttaatgccaccgttccgccatctatgacaaattcaaatataaatagtgggacaatgcccacaacaaggtcccatgctaatactgtgggctctcaaggctcaattcccactgcaagtaatggtataggctatggggaaaccgacgccgggaacaaccctgggtcttttcagtactcagaatccgaatccgaatcatcatcatctggcttgagtgatagtgaactatctacagattacgtagatgtttcaagcgattcattttcaatatcatcctcgttatcatcgccctcattatcctctacttcgtcgagtccaacttcatcctcccctctgcaagatggcttatcccccactatttcaagttcccaatcaatcgattcaatgtcccccacttctccacagataaccatgactaatgatggtgtttcagtctcggaatcatatttagattccgccgtaaacaataaatcgagggccacttcaaaaagatctcagaatttcttccacaaattgagtaccaaaaaaagtgctgaactgaaaccgcattctccaataaggaaactcaaatctaagccctcaaagagtactaccaaaggcaataagctgctaaaaaacccttccaacgagaccgatgcaaatgcccttgtggggaactattcactctcatcgaaaaaatcgatctcaagcacgggagactataaccaagatattcgtaataatagtctcaatgacactcctggccagtcaccccaccattaccatcatcgttatcaccactaccgtaagtctattgcgaatagtcaacgaaatatatccactcagtacgatgtcgacgaagatatggaagtttcaacaatgttacaggatggaaaaatatccatgaacgagatatttttcaaagaggagaatttccaagacataaataaaattctagaatttgatcatgatttcgttgcagaattttgtagtcccgaaagggaaatgtgcaatactagatttgaattgacagtggacaacttttgctttttaggcctgcccatccacgtggattctcaaggaagatggagaaaatccaaacataaaaataaaactcgttctaaaagatcatcgagtactacgacaaatattagtagaaagaaatccgttgcttccaagatctcatcggtaagtgaaaacactctaaagaaactaaacagtggcgaagctgagactgattacgacaacaatgttggtgacgagaactatactgatgcgccaaatttgaagataaatactgattttaatgggagcgagtttgacagagaaaaggaagacttgggtaaaaatatgaatatgttccatgtctgcttcgtcatgaatccccatttaatagaatacaacaagagagtagatgatatgtatcagtttgttgtggcaaggttatcactactgttaagatatgtgcaatcgaagacatcgtatgtttctagtgaatgtcatcttattttgaaggaaagggaaagagtattgaaacattcaaaaacgtaccaaaccatcaacggtgccggaaacaaaggcaaatacttataccaaagaatcctagccaagtcatcgttagctagagcgttaacggagtgtgttgacaagatccaaagaaacgaaattgcgtgtctcgagattagtgacgataaagtaatctctttgcaaatcccaattcaaaacgaatttgaaaaaatgccgaactttaaattacagcccgtattgagaggctcatatttgacgtctattttaaacatgaaatttttagaaaaatcatcattgagaattgaaggtcaaaatcgtcaaaataaccaggcccaaataagtgatgccaataacaacatatacagattcaacaacaatatcaacaataccggtcatggtggtgcaccaaatgtcgatgacggggatgataatgaaagcagttactactgtgacgataatgatgatcttttaaattacgcattgttgttactagatgagccaaataacattatcaattctttggaaacgttttcgtaccaggacgatatcggcagtgtgatattgaagcatttggtcagaaacacccagccaaacatccccttaaagtcgtaccactacttgataagtgaactactagacagtccgtcatcacaaaatgaccttacttcggagacaagttcattcgagtcgggaatcttgcgttcgtgcgcattgcatttgatgtattggagacatgcaagaatagtgattccagtgagctccaaatatacatacatcgtttcgccgttggctcctatacaaggttacacaatagatgatttcaaaagtacttcccaacatgatgataaagtgagcatggtggagaatgataagaataatggtgcgcatggcgagagtgtgcctttaatctatcaaaattcgatactatttagatccaaattcccatcattgcccactttaccgatttttttaaatttgttatcggtggataaacctcaggcgtacaataacataattccatcaagagaccacaagccagtttacttgaacgcgttagggtggctgatacagtacggatacgtgacacaattgctaacatttattaatatccgcgtggataaacatataaagatggcagtcgatgaggacttggagaaagagggattccgtaagactaataccacaggacgacctggtttggattacaaaagggcagataaaaaactagacgatgaagatggacaaaacagagacgccaatgccaacgaagaatgcatggggaagaccgaaagcgggcaacccaatggcaacaaaaccaatgacaacaatgatgtgaacggcaatgagaaggcggaagacggtcatggcgatgacctcgataataatgaaatggctgtggtcgatgaagaggaaatattacatttcgaatacgacgatccggagatgcagcacgactatacaataattctggagcccgagagagccacggcaatcgaaaaaaggtggctatacagatgcatttatgatcaaccttcagacatccaaattttgttcaataggctactaaagcatttcaatgggaaggtccccatggagctggttatcataaaagaggaaattagtaggcatgatttgaagagattgctcaatgctttaaataagtatctagtcgagactcaccactggtga

SEQ ID NO: 1080 - DNA, 1401 bp, Saccharomyces pastorianus
atgctaagatcacaattaggcagaggatctcggatccttgccaagataacaactacgccaagaacatactcatctgcgtccgcggtgggcgcaacagcaaatgcaggacagatcatcaagacgttttttaatagagactcgaccacggtcactttctccatggaggagtccgacaaaccagtttccgtttgcttcaacaacgtctttcttagggatgcatcgcacggtgctaatttggtcactacgggggaactttaccataacgagaaattgactgctccacaggacatccagatctctcaggacgggaaatctctggccgtgaagtggcaagatggcggcgttcatcagttccccctgcaattcttccttgattataaaggttccagtttcgtatctccggcaacaagaaagcaagaatctagatttcagtcgcagctatggaacaaggagatcttgaaatctaacatcaaggacttgctatctgtaaactacaatgagtttatcgacgccaaggacgactcgaagcttttccaaacgctggtcaatcttcaaaaattcggtatcactttcatctccggtacgccctcttcctcctctgaaggtctaaccatccagaagatctgtgaaaggatcgggcccataaggtcgaccgtccacggtgaaggaacgtttgacgtgaatgcctcgcagacgacgagcgttaacgcacattatgccaacaaagacctgccattgcatacggatttgccgtttttggaaaacgtgccaggtttccaaatcttacagtccttacccaccagtcagggagaagatcccagtactagacccatgaactatttcgtggatgccttttatgctacacgtaacgttagagagtcagactttgaagcctacgaagctttgcaaatcgttcctgtaaattacatttatgaaaatggagataaaaggtactaccagtccaaacctttgatcgagcattatgacagtaacgaacaaaacactttgctaagcaattacgagactttaatcaaatgcatcaactactctccgccatatcaagcacctttcacttttggtatttacgacaaaccatcagatttgaacaacaatccggatctgaatctaataactacgccagcaaagctcacagagagatttttatttaaatccttcattagagggttgaatgtcttcgaaaatcatatcaatgacttcaacaatcaattcagattgcagttgcccgaaaattgctgtgtcatatttaacaacaggagaattttgcatgccaactctttgacaagttcgaaccaaaaatggttgaaaggttgttatttcgattcggacactttcaagagtaaactaaaattcttggaagagaaattccctcatgttaaataa

SEQ ID NO: 1081 - DNA, 1803 bp, Saccharomyces pastorianus
atgtcgtcgagcctgtttattctggatgaagatctagaaccgctggtgtccaagaatatcagggcaataccgaacctgtcgtcgattctttccagctttaagcaatgttatcatcgcggttcgcctccaattctttcgcagaacggctggttctttatacatttgaagagagatttcttgcatttcatatcagtgatacatgccacagacaaaccgaacatagatttgatgagtatcctaacctttctagagcaattctatcatcttttgaaaaagtatttcgagattaatgttttgagcaagaacatcatactggacaacgtcttactcgtcttggaattagtggatgagtgtatagatttcggtattgtccaagtgacagacccaagtattatcaaggactatattcgtgtgaaagtcaacctgccaaaagtgccgatagagagtgacgaatggagttctgatgacgaaagcagtgacagtgacagtagcagcgagtacagtgacagtaagaaaaggaacaagaagaagaataagaagaagaagaagaagaagaacggcaaaggaaagaacgtgggcaaaagcaaaataaaaagcataatggtgaacaataaagaaaataagggaaacaatgtggtggaaacggtcaaacagactttgagaagcaagagcaatactggaagaaactctccggatgacgagctgcccaatgatggcaatgacctctatattaatggagacatcgcgaaaacgatcataatgcccatctcatggagaacaaaggggatccactattccaaaaacgaattctttttggacgttatagaacgggtccagtacctgatggatttcgagaagggagtaatcaggaagaacctaatccatggtgaaattgtgtgcagatgttatctttccggaatgcccaaactgaaaatatccatcaacaagctcttgaacaaggacccccagttcatgtctaattctaaattccaccagtgcgtttcactggattccataaacaccattgaggaagaaggaaaagacagcgatgattctggttcgcagatagcaaccgatacaaaggagatcgaattcataccgccggatggggagtttgtcctttgccaatatgagctgaaaagacacgtgaaggatgcaccgatgataaaactacaggcttttgaggtcaagcccaaaccgaagaaattcaagatccaaattgtaacaaaaattcaaaccaatttcaaaccaaccaactccacatcaaagctgaacatcaagatcccgctgacaaaggtctttcaggactacaagatagacctgagcaagcaaatccggttcaaggccaacttaggcaaagtcgtgttcaacctgagcgacgacttcttgctctgggaaatagaaactatgaagggccaccgtgaacgcaacactggcactgccccacaggaggacaatgccagcgctctggcatccatggtggcagagttcccactgttcaaccaggaagaatatgaccggatgcaagaagaactgaaaacctctatgaacccgccgcccctgcgcacgggacccaagctagaggaactgtacaaacaggtacacgaagagcgtctcccccacacgcacgatgtcgcccctcgagataagctggtcagcgtcgatttcgagatcccgtattgcacatgcagcgggctgaaagtcgaatacctgaaggtcgaagagccacagctgcagtaccagtcgttcccttgggtccgatacaagaccatcagcgacgacgagtacgcatacatcgtctga

SEQ ID NO: 1082 - DNA, 2211 bp, Saccharomyces pastorianus
atgggtgaatttaaacctccactgcctcaaggtgcggggtatgctattgtactaggcctaggggctgttttcgcaggaatgatggtgttaataacctatatgcttagacgttatcaaaaagaaattattactgctgaagaatttaccactgccggtagatcggtaaagaccggtttagtggcggcggctgtggtttccagttggatttggtgctctacgttgttgacttcatccacaaaggaatacgcagatggtatatttggtgggtacgcatatgccgccggtgcttgtttccaaattattgcgttcgccatcttggctattaagaccaagcaaatggctcccaatgcgcacacatacttggaattagtgagaaaaagatatggtaagattggccatagttgctatctgttttacgccattgcaaccaacattttggtcacttctatgcttttaacttcagggtccgctgttttcagtgacttgaccgggatgaacaccattgcatcttgtttcttactacccgtcggtgttgtcgtttatactctgtttggtggtatcaaggcaacttttctaaccgactatttgcacacttgtgtcatcatcatcattgttctcgtatttgcatttaaagtttatgccactagtgatattttaggttcgccgggcaaagtttatgacttagttcgtgaggctgctaagagacacccagtcgacggtaactttgaaggtgagtatatgactatgacatctaaatccgccggtattttattgatcattaatctgatcgggaatttcggtaccgttttccttgataacggttattggaataaagccatttctgctagtcctgcagcaagtttgaaagcttacgccatgggtgggttagcatggtttgctgtgccttctcttatttcattgaccatgggtttagcatgcattgcagtggagacctctccaaatttccccacatatcctgatccactaacttcgttccaggcaaattctgggttggttttgccagctgccgcaattgccatcatgggtaaaggaggtgcagtggcatcgctgctgatgatcttcatggccgtcacgtctgccatgtctgctgaattgattgccgtgtcatctgttttcacttacgatatctatagagaatatatcgatcctcgtgcaagcggtaagaaactgatttacacctcgcactgtgcctgtatcttttttggtcttgccatgagtggattttctgtcggactgtactatggtggtatttccatgggctatatttatgaaatgatgggtataattattagtagtgcagtgttgcctgtggttttgactttgtgctctaaagacatgaatgtagttgccgctgtggtgtccccaattttaggcacagctttggctataatgtcatggttggtttgcaccaagtcactttaccatgaactaactgtggacacaacattcatggattatccaatgctaacaggtaatttggtagctttattgtcaccagctatctttattcctattttgacttatttctttaaaccgcaaaatttcgactgggaaaaattgaaggagattaccagagtagatgaatctgaagaattggctcaagctgatcccgatattcagatttatgacggtgagcttaatgctaagggtcaagaagaagaaacaaattccctgacttctgcagagaatgaaaaaaatgatgttagagtaaataatgaaaaattgaatgacctcaacctcggtgtcgtgataagtaatgccattatgcaagaaagtggaaccgagttacaagaagaattagacgaagaacaaaaggaactagcccgtggtttaaagattgcctacttcctgtgtgtattttttgccttggcatttttagtggtttggcccatgcccatgtatggttccaagtatatcttcagtaaaaaattctttaccggttgggtcgtggtaatgattatctggcttttctgtagtgcatttgccgtttgtatttatccactctgggaaggcagacatggtatatacacaacattgcgtggggtatactgggatttatctggccaaacctataaactaagggaatggcaaaattctaatccacaagatctgcatgtagtaacaagccaaatcagtgcaagactgcatacacaatcgtcacaattcggacaggttgacgaaatcatttga

SEQ ID NO: 1083 - DNA, 363 bp, Saccharomyces pastorianus
atgtctgactttcaaaaggaaaaggttgaagaacaagaacaacaacaacaaatcatcaagattagaatcactttgacttctaccaaggttaagcaattggaaaatgtttcttctaacatcgtcaagaacgctgaacaacacaacttggtcaagaagggtccagtcagattaccaactaaggttttgaagatctctaccagaaagactccaaatggtgaaggttctaagacttgggaaacttacgaaatgagaatccacaagagatacatcgacttggaagctccagttcaaatcgttaagagaatcacccaaatcaccattgaacctggtgtggatgtcgaagttgttgtcgcttccaactaa

SEQ ID NO: 1084 - DNA, 918 bp, Saccharomyces pastorianus
atgagtagtatagaagtatcagaggcccttaaaactatggaagaaatcctggcgagacatagaaaggaaaacaaagatttacagaataaaataaccggtatgaaaaaacaggccactaaatctaaaagaaaggaagttaactcgaaatgtttagatcttcaagacaatttgaagattaaacaggagaatgaaatcaaaaattggaagatcgttaataaccaagcttccggccctgaagaagaagatgaagtgactccggagaaactattggagcaactatccatatcacaagaggaagaacacagccaacaggatgttcccggccaacaagatcaaccaaagaaacgtcgtaatagacaaaaggaaaaattggcaaagagggacgcagcaattgcgaaaatgaaagaagaagcagctttggaagcttcgcaacaacctgattttaaaaaaatggaacaagaatctatagaccaattatgcgaggtgaaaaaactgaagcagttcgatatacaacctgacggccactgtctattcgcctcaatattagatcagttaaaacttcgccatgatccaaaagagctagattcagacttgaatgtcagaaaactaagatcgctgagctgtaattatgtacaggaacatagggacgatttcgttccttatttgttcgatgaggaaagcatgcaaatgaaagatatcgatgaatatactaaagagatagagcatacagctcaatggggtggagaaattgagatcttagctctatcccacgtttttgattgtccgattagtattttaatgagtggtagatctgttcaagtttataatgaggacggtaaaaacgctgaattaaagcttgtctattataaacacagttattccttaggtgagcattacaattcattgcatgattcgtga

SEQ ID NO: 1085 - DNA, 1485 bp, Saccharomyces pastorianus
atgacagttttttcaagtataaatgaatttgagtacaacggtactttcgaaggaataaggaaagatgtcattgtgtcgcaaatgataaaggccttgcagaaacatttcccttcgatatgcgataaaaattatgagttaagtttatttttgcccatttttcagagatacatcttagaaaactcttcaatcactcacgaactagactctgaaagaattcgactgctcaatataacagaatttaccgagtttgaggatatccaagacaatgatgcattagatgacgcccttttaacgaaattagcaactgtaaaattaaacgacaaagtagattcagtaattggaaaacaaagtcctttgttcgaggtaaaaaatggtaagtgttctttagatataatattacaacaaatacaaaatttgaatatatcgtttaattgcgacgttccacttatattcataacaaaccccgaaacagaatcacaaatctctgatttcctaagggaaagctatccatgtaacaaagttgaatggaaaactttagtgcactcaagttttccagcaattgataaagatacgttgctgcctgccgtattccaaatgaatgtttgcgaagacgacctctggttgtcttgtgggagtgggaacctaatcgacactttatacttttcaggagagttagataacttaattgttcaagggaaagaggttctgttcgtttcaaatatggaaaatttaggcgctactgtagatttgaacatattaagttatatgataacaaacgatattaactaccttgttgaagtggttgacagaactgccaacgattcgaatacgggggtactagccacctatgaaagcacactacggttagtggactacaagtatctgtcccgtgaaagtgcaagaaagtgcagaactgttaacactaacaacatttggattaatttgcgaaaattgaagaatctaatagagtctgatagtctaaatttgccgatttgttcaagtgaaactaagacagtaataagtaacagtcaattcatggagactttgcacttgcaaacacatttgggagattgtatcggcttcttttcaaatagccaagttatcaaagtaccaagaaacagatttttaccgctagcaacatgcgaggacttattcctattgaaatctaatttatacgatctcgataagaacgggattctcagtctctatcctttaagattcgaattactgccatcaatcaaactaggcgacgaatttgacaattatggaacctttaagataggaataccagatattcctaatattttggaactggaccatttaactgtaacagggaatgttttctttggtcgtaaaataattctgagagggaccgtcattatcatttgtgatgaagacgatgtaatcaccattcctgatggctctattttagaaaatgtaatagtaagaaacaaatctcagctggaggatattggccaattctga

SEQ ID NO: 1086 - DNA, 963 bp, Saccharomyces pastorianus
atgccaacaaactccattaaattactggcaccagacgttcatcgtggtttagctgaactcgtcgccaaaagattgggcctacaattaactagcagtaagttaaagagagatccaaccggtgaagtctccttttctattggggaatctgttagagaccaagatatcttcatcatcacacagatcggttctggtgtcgttaatgatcgtgttctggaacttttgatcatgatcaatgcttccaaaactgcatctgcaaggagaatcactgccattattccaaattttccatatgcaagacaagatagaaaggataaatctcgtgcacctattaccgctaagttgatggctgacatgctaaccactgctggctgtgatcatgtgattactatggatttgcacgcttctcaaattcaaggatttttcgatgttcccgtagataatctatatgcagaaccaagtgttgttagatatatcaaggaaaacgtcaactatatggattctataataatttcgccagatgcaggtggtgctaagcgtgctgccactttggctgatcgtctggatctaaattttgcattgatccataaagaaagagctcgtgctaatgaggtttctcgtatggtccttgttggtgatgtcactgataagatctgtatcattgttgatgatatggccgacacgtgtggtactctagctaaggctgctgaaattcttctggaaaacagagccaagtctgtcattgctattgttacacacggtgttttatccggtaaagctattgaaaatattaataattctagactggacagagttgtttgcacaaatactgttccatttgaagaaaaaatcaagaaatgtccaaaactggctgtcatcgatattagtagtgtgctggctgagagtattcgtcgtttgcataatggtgaaagtatttcttacctatttaagaattatccactatga

SEQ ID NO: 1087 - DNA, 1758 bp, Saccharomyces pastorianus
atggatcagtttgaatataaaattatcctagagtttgaaagccaagatcaggtcgaatccgcttatcgagtttttaaggacgtttcaagcaaatctatctctaacagtacctgggaagaaaacataaagggtgacaatcaacagtaccaaaattggagaattggaaactggtcagtagatatgttaactgatttcacaaaccaaacatctaaggaaaaggaaaccgatttgattacttcacaatacttgggccatggaataataaggttattcaaattaaacaatgccaatgatccttgtgatgaaaaggacattctgactattcctggtgatgataccatgatcagtatcttatttgttccgacatacttcacagttcatgacttactgcatttttatattggtgatgatattgttaataatcaagtttccaactttcgtatactaagaaatcaacaaaaaggcatcggctttaattttatggttttaatcaagttcagaaatgcgattgatgcaaagaatttcaaagatgagttcaatggtaaaagctttagcaggatggatccagaaacttgtcatgttatttctataaaggagatcgatttccaaagaaaacttttccaaagaccagccgctaatgaagacttcccttatctacttactgatccatttactgttaaaaagaaaagagatctggtgaaagttgaactaccgacatgccctgtctgcctggaaagaatggactcggagacaactggattggtcaccatcccatgccagcatactttccattgccagtgcctgaacaaatggaaaaactctaggtgccccgtgtgtaggcattcaagtctgcggttaagcagagactctttattgaaacaggcgggggactccgcacattgtgccacatgcagttccaccgataatctatggatctgcttgatttgcggtaacgttggatgtggccggtacaactttaagcatgctataaagcattatgaggacactttacattgttttgctatggacatacgaacgcaaagagtgtgggattatgcaggagataattacgtccatcgactagtgcagaatgaagttgatgggaaactagtagaagttggcgggtccggtaatgatattaccaatgatactggtaattctgatgaactacaaaacccggattatgacatcaggggtaaagggagtgaagggtcaagctctaataaaaaagatggagaactggcagcaaacttcttgagacatagggaataccatctagaatacgtgcaagtgctgatttctcaattagagtctcaaagagaatactatgaactgaaacttcaagaacaaaaccaaaatctttctgagaactcgaagctagaaagcctacaaaagtctatggaagatttgaaactgcagtttcaagctgctcaaaatgaatggcgtaagaaggaaatcatccagaaaaccaagctcgaagaagacaaactagtcattggggggttgcaggccaacttagatcatttgacaaaaaagcaagagcagctagagcaagagaacaataaattggccgaatccaagcagggtctagaagaacaggtcagagatctaatgttttacctggactctcgagaacaattcaaagacgctgatgatagcgtcaaagaaggtaccgtcttagtacaacagaccctgggaggagcccaggcatctaaaagcaagaagaaacgcaacaagaagaaaaaaccggggaagtga

SEQ ID NO: 1088 - DNA, 2802 bp, Saccharomyces pastorianus
atgagcaatgatccaccttctatagcggcattaccaggcacgcacactcttgataatggtgccagcaatagtgacaaggctgctgggtccaataacaacggcggtgacggattacgattgcctaggaccacggggactctgaacgtcaatgccttacagaatgacggcaatgccgccagtgaagttgacggatataaatctatggatcctgccaaaatcggggacacaagccaggacgacgacaatgtagttgtttcactagatgatcccatccaatttacacgtgtatcttcctcctctgtcatcagtggtatgtcatcatcgatgagtacacattctcacaaagatgaagctaaatctctggatcaagtcaccccaaatgtgaataccaataacatgacctcgaactattctgccgataacacattctccaccataaatgcgtccgaatcagaccaccagtttaatgacactctcatatcaaaactgtcgctgacagattccacggaaactatagaaaacaataccacctcaaggcaccagccgatgattgcatcttccactgccaactcgaataacagttcgaccgatatacgaagagctacaccagtatccactcccatcatttctaaaccatcattgacggccactccaaggcaaatcagttcagcctctcattcatttgcggaccttaagcacaagcaacataaaccaaaggccaaaccgtccaaacctgaattgaaaactaaactgacacctgtgaagaataattattcaccaaagaatacgttgaaaaacccatcgcctcctaaaaagcagatcgaaaagccatactattctctctctacaaaaaaaaggaaaagcggctcaagcagtggcacactaagaatgaaagacgttttttcgtccttcgtgcagaatattaaaaggaactctcaagatgataaaagagcctcctcgtcatctaacaattcttcctcatcatctacaaccacctcattaagaatctctaccccatacaatgccaagcatatacaccacgtaggtgtagattctaaaactggtgagtacacagggctaccagaagaatgggaaaaactgttgacttctagtggtatttccaaaagagaacaacaacaaaatatgcaagccgtcatggacattgttaagttctatcaagatgtcacggaaactaatggagaagataaaatgttcaagactttcaacaccactacaggattgccggggactccatacgcttcgtcgccttcttccaacactgtcaataaatttcctccgccaacaaccgattcccataattatagttccaggggtggcactccactaactaataatgtcatgtctccgaacttgaatacggattctgggccatcgaacgcaaaatttattccaagtagacccgctcccaagcccccttctgcttccacttcaactccgatattaaaatcacccgtcacaaatccatctttcgccaatgtctctccttcacgacaaaatcatatgcccgcaacccctagtagaaccagtacgactagatcatcaatatcaagacatgctactttgaaaaaggaagagcaacctctacctccaatccctccgaccaaatctaaaacatcaccactcatttcaacacctccaccgcccccacaggcgccaccgtcgccatctccattgccacagaaaccaacgataacaccctctaccaaaccggttcaaacaagaagcttgtccaaagaactaaatgagaaaaagagagaagaaagagaaagacgtaaaaaacaattatacgccaagttaaacgaaatctgctccgagggtgacccaagtttgaagtacgctagtttagtgaaaatcggccaaggtgcctctggtggtgtttacaccgcttatgaaataggcacaaacgtctcagtggccatcaagcaaatgaacttggaaaaacaaccaaagaaggaattaatcatcaacgaaatcctcgttatgaagggtagcaaacaccccaacatagttaatttcatcgattcttatgtcttaaagggcgatctttgggttatcatggaatacatggaaggtggctcattaactgacgtggtcacccattgtatcttgacagagggccaaattggtgctgtttgtagagaaaccttaagtgggctgaaatttttacattcaaagggtgttcttcatagagacatcaagtctgacaacatcttattatccatggaaggtgatatcaaattaacagatttcggattttgcgctcaaatcaacgaactgaacttaaaaagaaccaccatggtgggaacaccgtattggatggcacctgaagtggtctctaggaaagaatatggccccaaagtggatatttggtctttgggtattatgataattgaaatgattgaaggcgaacctccttatctaaacgagactcccctaagagcactgtatttaattgctacgaacggtacaccaaagttaaaggaaccagagaatttatcgtcatacttgaaaaaattccttgattggtgtttatgtgtggagcccgaagaaagagcaagtgctacagatttacttcatgatgaatacattaccgaaatagccgaagccaattcttcgctagccccgctagtcaaattggcccgattaaaaaagctagcagaaaacatggatgctgatgaagataatgatgatgacaacaacgaacataacaataacgcaaacgattatgacaacaataatgataacaaagaaattgtaactgaaaatgataaacaaaagtaa

SEQ ID NO: 1089 - DNA, 1236 bp, Saccharomyces pastorianus
atggaaccagctacagacaaatctatcgatagattagttgtcaatgcgagaacaagaagacgtacctcttctgtagggaagattgatctgggtgatacagtgcctgggtttgccgctatgcatgagactacggcgtccaagaatgaggctaagaagagaatgcaggcattaactggggactctaagaaagacagtgatcttctgtggaaggtttggttctcatatagagaaataaactatcgtcatagttggttatcaccctttctcgtactcgtatgcgcatatagtgcatacttttcatccgggaatagaacagaaacaaacccattgcatatgttcgtagccgcatcttatcaggttggtgatactgattcatatggaaaaggtataaaggatttgtgttttgtgtttttctacatgattttcttcacctttttgcgtgaattcttgatggatgttgtcattcgaccatttacgattttcttgaaggtcgactctgagcatcgtcaaaaacgtatgatggaacaaatgtatgccattttctattatggtatctcaggtccctttggcctttatatcatgtatcatagtgatttgtggctgttcaagacacttccaatgtacagaacgtatcctgatataaccaatccatttttgttcaaagtgttttacttaggacaagcagcgttttgggcacaacaagcctgtgtccttgttttacaattggaaaagccaagaaaggattacaaggaattagttttccaccatattgtgacgctgttattaatttggtcatcgtatgttttccattttaccaaaatggggttaccaatttatatcaccatggatgtttcggattttttcctttctttgtctaaagtactaaactacttaaattccatgttcacccctgttgttttcggtttgttcgtgtctttctggatttatctacgtcattttgtgaatataaagatactatggtctgtcatgacggaattccgtcatgagggaagttatgtgttaaattacgccacgcaacaatacaaatgttggatttcgttgccgatcatattggtgctaatcggagctttacaattagttaatttgtattggctgtttttaattctcagaatcttgcatagattgatatggcaaggcattcaaaaagatgaaagaagtgaaagtgactccgccgggagcgacggaaaggaggaatccaaggaaaagcatgaatag

SEQ ID NO: 1090 - DNA, 1398 bp, Saccharomyces pastorianus
atgtcatcatccatgacagaaatgagaaatgccgtattaagggcgacagatcctaaattaagaactgataactggcagtatattctagatgtttgtgatttggttaaagaggatcctgaagataatgggcaggaggtcatggatcttatagagaagaggctggaacaacaggatgccaacgtaattttaaggacgctctctttgatcgtttcactcgcagaaaattgtggttcccgcttgagacaggatattagttcaaaacattttacttcattgatatttgcgctcatcgaaagccattcggtgcatattaccctaaagaaagcagtagctgatatggtcaagcagctgtctgactctttcaaagatgatccgtcattgcgtgctatggacgatttgtatgacaaaattaagagaaaggcaccttacttggtaaaacaacccaatgtgccagaaaagcgtaacatgggcacctcaactgacagttcagacgacgaggaattacaaaaagcgatgaaaatgtctttgttcgaatacgaaaagcagaaaaaactacaagaacaagaaaaagaaagagtttgcgagcctccgcagcaacagcagcagcaacagcagcaacagcagcagcaacagcagcaacagcagcataatcagcataaccagacttctgcagcattagggcagactgttgtgagaagagttcgagccatgtatgacttgtccactaacgaacctgatgaattatcatttcgaaagggtgacgtcatcacagtactggaacaagtatatagagattggtggaagggagctcttcgaggaaggatgggtatattccctttaaactatgtaacgccaattgctgagccatcgaaagaggaaacagaaaatgagagaaatagagaggcaatgatattttcccaaaaaagtactgtagatcaactacataattctctaaacactgcatctaaaacgggaagctcaaatgaagtactacaggatcctcatattggcgatatgtacggttcaataacgcctttaagaccgcaagttacaagaatgttgggtaagtatgcgaaggagaaagaggacatgctctccttacgtcaagtactcgcaaacgcggaacacacatataatgagctaatggaccgcgcagcaaacgtttatatcccacccccagcagcagcggttgcagctccttactccggaatgcccaacactaatgtcgctccggcaatgccacctcagaggaaaagttatccaaaccctgattatgcatcgtactccttgaatcaacatacacataattctgtgaatagtaagcccgacgttccgcagtatggttatgacaatggatactcaattactagtcaaccaccacccggttatgagcaatag

SEQ ID NO: 1091 - DNA, 1074 bp, Saccharomyces pastorianus
atgacgcgagataatcaagattctaacaacagggctagccccacaaataagtctagtgcacagaagacaccgtttgataggaactcatttgactatattgtacgatcaggattggccggaggtatatcaggttcatgtgcgaaaacattaattgcacccttagatagaataaaaatcttattccaaacatctaaccctcattatacaaaatatgcgggctcattggtaggtttagtggaagcagccaagcatatatggatcaatgatggtataagagggttctttcagggacattcggcaactctactaagaatatttccctatgctgctgtaaaattcgttgcttacgagcagattaggaacactttaattccttcgaaggagtttgaatcgcattggagaagattagtgagtggttctttggcagggttatgcagcgttttcattacgtaccctttggatctagtgagggttagattagcatatgagacagaacataaaagagtaaagctcaggaaaataatcaaaaaaatttacacggaaccagcttcaaccacgctaataaaaaatgagcatctacccaactggttttgtcattggtgtaatttttacagaggttttgttccaacagtactcggaatgattccatacgcaggcgtatctttttttgcacatgatttgctgcatgacgtgctgaagagtcctttctttgcgccctattctgtattggaactctctgaagatgatgaactagaaagaatacaaaaaaagcagagaaagcctttgcggacgtgggctgaattgatctcgggtggattagcaggcatggcatctcaaacagccgcatatccattagaaatcattagaagaagactgcaagtaagtgctttatcgccaaaaaatatgtatgaccataaattccaatcaatctctgagattgctggaataatttataaggaacgtgggttacgcggattttttgtaggtctaagcataggttacatcaaagtgacgcctatggttgcatgtagtttcttcgtctatgaaaggatgaaatggaatcttggcatttga

SEQ ID NO: 1092 - DNA, 1290 bp, Saccharomyces pastorianus
atgacaaataatacgctgaaagtaattgcagctacggctcttttgtcggtgttttcaacacggttagctaaggctgcatggaaggagtatacgctttcacatgcggctaacaagaacaagatcgcatcgcaacctcgtcaatatgacaaaaacttatttagggagcaactagctcgtaactacgcttttctaggagaggaaggtatgagaaaggtcaaagaacaattcatagttattgttggtgctggagaattggggtcctgggtatgtacaatgttaattcgctcaggatgtcaaaaagttatgattattgatccggaagatatatctgttgaatctttaaatacacattgctgtgcaacattattagatgttggaaaaccaaaagtcgagtgtttgaaagagcatttgtccaagatcgctccttggtgcgaaataaaagcaagaaccaaagcgtggaccaaagaaaattctgaagaattcttttttgcagatggcgattctccaactttcattgtggattgtctagataatctagaatctaaagtagatttgttggaatatgcctataataacaaaatcaatgtaatatcttctatgggcattgccactaagtctgatccaacccgtgtaagtataaatgacatctctatgactgaatttgaccctatatctcgttgtgtaagaagaaagttaagaaaaagagggattatcacagggattccggtggtttttagcaatgagatgcttgatccacgcagggacgatgtactgtcctctgtagatggagagcactgtgctatcaatgctagtagagatgaagccctgaggcacttaccgaaattaggaaccatgccaggcatttttggtttgagtattgcgacatggattttgacgaaggtttcgggatacccaatgaagaaaaatgaattcaagaataggctaaaattccatgacggcatactagaaactttccaaaatcagatggctcgattaaatggcggtaaagaccaatcatctgtgattgggttgaaagaagtcgggtacatagttgaagaaatgtttagaggcaaatctcctatcagcgggtactctacaaagctagctctaacaaaatgggaacctaacaaagaggtgtctttgaccaaccttgttcttttaacgaaagacgaacaagagattcacgaagaaagggttttgcgagatggcaacaaactaactgatgtttattctagtgaagttttgaacgctataaaaaggactttcaaagaggaagagtattattcttag

SEQ ID NO: 1093 - DNA, 1359 bp, Saccharomyces pastorianus
atgaatgccctaaaatatttttcgaatcatttaataactgcaaataaacctaagaaaacaataaatgttgaggtgacaaaggtccaagactcacttagtgcttcaaatgggactttcgatacacgtgccagtaacattgaaaacgatcacaccgtcaaagcgaaacatctgcgcagctcttccacagagggttccaacgaatccaagcaagatgaaaaatacaacggtcctgtttcgacaaagccaaaagcattatctcgtattttaaaagagaaaattgtgtcaattctatgggcaatactacttttccttccatattacttgataattaaacctttgatgtctttatggttcgtttttaccttcccattaaacgtgatcgaacgtcgtgtgaaacatactgataagaggaataaggaatcaggcgatagtgggcatgagtcgtctacagattcaagtcatagtggtgatttcaatgagaaacaagatgctgaaaatcggaatctaaacacaattcctgaaatagtggaagatgatttgaacgctggtgatgagatcattctacaaagagataatgttaaaggttcattattaaaggctgcagatgacgcacaatcagccaaatcaaaatcaagaaggtactctaaatccgaaacatcacttactaatcattcaactgctaatgccgtatttggcacaaaacgtatggggaggtttttgtttccgaaaaagctcatacctaaatcaatattaaatacacaaaagaaaaagaaattggttatagaccttgacgagaccttaattcattccgcttctcgaggtacaacacatagtaattcttctcaggctcatttagtggaagtaaagtttggaataagcggaatttctacattatattttattcacaagagaccctattgtgatttgtttttaacaaaagctagtaaatggtacgaccttattatttttacagcatcaatgaaagaatatgctgatcctgtgatagattggttagaaggctcctttgcagctagtttttcgaagagatattaccgttcagattgtgttttgagggacggtgttggctacatcaaagatctaagcattatcaagagttctgaagaaaatgggaaaggcagtcctctgtcttctttggatgacgtaattatcatagataacagtcccgtaagttacgcgatgaatgtagataacgcaattcaagtagaaggttggataagtgacccgacggatacggacctactaaacctattgccatttttggaagctatgagatactcaaccgatgtcaggaatatactggcactgaaacatggagaaaaggcattcaatatgaactag

SEQ ID NO: 1094 - DNA, 1419 bp, Saccharomyces pastorianus
atgggttgcacagtgagcacacaagcactggatgacgaaagtgatccgtttctacagaataaaagagccaatgatgctattgagcaatcattgcaattagagaaacagcgtgataaaaatgaaataaaactgttactgttaggtgctggtgaatcgggtaaatcgacagttctgaaacagttgaagctgttgcatcaaggcggtttctcccatcaagaaagattacagtacgctcaagtgatatgggcagatgctatacaatcaatgaaaattctgattattcaggcaagaaaattgggtatccaactagattgtgatgatccagtcaataacaaagatttatttgcatgtaaaagaatattactgaaagctaaagctttagattatattaacgccagcgttgctggaggttctgaatttttgaatgattatgtactgaaatattctgaaaggcacgaaaccaagaggcgtgttcaaagtactggaagagcaaaagcagctttcgatgaggacggaaatattgctaataaaaggagtgatattgcgaacggtaatgatacagtggcaggtagtgatgaagacaataaaaacagtagtagtaggctcaatctacaggacatttgtaaagatttgaatcaagaaggcgatgaacggatgtttgttaaaaaaacgtcaagagaaagtcaattgcaaaacaaagggaattttattcacgaggacatcgctaaggccataaagcaactttggagtaatgacaaaggtattaaacagtgtttcgcacgttccaacgaatttcagttagaaggatcggcagcgtattatttcgataatattgagaaatttgctagcccgaattatgtctgtacagacgaggacatcttaaagggccgtataaagactacgggtattacagaaactgaattcaacattggttcttccaaattcaaagttcttgatgctggtggacagcgttctgaacgtaaaaagtggattcactgttttgaaggaattactgcagttctatttgtcttagcgatgagtgagtatgaccaaatgctgtttgaagatgaaagagtcaacagaatgcatgaatcaataatgttattcgacacattattgaattccaagtggtttaaagatacaccattcatcctatttttaaacaagattgatctattcgaagaaaaagtgaaaagcatgcccataagaaaatacttccctgactatcaaggtcgtgttggcgatgcagaagcgggcttgaaatattttgaaaagatattcttaagcttgaataagacaaataaaccaatttatgtgaaacgaacatgtgctaccgatacccaaaccatgaaattcgttttgagcgccgtcactgatctgataattcagcagaatttaaagaagagtggtattatatga

SEQ ID NO: 1095 - DNA, 282 bp, Saccharomyces pastorianus
atgtctttcctaggattcggcggcggtcaacctcagttatcatcccagcaaaagattcaagctgcggaggctgaattggatttagttactgatatgtttaataagttggttaacaactgttataagaaatgtatcaatacttcctactccgagggtgaactaaacaagaacgaatctacgtgcttagacaggtgtgtggctaaatactttgaaaccaacgttcaggtcggtgaaaatatgcaaaaaatgggccagtcctttaacacggcaggtaaattttag

SEQ ID NO: 1096 - DNA, 1644 bp, Saccharomyces pastorianus
atgcctatcctatcactatcctcaacacgggacaacgtgtttgcaaaaatatacgattatctcaaggtattagttcaacaggtgattgtgccccatttagaggatgagaagtcgcaaaaacgtactccttccgtcaaaagtgaagccaccatacaggaacactctcacaaagactattctgctcccaaagatcccaaagagagcgacccgagtgatgtttgccagttatttcccagccagaataacaatcagttgagcgtgacgtcaaaatcatcagttgttccttgcgctttgaactttgaaagcctgcaaacacccttttctattgacgtggatgaaaacggcaccgtaagaacgcaattgaacttgggtgaaataatttcacagggtcctgttaacaatgacctaacaaagtcacagaatgatttgttaagctcacccttactcgatgaatcctacataaataatgaacagtataaagcccttttcccctctagctttcttccgataacacctataagtaatgtgattacccctgcatcaaagaaaagtgttgacaactctccgctatccgatggcgttcagggtgctacccacgaatcgtccgaaactttgccatacatatgccactactgtgattccaggttccgaattagagggtacctaacacggcatataaaaaagcatgccaaaaggaaagcttaccactgtccattttttgatggcagtatctcacaagagttgcgctgccacaattcaggtgggttcagcagaagagatacgtacaagacacacctgaaatctagacacttcaactatccagaaggtattaagcctcaatgccgtaacaaatcttctggagcgtgtgctcaatgcggagagtattttagcagcagtgagagttgggtggaaacccacattgaagctggaagttgcaaggggttaccagaaggatactcagagagaatacgagagaagaagaagacgtccaaaatgaaaatgataaagaccttagacggccaaacaagattcatttcttcagaggaaagtgttcttgaaccaagagggttactaaatggaaatcccacggaagcagtaataaatgccaagcagtcccacagagacgacaccctgccgacaaaaacagggggaaatgaaatcgctacgaacactcaatggttcgaacacaaacaaatccccaaaccttcgcaaactacaacgaaattagaatcacaggtaactacggatattcaaaactccaaaaatgcgccaattatatctccccccatcatgtcacctcaaggcacatctcttgtagcccaggaatatcaatcatcaaaatatacactacatatgggctccccagccttatcctccgtttcatcagcattatctccactttcaggggacccaatcgcaagtgcggaatcagacaaactatacccattagactcggagcaatcgtttttagaatcggacgggatggacgagcacacaattggccacctacagaagagtaacatgatctccataaacgagatattagaaaagcaaatgaatttcgagttactagggcgaaatcacttgaaggaaacgcaagattatttagctttatacaagaaggctagtggggccgaattttag

SEQ ID NO: 1097 - DNA, 1593 bp, Saccharomyces pastorianus
atgtctgctaccaagtcaatcgttgcagaggctttggaatacgttaacattggtttgagccattttatgggcttaccattggcccaaagaatttctttggtcataatagctccatttatctacaatatcgtatggcaattactatattctttgagaaaagaccgtccacctctagttttctactggattccatgggtcggtagtgccgttacgtacggtatgaagccatacgaattcttcgagcaatgccaaaagaaatacggtgatattttctcgtttgttctattaggtagagtcatgactgtttatttaggtccaaagggtcacgaatttgttttcaacgctaaattggctgacgtttccgccgaagctgcttacgctcatttgactaccccagttttcggtaaaggtgttatctacgattgtccaaactctagattaatggaacaaaagaagtttgttaaaggtgctttgtccaaggaagctttcaagtcttacgtcccattgattgctgaagaagtttacaagtacttcagagattccaagaacttccgtatgaatgaaaaatcttcaggtaccattgacgtcatgattacccaaccagaaatgaccattttcactgcttcaagatctttgttaggtaaggaaatgagacagaaattggacaccgactttgcttacttgttcagtgacttggataagggtttcaccccaatcaatttcgtctttccaaacttgccattagaacactacagaaagagagaccatgctcaaaaggctatttccggtacttacatgtctttgattaaggaaagaagaaagaataacgatattcaagatagagatttgattgattccttgatgaagaactctacttacaaggacggtgtcaagatgactgatcaagaaattgctaacttgttaattggtgtccttatgggtggtcaacatacttctgctgccacttctgcctggattttgttgcacttggctgaaagaccagatgttcaagaagaattatacgaggaacaaatgcgtgttttggacggcggtaagaaagaattgacttatgatttactagaacaaatgccatttttgaaccaaactatcaaggaaactttgagattgcaccatccattgcactctttgttccgtaaggtcatgaaagatatgcacgttccaaacagttcttatgtcattccagaaggctaccacgttttggtttcccccggttacactcatttaagagacgaatatttcccacacgcccatgaattcaacatccaccgttggaacaacgatgcctcctcttcttactctgttggtgaagaaatcgattacggtttcggtgccatttccaagggtgttacttccccatacttgcctttcggtggtggtagacatagatgtattggtgagcattttgcttactgtcagttaggtgttttgatgtctatcttcattagaactatgaaatggcgtttcccagaaggtaagagtgtcccatctcctgatttcacatctatggttactcttccaattggtccagccaagattatctgggaaaagagaaacccagaacaaaagatctaa

SEQ ID NO: 1098 - DNA, 702 bp, Saccharomyces pastorianus
atgtttgccaaaacagcagctgtcaacttatcgaaaaagggagggttatcgttgctttccaccacagcaaaaagaactaaagtcactttgccagacctaaagtgggattttggtgctttggaaccttatatttcgggccaaatcaacgaattgcattacaccaagcatcaccaaacgtatgtgaacggattcaacactgctgtagagcaattccacgaactctcgaatcttctggccaaggagccaagcccagcaaacgcaagaaaaatgatcgctatccaacagaacatcaaattccacggcggcggcttcacaaaccattgcctgttctgggaaaacctggctccagagtcacaaggtggtggtgagccacccaccggcgctttggcaaaggccattgacgaacaattcggcagtttggacgagttgatcaagttgaccaacacaaaactagccggtgtgcaaggttccggatgggccttcatcgtcaagaacctgtccaatggaggcaaactggacgttgtccaaacctacaaccaagacaccgtcaccggtcccttggttcctttggttgccatcgatgcctgggaacacgcctactacttgcagtaccaaaacaagaaggtcgactacttcaaaaccatctggaatgtagtcaactggaaagaagcatccagaagattcgacgccgaaaagatctaa

SEQ ID NO: 1099 - DNA, 1572 bp, Saccharomyces pastorianus
atgagtgaagattttttgcatccgccgttccagacgtatccttcaaaggacagtgaagggaaaaaacatattgtcattgtaggcggtggcattattggttgctgtacagcatattacctgacacagcacccaagtttcagtccttccactcatcacattaccataatcgaatcaaggcgtattgctggaggagcttctggtaaggcaggcggtttgcttgcatcttgggccttcccgcatcaaatcgtgcccctgagtttccaactacatcaggaattaagcgaccagtatgacggagagaacaactgggactacaggagactaacgaccgtctctttagaagctgatgtgcgggaggaagtactcaaaaactacgagaaactgagcaagaaggcatataaccttaatgtcccacctccaaagaaaaaaccgggctttatatccaataagtttaacatcggagactcgagctcatccttaagctcttccgcatcttcttcaaagaacgaatacactagcaacgaagaggaaggattggagatgcacgcttctggctcagtgcctagcttacattccttaacaaatgaacgtatgaagagccatacaaatagcatgtccgaccttgattctgtcagtcccgccgagcaattaagggaaagcaatattcataatcctttgccaactgatttgagctggataagaagagaattggtaaacgattggtcatcgctaggtggcaccgacactacggcgcaacttcacccttacaagttcacccattacatgctgtcgaaagcaatggaaacaggtgctgttgatcttttactggggaaagtggtgggagtcaagcgtgacgaaatggactgcgttcgttcccttacgtaccttccctcggtagtgaaaaatcgcaggaatagtaaaggccaagcagaaagtccagagattaaactgggtaccatattcaacgatgaaaatgctaaacccatcgaaatcaatgatattcaacagatcgtgttgagtatggggccctggacgtccaaaattctgaaagattgtccaatctctggattgagagcgcattctatcactatcaaaccaagcgaaaagacagtggctccgtatgccatacttgctgaattaaaagttaatgagcgtgaatttttttcccctgaaatgtatgcaagaaaagacgaagtgtatgtttgtggtgaaggtgacactttggtaaacatacctgaaagctcggatgacgttgaggtggttaccgggaaatgtgatgagctgtatcattacgtatccaagttgtccccaacgctatcaaagggccatattttgaggaagcaggcatgttttctaccggtgttgaatgttcctacaagttcaggtcccctgattggggagaccaacgtaaaagatctctatatcgcaagcggtcactcctgttggggtatcaacaatgcgcccgcgacaggcaaattaatggcggaaattctacttgatggtgaagcaacttctgccgaaatctcaagtttggatccaaagctatatttcgacgctaccattctctcataa

SEQ ID NO: 1100 - DNA, 1341 bp, Saccharomyces pastorianus
atgattgtaaggcgtttcttttcaatttctagtcgcaagtccattttgaagaagcctcagtatgatgtgaaaaggataatagagaatattccccagtatcaaacttcgattcaaaacagagagctggtagaagctgaaaatattacatcagacttacaactgctgggtgagcgatatcaatatatcaaaaagattgacaaagccattgcagatattcaaatacaaagaaaatcgattgaagcacaaattagaagggatagaacaaaaatcacagaatattcagctgccttgaaagttcttaaagagcaatatcaagacaaggacggagaattgtcagagttgaaaataaaggtctctgggacttgcgaagcacttccaaatctcttggatcccacggttccattaaagaagccacaggttgtccaatggataaatcctttgaaagagtatgaaccgtcagaaacccaggcgcatgtagatatcatgcttaaaaagaaaatgctggacttgcagactgcctccaacattacgggaacatcatggtactacctactgaacgatggagcacgccttgaacaagctttagtctcatatgctttaaaaaaagcaaacgaaaacggatttgcaagctgtgtgcctccaagtattacgaaaagagagttgattgatgcctgcgggtttaatccaagagacatgaacaacgagaaacaaatttatgggctccaagatacgaatttaggattagttgccactgcagaaatatctatggcgggactaggcgcaaataaagttcttgatctaagctctgctgaaggttctaaaaaacttgtaggagtgagcagatgttacagagccgaggcgggcgcaagaggtaaggatacgaagggtctttatcgtgtccacgagtttactaaagtggaactcttttgctggagcaagccggaaaatagtacaaaaattcttgaggaaataaaacaactccaaacatcaattgtcgaggaactaggattatcagccaaagtgttgaatatgccttcaaacgatcttggtaatcctgctttcaaaaaatacgacattgaggcttggatgccaggaagaggtaaatttggtgaaattagtagcgcctccaattgtaccgattttcaaggtagaagattgaatacaaagtacaaaaaggatgacacaggaaagcttgagtatgtgcacacactgaacggtactgcaatggcagttccaagagtgatgattgccctggtagagaacttctatgatcccagaactggcgagatatttgttcccgaatgcttgagggagtttatgaatggccagcaatatatttaa

SEQ ID NO: 1101 - DNA, 717 bp, Saccharomyces pastorianus
atgccgatcaacattcgcagagcgacaatcaatgacatcatttgtatgcaaaatgccaaccttcataacctgcccgagaattatatgatgaaatattatatgtatcatattctttcttggccagaaacttcctttgttgctacaactacgactttagattgtgatggcgcagatgaacaagatgaggaagataagttggaattgaccctggatgggaccaatgatggcagaaccatcaaattggatccaacgtacctggctcctggcgaaaaattggtaggctacgttttagtaaagatgaatgatgacccagaccagcaaaatgaacctccaaatggtcacatcacgtctttaagtgtcatgagaacatatagaagaatgggaattgctgaaaatttaatgagacaagccttatttgcattgagagaagtacaccaagcggaatacgtatcattgcacgtgagacaatccaacagagctgctttacatttatatagagacacattggcctttgaggtgttgagcattgaaaaaagttactaccaagatggtgaagatgcatacgctatgaaaaaagtattaaaattagaagagttgcaaataagcaatttcactcaccgccgcttgaaagaaaatgaagaaaaactggaagacgacttagaaagtgacttgctagaagatatcataaaacaaggtataaatgatattgttgtataa

SEQ ID NO: 1102 - DNA, 897 bp, Saccharomyces pastorianus
atggccccaaaaaagcgcttcagaccactagaaatagggtcaccgaaacattctaaaaggaaagttcaaaaaccacttcaggagaaaactacaaacttgagagtttcgccatttgccctctctagaattgataaagatgctaagagtaaagagtccgctaaggttgagaaaacgagaaaggtgatctcagaaaacatatttaattcaaaacacgttgatttaaggctggagactcctcgcccgggcttgaaatttgttagcgaccctcaaaagggttcaaaagctccagatgtccgatatctaaaaaataaatccagtcatgccttgaaagatgaaaggcaagcaatagtgtcgccctcctttgataaatcattgaagtttgaggacatagagcagcctccaaaatccacttcaacaccggtttccgctcagccttctcaaataagagtagaaagagaaccatccatgtttccgctcccgtattatattgctccctcgcccatgtataacttcaacccgtatcaaaattttacagggaaccctgtatttctgacaccgtgctataatccaagtgtgaattatgcaatccccgttcaacaaccggaattgctttatccaaatggtaacgtgtacgattcaccattgtttgacaaagtaaggcacccacaccaaataaatgacccagatagcttgaatagagaacaacattacgaataccgtccaatatttcctatctcgatttctaacaacggggattttgttgggcaagagacacctagaatagcatcaaagccaagcaataagagattctcaaactctcaagatgttgattattctgattatgaatcgagcggacagaatgcaacctatcatgatagcaaatctcctcttgattag

SEQ ID NO: 1103 - DNA, 2061 bp, Saccharomyces pastorianus
atgcctgtctccgaagcctttgctaagttgtgcgtaactgaaaagcctgctgccgaatctgccgttgcagtgaagtccctggttttcaagccaaagacaccaaagtctgccactcccgtccccatcgtagtggtggccttgcagtctaccactactggctctccattaattgcgagcgccacttctaccaaggatccaagattagctcgtgatgatttggtcaagcaagcgttccaatctgagtctgccagagctttcattctgggcgatttggctaacgccacaaccgatttccacttactgattgaccaagagttgagcactgtggacggtgacaccgttttgcagctaaacgataccacgttcatgaagaaggctgacatgattaagtttctaagcgattttgaaaaattccagaaggtggttgatttctctcaggaagtgaccaaggaggccgctaccgagggcaagaaacaacagaagaagcagcaaccttctaaggctgctgcagctgccgcagctgccgctttggaggacgccaaattgatcggcatcaccgtagacaaggctttggacttcccgggctggtaccaacaaatcttgaccaaaggtgaaatgttggactactatgatgtttctggttgttacatcttgagacctccttcttattccatttgggaaagcatccagagatggtttgacgacaaaatcaaggccattggtgtgcaaaacgcatacttcccaatgtttgtctcctcccgtgtcttggaaaaggaaaaggaccatgtcgaaggttttgctccagaggttgcctgggtcaccagagctggttcttccgaattggaagaaccaatcgcaatcagaccaacttctgaaaccgtgatgtacccctactacgccaagtggatccaatcctacagggacttacctttgaaactaaaccagtggaattctgtcgttagatgggagttcaagcaccctcaacctttcttgagaaccagagaattcttgtggcaagaaggtcatactgctcatttgacttctaaggacgctgaagaggaggtcttgcaaatcttggatttctacgctggtgtttacgaagaattattagccgttcctgttgtaaaaggtagaaagactgaaaaggaaaaatttgctggtggtgattttaccacaacctgtgaaggttatattccacagaccggccgtggtattcaaggtgctacctctcatcacctgggccagaacttctccaagatgttcaacttgtctgtggagaacccattaggttcagaccacccaaagatctttgcttaccaaaattcctggggtctatccacccgtgtcatcggtgtcatggtcatgatccattccgacaataaaggtctggttatccccccaagagtgtctcaataccaatccgttgttattccagtaggtatcacaaagaagacttctgaagagcaacgtaaacacattcacgaatccgccagaagcgtggaagctcgtttaaagaaggtcggtattagagcctttggtgactataacgataattatactccaggctggaaattctctcaatatgagttgaagggtacaccaatccgtattgaattgggtcctaaggatattgaaaagaaccaagttgtcgttgtccgtagaaacgactccaagaaatatgtcgtttcccttgatgacttggaaactcgtattccagaaatcttggaagagatgcaaggcgatttattcaaaaaggctaaggaactatttgacactcacagagttgtcattaatgaatggagagattttgttccagctttgaacaagaaaaatgttattttggctccatggtgtggcatcactgaatgtgaagaagacattaaagaatcttctgcaaagagagacgatggtgaagaatttgaagaggacgacaaggctccaagtatgggtgctaagtctctatgtattccatttgaccaacctatattgaatgatggtcaaaagtgtatcaagtgtgaacgtactgctgttaactactgtatgtttggtcgttcttattag

SEQ ID NO: 1104 - DNA, 1449 bp, Saccharomyces pastorianus
atgctaaggaatagcgttaagagattgtattccaatgtcactagaacagaaaatttcaaactttcgtcactctcgaacgggttaagagtggccacatccaattctcctggacacttcagtgccttagggctctatatcgatgcagggtctcgttttgaaggtagaaatttgaaaggttgtacccatatcctggacagacttgcgttcaggtcgaccgagcatatcgaggggagggcgatggctgagacgcttgagttattgggtgggaactaccagtgtacatcgtctagggaaaatatgatgtatcaggcctcggtatttaatcaggatattggtaagatgctccaattgatgtccgagacagtgaggttccctaagattactgaacaggaactacaagaacagaaattgtcagcagagtacgaaatcgatgaagtttggatgaaacctgagctggtgttgcctgagcttttacatacggcagcatactctggagaaacattggggtcccccctgatctgtcccagagaacttatttcttccatttccaagtactacttaatggattacaggaataagttttacactccggaaaatactgtcgcggcatttgttggaattccccacgataaagccttggagcttgcagaaaagtatttgggcgactggcaatctactcacccccaaatcagcaagaagacctcccattacaccggtggcgaaacttgtatcccaccagcacccgtttttgggaacttgccagaattattccacattcaggtaggatttgaaggtcttcctatagatcatccagatatttacgctttggcaactttacaaaccttgcttgggggaggcggttcattcagtgcgggtggtcccggaaaggggatgtattcccgtttgtatacacatgtcctaaaccaatattattttgttgagaattgcgtcgcattcaaccactcttattctgactcaggcattttcggtatctcactatcttgcatacctcaggcagccccacaggcagttgaggtgattgcacaacaaatgtataacacatttgctaacaaagatctgaaattgactgaagacgaagtttctagagccaaaaatcaattgaagtcttcactgctaatgaatttagagtcaaaactcgtggagttggaggacatgggtagacaagtcttaatgcatggccgtaaggttcctattgacgaaatgataaataagattgaaaatctaagaccagacgatatttcccgtgttgctgaaatgatatttaccggaaatgtaaataatactggtaagggtagaggtaaacctaccgttgttatgcaaggggatagaagcgcctttggtgacgtagagcatgtattgagtgcatatggactaggcaaaaatgcctccattaaaaacgatagctccaagaaaactggttggttttga

SEQ ID NO: 1105 - DNA, 1074 bp, Saccharomyces pastorianus
atggttcgcactttcaagatcaaagtcccagcttcttccgccaatatcggccccgggtacgatgttcttggtgtcggtctttctctattcttggagttagaagtcaccatcgactccagcctagctcacgagacaaacgacgaccccaacaactgtaagctgtcctacaccgaagacagtgaaggctactcctccgttccattgcgttcagatgctaatttgatcaccaggactgcactatacgttttgcgttgcaacaatatcagaaactttccatccgggactaaaatccacgtttctaacccaatcccactgggccgtgggttaggctcctctggtgctgctgttgtagcaggtgttattttggggaatgaagtcgcccagttggggttctccaagcaacgtatgttggactactgtttgatgattgaacgtcatccagacaacattactgctgccatgatgggcgggttctgtggctcatttctaagagacctgactccacaagaggtggagagacgtgaaatcccattgtctgaggtgcttccagaaccctctggtggtgaggacactggactagtccctccactaccccccaccgacatcgggagacacgtcaaataccaatggaacccagccatcaagtgtattgctatcatcccacaatttgagttgtctaccgctgattccagaggcattcttccaaaggcctaccctacgcaagatttggtcttcaacttgcaaagactggccgtattgaccactgctttgaccatggacccacccaatgccgacttgatctaccctgccatgcaagaccgcgtccaccagccttatagaaagacattgatcccggggctcacagagatcctatcctgcgtgaccccctccacctacccaggtcttttgggtatctgcttgtcaggtgcaggcccaaccatcttggccttggctactgagaacttcgaggatatctcgcaagaaattatcaacaggttcgtcaagaacggtgtcgagtgttcctggaagttactggagcccgcttacgacggtgccagtgttgagcagcaatga

SEQ ID NO: 1106 - DNA, 2988 bp, Saccharomyces pastorianus
atggtggacgaaagcgataagaaacaacagactattgatgagcaaccccagataaatgccgaaaagcaaacttcaagcaagaaggataaaaagaaggaggaagaggagcagctatctgaagaagatgcaaagcttaaagcggacttagagctacttgtcgagagactgaaagaggacgacgcatctttgtatgatgcatccttgaatgctttgaaggaatccattaaaaactccacaagttctatgaccgcggtccccaaacctttaaaatttcttcgtcccgcatacccagacttatgtgctatatatgataaatggacggattcgaatttgaagtcctctttagcagatgtgttgtcaatcctagctatgacatactctgaagatggtaaggatgattctttgagatatagattgctttctaacgtctctgatttcgaaagctggggtcatgaatatatccgtcatttggccttagagattggtgaagtatacaacgatcaagtggaaaaggatgctgaagatgagacatcctccgaggaatctaaaagcgaggaatctttgactaaagctggattcgatttctccaaggaagatatcttacgtctgtgtttagatatcgttccgtattttttgaaacacaacggtgaagaagatgctgtagacttgctcttagaaattgaatctattgataaactaccccaatttgtagatgaaaacactttccaaagagtttgtcaatacatggtcgcatgtgttccacttttgccccctcctgaagacgttgcatttttgaaaaccgcatattccatttatctgtctcaaaatgaactaacggatgcagttgccttggcagttagattaggagaagaagaaatgatcagatccgtttttgatgctactagcgatccagtaatgcataaacagttagcatacattttagccgcacaaaagacatcctttgaatacgagggcgttcaggatataattggtaatggtaagttgtcagaacactttttatatctcgctaaagaattgaatttaactgttccaaaggttccagaagacatctataaaagtcatttggataactcaaaatccgtattctcgagtgctggcctagattccgcccaacaaaacttggcttcgtcattcgtcaacgggtttctaaacttaggttactgcaacgataagctgattgtggataatgacaactgggtttataaaactaaaggtgatggtatgacttctgcagtggccagtattggatctatataccagtggaacttggatggtttacaacaactagataaatacttgtacgttgacgaaccagaagttaaagcgggtgcgttgttaggtattggtatttccgcttcaggtgtgcatgacggtgaagtcgaaccagctttgctgcttttgcaagattatgttactaatccagatgttaaaatcagctccgcggctattcttggtctaggaattgctttcgccggtagtaagaatgatgaagtgttgggattattgttaccgatcgctgcatccactgagtcacctatcgaaactgcagccatggcttcattagctctatctcatgtttttgttggtacttgtaatggcgatatcacaacttctatcatggacaactttttagagcgtacacctatcgaactgaagactgactgggtcagattcctggcgcttgcgttgggtatcctttacatgggacaaggtgaacaagtagacgatgttctagaaactatcagtgctatcgaacatccaatgacttcagctattgaagttttggttggttcatgcgcttataccggcacaggtgatgttttattgattcaagacttgttgcatcgtttaacccccaagaacgtaaagggcgaagaagatgctgatgatgatgaagaagatgctgaaggccaaactaacagtataagcgatttcttgggtgagcaattaccagaaactgccaagaatgaagaagttgagagtgaagtcgacgaaatggatgttgatgctgaaggagaggaaaccgaaatcaaggctgaagtcacagaaaagaaaacggatgaaactttgggaagtgaagagaaaaaagttgaagacggagaaaagggaaagtctaccgataaagataccgctgcagatgaaaaaactgaagacgaggaagaagaaaaagaagcaggtgtagtcgatgagcttgcgtatgctgttctgggtattgctttgattgcccttggtgaagatattggtaaagaaatgtctttgcgtcattttggtcacttaatgcattacggtaatgaacacatccgtcgtatggtacctttggcaatgggtcttgtttctgtatctgatccacagatgaaggttttcgacactttaacacgtttctcgcatgatgctgatttagatgtttcaatgaattctatttttgccatgggtttatgtggtgctggtactaacaacgcaagattagcccaacttttgagacagttagcaagttattactcacgtgaacaagatgctctgtttatcacaagattagcacaagggctattgcatttaggaaaaggtactatgacattggacttgtttaatgacgctcacgttttgaataaagtcacattagcatcaatcttaaccactgcagttgggttagtatcgccaagtttcatgttgcagcaccatcaattgttctacatgttgaatgccggtataaggccaaaattcattttagcattaaatgatgaaggagagccaataaaggtcaacgtacgtgtcggacaagcagtggagactgttggacaagcaggtagaccaaaaaagatcactggttggattacacaatctacacctgtcttattaaatcatggtgaaagagcagaactagagactgatgaatacatcagttatactcgtcatattgaaggtgtggtgattctaaagaagaaccctgattaccatgaagaagagtaa

SEQ ID NO: 1107 - DNA, 2457 bp, Saccharomyces pastorianus
atggaggacggtggagaagaagtagagcgcattcccgatgagttgttcacgtcaaaaaagaagcaattgttagatagactcataagagtcggaataattctcgtgttcctggtatggggtaccgttttagtgctgaaaagcataccataccattcgaaaataccagattatcacgaacccaaccctgactacacaaaggatggaaaattaaaagtatcctttgctaacgttagaaacaatacgtttttgcccaaataccatgacctgcagtggattaatgccattggaacggaagagagtgacttgggcctctatgttacgtttatgaacgatagttatgtgatcaaatctgtttacgaagattcatatcatgacgttcttttgaaggggaaaacctttatccataatggtcaaaacctcacagtgcagtcaatgacagcgtctccggacctcaaacaactgttgatcaggacaaacagtgtccaaaattggaggcactccacctttggttcttattttgtctacaataaagaaagttcatcatttgacttgattggaaacgacgtagctttggccatatggtcccctaattctaacaatattgcatacgtgcaagataacaatatatacgtctattctacagaatcgaggaaaactacacgggctgtaactgatgacggaaatcccttcctcttcaacggtaagccagattgggtttacgaggaagaagtctttgaggacgacaaggcgttgtggtggtcaccaactggtgattatctggcgtttttaaagatcgatgaatcagaagttggtgagttcattattccctattatgtccaaaatgataaagatgtatatccagaaatgcgtagcattaagtacccaaagagtggtacaccgaatccccatgccgagttgtgggtctactgtatgaaagacgaatcatcgtaccaccctagagtaaatggagacggaaagggttcaagtatattgattactgaacttacatgggtcggagatgaggacgttttagttaagactactgatcgttcctcagatatgctaacggtatttttagtggacacgaatgcaaaatcttcatacgctgtgagaaatgaaagtgcccatgggggatggtgggagattacccataatactctctttattccagcaaatgaaacgcttggtagacctcataatggttatgtcgatattctaccaataaatggttataatcacttagcctactttgagaatagtaataacacacactacaaagtactgacaactggggattgggaggtagttaatggaccacttgcctttgattcaaaaatggatcgtctttattatatttctacacaaaagcactcaaccgagcgccaccttcactatatagatttccagtcacaacccaagatgcatcaagttactgatattttcaaagaaggtgtattcgatatatccttttcttcaggtaggaggttcggtttactcacctataaaggacccgacgttccataccaaaaaatcgttgattttcattcacacaaaacagacacatatatagaagggaacatattaggcgaaacattatactatttggagagaaacgaagaaatcagcaaaaatttagaagattattcgattcccaaaaaaatattccaggagttaaatttgggtaaggatgaatcgggagcggacatattggtgaattcgtacgagatcctcccaaacgattttgatgcaacgttaatcgattattatccagtttttttctttgcatatggtggaccaaattctcagcaagtcatcaagacattttctgtaggtttcaatgaggtcgtagcttcacaattaaatgcaattgtagttgtcgtcgatggtcgtggtactggtttcaaaggccaaagatttagatcgcttgtccgtgataagcttggcgattacgaggcccgtgaccaaatatctgcggcttccctttatggttccctgagtttcgtggactcgcaaaagatttccttatttggttggtcgtatgggggatatttgactctgaagaccttggaaaaggacgcaggagaacactttaagtacgggatgtctgttgctccggtaaccgactggagattctacgactctgtctataccgaaagatacatgcacactcctcaagaaaactttgacgggtacgtggaatcaagtgtccacaatgtcacagcgttggcccaagtaaacaggttcctactaatgcatggtacaggggatgacaatgttcacttccaaaattctctgaaatttctagaccttttgaacttgaacaatgtcgaaaattacgatgttcatgtattccctgattctgaccacagtataagatatcacaacgcgaatgtgattgttttcgacaagctgcttgcttgggtaaagcatgcatttaatggggagtttaccaagtaa

SEQ ID NO: 1108 - DNA, 885 bp, Saccharomyces pastorianus
atgggtttaacagtgccttttaagcaagttgacgtattcaccgaagttccgtttaaaggaaacccaattgcggtgataaacttcttagatattgacgaaagtgaagttacccaagagcaattacaagcaattgccatttggacaaacctgtcagaaacatcttttctatttaaaccatctgatgaaaagtacgactacaaactaagaatctttacctcactatctgaattaccatttgctggtcatccaactattggttcttgtaaggctttccttgagtttacccagaataccactgcaacttcgctcgttcaagaatgcagagcgggagctatcccattaacagtcaacgagggactgatcagcttcaaagctgcgttatttgacttcgaaggtatatctgatgaagtcattactggttacgaacaatcacttggcttaaaattcattgtggctccagcactgttgcgcactggaccaaactgggttgttgctttagtagaggacgcagaaacttgtttcaacgccaatccgaacttcactatgctcacagagcaaacaaaacagaataaacattgtggagttattttggcaggtgtcaagaagaatgcatcgattaaaaactcatatgaaatgagagcattttctccgttggacaaggtcgatgaagatcctgtttgcggaagcggttctgtggcacttgcgagatatttacaagaactttacaagttcgaagaaaccacgaagattaccatttctcaaggtggaagattgggaagggatggccatattgtagctagcattataaaagagacggatggtagcacttcataccatgtagcgggccatgcgataactgttgtcaatggcaaaattacactttaa

SEQ ID NO: 1109 - DNA, 885 bp, Saccharomyces pastorianus
atgagtttaacagtgccttttaagcaagttgatgtattcactgaagttccattcagaggaaacccagtcgcggtgataaacttcctagatactgacgaaagtgaagttactcaaaaacaattacaggcaattgcaaattggacaaacctatcggaaacaacctttctatttaagccatccaataataaatgtgattacaaattaagaatttttaccccaaagaatgaattgccattcgctggtcatccaactattggttcctgtaaggcttttcttgagtttaccaagaataacactgcaacttcgcttgttcaagaatgtggggtgggggctatcccattaacaatcaacgagggactgatcagcttcaaagctgcgttatttgacttcgaaggtatatctgatgaagtcattactggttacgaacaatcacttggcttaaaattcattgcgactccagcactgctgcacactggaccggagtgggttgttgcgctagtagaagatgcagaaacctgtttcaatgccaatccgaacttcactgtactcacacagcaaacaaaacagaacaatcatacagggattattttggcgggcccaaaaaagaatgctccgattaggaactcatacgaaatgagggcatttcctacagcggaaaatatcgatgaagaccctgtttgcggaagtggttcggtggcacttgcgagatatcttcaagaactgtacaagttcgaagaaaccacgaatattaccatttctcaaggtggaagattgggaagggatggccatattgtagctagcattataaaagaaacggatggtaacacttcataccatgtggcaggtcattcgatcactgttatcgacggaaagatcactctttaa

SEQ ID NO: 1110 - DNA, 1431 bp, Saccharomyces pastorianus
atgagtgacaagatagagagacatactttcaaagtcttcaaccaggactttagtgttgataagaggtttcagctcattaaagaaatagggcatggggcttacggtatagtgtgttcagcgcggtttgcagaagctgctgaagataccacggtggccataaagaaagtaacgaatgttttttcaaaaactttactgtgcaagagatcattacgtgaactaaaactattaaggcattttagaggccataagaacataacatgtctttacgacatggatattgttttttactcagatggctctatcaatggcctttacctttatgaagaacttatggagtgtgacatgcaccaaatcatcaaatcaggccaacctttgacggatgcccactaccaaagtttcacataccaaatattatgtggtttgaaatatattcattccgcagatgtcctgcaccgtgatttgaagcccggtaacttacttgttaatgccgattgtcagttgaaaatctgtgattttggattagcaagagggtactctgaaaacccggtagagaacagtcaatttttgacggagtacgtggccaccagatggtatagagctccggaaatcatgttgagttatcaaggttacactaaggcaattgacgtatggtcggcaggttgtattttagcggagttccttggtggaaagccagtctttaagggtaaagattacgttaaccaattgaaccaaatattacaagttttggggacgcctcctgatgagaccttgaagagaattggttctaaaaatgttcaagattacattcaccaattaggatttattccaaaagtaccttttgttaatttatacccaaacgccaatgcacaagccttggatttgttggagaaaatgctcgcgtttgatcctcaaaagagaatgaccgttgatgaggcgctagaacacccttacttgtctatatggcatgatccagcagacgaacctgtttgtagtgaaaaatttgagtttagttttgaatccgtcaacgacatggaggacttaaaacaaatggttatacaagaagtgcaagatttcagacagtttgtaagacaaccattactagcagagcaaaagcagcaacagcaacaacaacagcaacagcagcaaattccagaaacaaataacggaaatatggaaatggcagaagaaggatactcaaaacaaatggctgtaccctcaaactctgttccaccacaacaagagtcatttggtatccactcccaaaatttgccagggcacgatacagatttccctccccgacctcatgaaaatatgatggatatgaggtctgcccctgggcccacccctggaatcccgtctcaagatgataatgacacatttttagatcttgaaagagaactggaatttggtttagatagaaagtatttctaa

SEQ ID NO: 1111 - DNA, 2196 bp, Saccharomyces pastorianus
atgttcaggtcgcatgcctcggggagtaagaagcaatggtctaaaagaacttcaaacggcagtgcatctgccgattctgcaccgggccctcatgcctataggcagcaaacactgtcttccttcttcacgagttccaacaaaaagacacccggtgtttcgaaaaactccacaacaacaacaagtacaacaacaacggttattgacttggaaagtggtggtgaaggcaaccaaactaaagtcgcgttgcctaggccgagactggtacggaataactcgtcctctttattttcccagtctcaggatgcgtttggagatgacgatcctgaagcagaattcaaaaaactggtcaatgtgcccagacttaatagctataagaagcctagcagatcgtcgtcgatgaccagctctctgcacaagactgcctccgcgtccactaaatatagaacgtaccagtacgatgaagatgaaaccttgcgagaggttaccagtgtgaagtccggttctagacaactatccttcaccagcacgatcaacattgacgattccagtgcaggggttcctgctgatctggaaaggcctgctaagagatcgaagccttccctggagtttcaaggcttaagactcacagcaccaaagaaaataaagccgctcttaaggaagtcagcatcaagcttggaatcgatgaaccacagaaatgcacttttgtcccccgttgtactgacgaaggagcaagaaatggttgtgagtctgatcatcaaaaaaaggacaaacgtcttttatacaggtagtgctggtacaggtaagtccgtcatcctgcaaaccattataagacagctaagttctctgtacggcaaagaatccattgcgataaccgcctcgaccgggctggccgccgtgaccattgggggctccacactgcataaatggtctggtataggcattggcaacaagaccatagatcagttggtgaaaagaatacaatcacagaaagacttgttggctgcatggaggtacacaaaagttttgatcattgacgaaatctccatgatcgatggtaatctactagataaactagagcaaattgccaggagaatccgtaaaaatgacgacccttttggtggcatccaattggtcttaacaggagatttctttcaattaccacccgtggcaaagaaggatgaaaataaaatcgttaaattttgttttgaaagcgatatgtggaaacgatgtattcaaaagaccatcttactaaccaaagttttcagacaacaagataacgaattgattgatattttgaatgccataagattcggagaactgaacgtcaacatgacgaggacaataagaaacctaaatagggatatagattatcccgacggtattgcccccacggagttatatgctacgaggagagaagtggaatcttctaacgtgaggaaattacaatctttgcccggtgacttgtacgaattcaaagctgtagataacgcaccagaaagataccaaacactattggactcctccctgatggtggataaagttgttgtattgaaggaagacgctcaagttatgatgttgaaaaaccggcctgatgtggatttagtcaatgggtctttggggaaagtcttgtttttcgttacagaatcattggtggtcaaaatgaaagaaatctataaaattgtagatgatgatgttgtcagtgatatgcgacttgtgagccgggtcgtcggcaatcctattttgaaagaatcaaaagaatttcgtcaagatatcaacgccaggccgttagccagattggaacgtttgaaaattctgataaatcatgcagtcaagatttcccctcataaagaaaaatttccttatgttcgctggacaataggcaaaaacaggtatatccatgagcttatggtcccagagcgtttccccattgatataccaagagaaaatgtcgggctagaaagaactcagattcccctaatgctgtgctgggcattatccattcacaaggcgcaaggtcaaaccattcgaagattgaaggtcgacttgagaagaatctttgaagccggtcaagtttacgttgcgttgtcgagagcagtcaccatggataacttacaagtactgaactttgacccaagtaagattcgtactaatggaaaagtgaaagatttttacaagcatctggaaactttgaagtga

SEQ ID NO: 1112 - DNA, 1026 bp, Saccharomyces pastorianus
atggccgatttcctgctgagaccgatcaagcaacgccacagcagtgacggcaaatacgtgacggtagatgctggcggcggatcagtgtccaagatcgagcccatcgcggatttcgtcataaagaccaaactggtatccagcaatggcccagaggagttgcagaacgccaagaaggtgttcatcaacgtgtgccattccgggctcgtgcccaaacccgagacggagttcgatgcgaggatagtgttcccgcttattatccagaacgagtgggagatcccgatcatcacgtcgtgccaccggacggaccgtgacaagaagggacaagagtgctatgtgtgggactgctgcataaacagcgattgctcgcgctggatacgtgaggacgtccagctgcgggaaatcctggtggagtggtgtctggagtcatgcgagatccgtgagtccgtcgtgctttgcagggaccacatagcgttccccaagatgaggcagaagggcgcggagatccctgcgctggagatactgaacgacgagctgcagaacgattacaagacggagatgcacaggatcatcgaggaagaggccagcaacccgatgagcgttctgcgcggccacgctaaggacgacgacggtggcgacgatggtgacgacgggacgctaccgccgctgttcccagtggcgaaggcaccggtaggccgcatagaggagattgacgagaccgctatcgcccagcggaggaacaagaaggctgcggcagtgcagcagcagcagcagcagcctgacaagcccgagtacgaggtgaaaatgaagaggtacgacagtggggagtacaagctgcggattctcgtcgagaacaaagcgggaaactcgctgccggggcagtttgctccgctgtacaagccggcggagaacgagctgtatatcaacgacgagttgagcataccgttgccgcacggcgtggtccggaacgcggcagacatcaagatcttccacgtttccaaagaacgcagactgtacgtatacgtttga

SEQ ID NO: 1113 - DNA, 1401 bp, Saccharomyces pastorianus
atggacagttttgggaatttgagtataggagacaatttcactagcgggatggagcacggtgatgaggagctggtgggcctttccaacctaagcatatcgaaaaatggaccaacattatctccacaactcatcaaccggttcatgccccatttcccttcaagtccatcgcctctacgaaatgcattggattttagtgtaagtaaaggcgatgaagaagagaatgacctaatggagatagacgaagttgacgatacgagtttcggagaggtttacgacagggagcccactgaagcaattattgaagtggatgagaggtccatagtggaagaaatcgaagtcacgcctgaagacaaacaaaagcaagaaaacagtgaaagtcagaaccaacaccaagagggggaaagaaatattgtttcaccacaccatgcaactgtcataaaggcactattgtcaccgacagatttaggcgtagcggcggctactaaagtagaaagtattgtaccattgccacaggctaacccagacaacaatcaagattcaaagagcaacctagaaattggtaatgaaaatgaaagcgagcagaatgacgaagttgaggatgaactcaacctacaaacaggtaatgataaatcaagaacatttacaaatgcgttcgattccgagataatcaaaagggaattgagatcaagatcaaaatatcaaccgattcaagtttcatttaatacacacaattacttttattccgataaagagggcgtgaaaacatattctcttacaaaaccaaatgacaacggaatagatgacttttatgaccggaacgaagctttcaaattgcccaagccgtggtcacccaattcgcatccgacatcgagagcatcatacgccttgatgtcatatttacagttatttctcaatgcgattactacgattgtaattttcagttttatactatcattcatcttaacactacagaaggacttgaaatccacatgggaacaaagaaaacacgaattacagtacgaatccgaaaattgtcaagaacaatacatcacaaaccgttgtaatcaaacgccgggtttaccggctttggaccaacagtgcgcagaatggaaacaatgcatgaacagaaacaacgacatatttttccgtgcaagaacaacattgagcgcacagctgtttggagacatcatcaattcgtttatagatccattaaattggaaaacactatttgtcatattttgcggcatcataacttggtgttttagttcaaattttttactcggattcgtgcgagctaagagctactacggcgatggcatcaaaagatatcccgtgtcacctccactaacatcatcgtctgaggcatcttccaaagagggctctcgcttactcaagcagtaa

SEQ ID NO: 1114 - DNA, 690 bp, Saccharomyces pastorianus
atgttttcaacgatagctagatcaaaccttaggccgattgccacttcttgtctatttaaccgtccgcttagtcaatctttcattattctaaagaaaaagtctacccttaatgaaaaagtcgaagaagatgaagttgacgtaaatgaacttctgacaaaggctgaagctcaatttaagaagacgttagaaacacagaaacagaagctgaatgaaatgaaacaggggaattttaatcccaaagtatttgatggtctgatgttcaaaaacaacaaaaaatttacagatattgcaaccacttctcttaaaggtaagaatgcactcctaataaccgttttcgatcctaaagatgtgaaaactgtagtaagtggggttcttgccgccaacttgaacttgactcctgaaagaattccaaataatgatttacaattgaaagtgtcattgccaccaccaacgacagaatcgcgattaaaagtagccaaagacttgaaaaaagtcttcgaagattataaacagtcctcattaaaggaatcaatggggaccatcagaggtagtatcctcaaggaatttaaaagttttaagaaagatgactccgttaggaaagccgaacgtgatttggaaaaacttcataaagactacgttaacgagttacacaaacaattcctacaagttgagaaaagtattgcaaaataa

SEQ ID NO: 1115 - DNA, 1935 bp, Saccharomyces pastorianus
atgcccaaggtttacctgaatccagacatgattaatcacttgaattccacagtccaggtttacttcaatttatggttggagaagcagaatgcactattgcgctctcaacctcagatcattcaagacaaccaaaaacttataggcattacgacaatagttgccacaatcttcactctctatgtttttgtcaagataatcttcactccaacgcattgctctgcatcctataaaccagcaaagttttccgtgtctacaccagagcctgctcagaataactggaagggcaaaaggtctgtatccactgacatatggaatcctgaagaacctaactctattcaatgccattgtcctgccacaggtcaataccttggctctttcccatcaaagacaaccaaagatatagatgaaatggtctccaaggcaaataaggctcaatccacttggggtcgttctgaattttcaagaagattgagagttctggcctctttgcacgattacatcataaacaatcaggatcttatcgctagggtagcgtgcagggactcggggaagacgatgctagacgcctctatgggtgaaatcttagttactctagagaaaatccaatggactatcaagcacggtcaaagagctttacaaccttcaagacgtccaggcccaactaactttttcatgaagtggtacaagggtgctgaaatccgttatgaaccactaggtgtgatcagttctattgtttcatggaattatccattccataatttgttaggtcctattattgctgctttgttcactggtaatgccattgttgtgaagtgttcagaacaagttgtctggtcgtccgaattctttgtcgaattgactcggaaatgcctggaagcatgtgatgaagatccaaacctggttcaattgtgctactgtttacctccaagggaaaacgatgactctgccaattatttcactgctcatcctggtttcaagcatatcacttttatcggtagtcaacctgttgcccattatattctaaaatgcgctgccgaatcgttgaccccagtagtcgtagagcttggtggtaaggacgcatttattgtgctagatgcggccaagaacttggaggccctatcttccatcatcatgagaggtactttccagtcatcgggacagaattgtatcggtattgaaagagtcattgtcagcgagaaaaactatgatggtttagtcaagattttgaatgatcgtatggcagcaaacccattacgtcaaggctctgatatcgaccacttagaaaatgtcgatatgggtgcgatgatatccgataacagattcgacgagttggaagctttggttaaggatgctgtcgaaaaaggtgctcgtttacttcatggtggctcccgttttaaacatccaaaatatccacaaggtcactatttccaaccaactctcctagtagatgtcacatcagaaatgaaaattgcacaaaatgaagtgtttggtcctattttggtcatgatgaaagctagagataccgaccactgtatccaattggccaactctgccccattcggtctaggtggctctgtatttggttcagatatcaaagaatgtaactatgtggcaaacagcttacaaactggtaacgttgccattaatgatttcgctactttctatgtttgtcaactaccattcggtggtattaatggttccggctatggtaaatttggtggtgaagagggcctattgggtctatgtaatgccaaaagtatctgttttgatactttaccatttgtctccactcaaattccaaaaccattggactatcctattcgaaacaatgctaaggcatggaatttcgtaaagagtttcattgtgggtgcttatacaaattccacttggcaaagaataaagtcccttctttcgctagctaaagaagctagttaa

SEQ ID NO: 1116 - DNA, 2076 bp, Saccharomyces pastorianus
atgccatttggaatagataacactgacttcaccgttctggcggggcttgtgctcgctgtgctgttatatgtaaagagaaactcgatcaaggagctgctgatggccgatgatggtgcgattaccgctgtcagcacgggcaacagggatatcgcccaagtggtcactgagaacaacaagaactatctggtgttgtatgcgtcgcagaccgggaccgctgaagactacgccaagaagttttccaaggagttggtggccaagttcaacctcaacgtcatgtgcgcggacgttgaaaactacgatttcgaatcgttgaatgacgtgcctgtcatcgtctccatcttcatctccacgtatggtgagggtgactttcctgatggggccgtcaacttcgaggacttcatctgcaatgcggatgccggtgctctgtcgaatttgaagtacaacatgttcggtctgggcaactccacatacgagttctttaacggtgctgccaagaaggctgagaagaaccttttggctgctggtgccaccaggctgggcaagctcggtgaagctgacgacggtgccgggaccaccgacgaggactacatggcttggaaggactctattctagagctcttgaaggacaacctgcatctggacgaacaagaggccaagtttacgtcgcagttccagtactccgtcctggacgaagtgtccgatgccgtagcgcttggtgaaccctcttcgcactatttgccctcgcatgagttgaaccgcaatgcggacgggatccagctgggtcctttcgacttgtctcaacctttcatcgcccccatcgtcaaatcccacgaattgttcgcttccaatgaccgtaactgcatccactccgagtttgacttgtccggctccaacatcaagtactccaccggtgaccatcttgccatttggccctccaatgcagtggagaaggtccagcaatttttgtccatcttcaacttggactcggagaccatttttgatttgaaacccttggaccccaccgtgaaagtgcccttccccaccccaaccaccgttggcgctgccatcaaacactatttgcaaatcactggccctgtgtccagacagatgttctcttctttgatacagttcgcccccaacgccgatatcaaggacaaattgaccctgctgtcaaaggacaaggatcaatttgccgtcgagatcacttccaagtatttcaacattgccgacgcattgcattatttatccgacggcatcaagtgggacactgtccccgtgcagttcttgctcgaatccattcctcatatgactcctcgttactactccatttcctcctcttccctatctgaaaagcaaaccgttcacgttacctccattgtggaaaacttccccaacccggaattgcccaatgctgccccagttgttggtgtcaccacaaatttgttaagaaacattcaattggctcaaaacaacgttaacatcgatgacactaacttgcctgttcattacgatctaaacggcccacgtaacctcttcgataattacaaattgcccgttcatgttcgtcgttccactttcagactgccttctaacccctccaccccagtgatcatgatcggtccaggtaccggtgtagcccccttccgtgggtttattagagaacgtgtcgcattcatggaatcgcaaaagaagggcggcaacaacgtctccttgggtaagcatctattattctacgggtcccgtgataccgatgactttctatatcaagaagaatggccagaatacgccaagaaattggacggctcatttgaaatggtggtggctcactccagattaccaaactccaaaaaagtttacgttcaggataaattaaaggattacgaaaaccaagtctttgaaatgatcaataatggtgccttcatctacgtttgtggtgatgccaagggtatggccaagggtgtgttaaatgctctgatcggaatcttatcccgtggtaaagccatttccagcgaagatgctgcggaattgatcaagatgctcaagacttccggtaaataccaagaagatgtttggtaa

SEQ ID NO: 1117 - DNA, 1686 bp, Saccharomyces pastorianus
atggattggtcgtttatattacaactgttgataacaatactggtcattgtactgggtgcaaattggttgttaagttccttcctactggacttcaaaagagacctgacagcggttgctctggcacaacaggcaagtgtatctagcgttcgtaacgagaatgaaactgcatattatagaagcatcttagtgcctactggtttcccattgactactggactaggactctctttaaagtacaaaataagaaatggtaattttggtgatgtttggaatgccacgatggaagtttccaagggaaggaacaccatcaagctggtaggagacgagaaaagttattcattgggtgagatcaatggtatggccaagcgtatacttcagaaactttctgtgaagaagtacaaaaatattggtatatctgcgtcagtcgccacggtggaaggattttctcttactttggcctctatgatggcgtctataaaaactggttctgtacctcattttttgccagcggttcctagacaacgagtggcggatcttgatgtcctaatcatcgattcatggagatctttcaagatgctaaacggtagtgaggattggtacaaactgatcattgtttgtgatgatcctacgaaagcaccacaattcgatttggacaataatcatgtcattacatgggtagagattatagatgggtttggtaacgatccagagttccaatacacaccgccagatgacaattctgatgacaagaaactgtttgcgtacgtagcctcaccatggaatggaactaacagcttcaatcagatatgcctggtgagtaacattgcggaatttatcaagagttttcccctaggtaacgaattgaatagcagtgatcatttaaccatctcagcaaaattagcaagttccagtgcaagcttacaaacctgggggaagctcttcgctgtcttgctacacggtgggtctgcatcatttgtcgatccagcagcgttggattgcaagtcattgcataagactacactattgattattgaagcaaaagacattaccaaattaacggattccgcttcggaaaagggcttagtacataaattttacttatcctgggcgattaatttactgagcgagggtatctttaccaaaattgctaagattgaaccgaatgctcttgagaaactaagatgtgtttatttggcagaaagtgtgaaagatgctgaagtgatttcaacatttcctgcaaagattcctcaattgaagaagaccaataaaagaataaccccaagcactaaacaactgaataaaataagagcacagtttggatctcgtgtggttctcgagttatattgtccatatactatcatggggcccatagcacatacgaatttttacgattacagagtttttgacagctcggtggataataacgttgtttgttatggacccttaagcacaacgttagaaggtaaaatggtggaaacggaaaccaaccctcttttgaacatagagaaaagacaaggtatgttatgtattcgtggctttagtatcggtaaaccagtcgagtcaaatcgtttgcagaacgcaatgaacttggccgaaaaatttggaggaggtgaaggttggatgcctttagtcggtatatttgggttgtggggccaagatggttgcttatacacctataaccaataa

SEQ ID NO: 1118 - DNA, 888 bp, Saccharomyces pastorianus
atgactgtggatttagcttctatcgagaaatttctctgcgatctagccaccgaaaaagtaggtcctatcatcaagtccaaatcaggcacccagcaagactatgatttaaaaacaggttccagaagagtcgatattgtaactgccattgacaaacaagttgaaaaattaatttgggaatcaatacgagcacaatatccaaccttcaaattcattggggaagaaagttacgtggaaggggaaagtaagattaccgatgatcctactttcatcattgatccaattgatggaaccacaaactttgtccatgattttccatttagttgtacttcgctaggcctaacgataaataaagagcccgtggtaggcgttatttataatccacacattgacctcctcatatcagcttctaaagggaatggtataagagttaatgggaaaggctttgaccaccaagctaaattagaatcaatgggttctctagtattgaataaatccgtggtggcattacaaccaggctcagcaagagaggggaaaaactttaagacgaagatggccacttatgaaaagttgctttcgtgcgattatggttttgtccatgggttcaggaatttaggatcctctgcgatgaccatggcatatatcgctatggggtatctcgacagttactgggatggtggttgttattcgtgggatgtttgcgctggatggtgtattctaaaggaagcgggtggccgtgtggtgggtgccaacccagatgaatggaatattgaagttgataacaggacatacttggccgtaagagggacaattaacaacgacgttgacgaacaaaaaaaatatatcaaggatttctgggcttgtgttgatggtcagttaaaatacgattaa

SEQ ID NO: 1119 - DNA, 2571 bp, Saccharomyces pastorianus
atgtcacgtgaagtgctgccagccaatgttaccccatcgcattatgacattgcattggagcctgatctcgaaaccttcaaatttgaagggtctgccaagatcgatttacagatcaacgatcattccgtagattctgttacgttgaattatttggaaatagatttccattctgcttttcttgaaagtgtctgcgccattgatgttaagaaagatgaaagccagcagacagtgacttttgtcttccctaatggaactttgaaaaatttgggagattctgcaaagttggagattgagttcactggtaccttgaacgacaaaatggctgggttctatagagccaggtatacggataaagccactggcgagactaaatacatggccactactcaaatggaagccaccgatgctagaagggccttcccctgtttcgatgaaccaaacttgaaggctagtttcgacatcactttgatttctgaatcttctctgactcatttgtctaacatggatgttaagacggaaataaccgagaaaggtaaaaaaatcacgaccttcaacaccactccaaagatgtctacgtatttggtggcgtttattgtggctgacttaaaatacgttgaaaacagcagtttgcgtatcccagtccgagtatattccaccccaggtgacgaaaaacttggtcaattcgctgttgatttggctgcgaggactttgaagttttttgagaatacctttgacatagagtaccccttaccaaagatggatatggtggcggttcacgagttttcagcgggtgctatggaaaactggggactggtcacttacagagtcattgacctgttactggatatggaaaactcgagtttggatcgtatccaaagagttgctgaagtcattcagcatgaactggcccaccaatggttcggcaacctagtcactatggactggtgggaaggtttatggttgaacgaagggttcgccacttggatgtcttggtactcttgcaacgagtttcaaccggaatggaaagtttgggaacaatacgtaaccgacaacttacaacgtgctttgaacttagattccttaagatcttctcacccaattgaagtccccgttaagaatgcagatgaaatcaaccagattttcgatgctatttcttattctaaaggttcctcattattaagaatgatctctaaatggctaggcgaggaaattttcattaaaggtgtgtccaagtacttgaacagatttaaatacggcaatgctaagacaaaggatctatgggatgccctgtcagaaacctctggcaaagatgttcgttcggtgatgaacgtttggactaaaagtatcggttttccagttctatccgtaaaggaggaaaatggcaaaattactttgactcaaaaccgttatctaagtactggtgacgttaaggacgaagaagacaccacaatttacccagtttttttagctttgaaagataggacgggtattgaaaattcattggtactaaacaaaagatctgctacttttgaaatacaaaaccaagacttcttcaagctcaatggtgaccaatctggtatttttatcacttcttactctgacgaaaggtggaccacattatctacacaagctgattttctatccgtcgaagaccgtgttggcttagtcgctgatgcaaaggccctttccgcatctggttacacttccactacaaacttcttgaacttggtttctaattggaaagatgagaactcattcgttgtttgggaacaaatcattaacagtttatctgctttgaaatctacttgggtcttcgaacctgaaaacgtcttgaatgctcttgatgaatttactttaaagttggtgtccaaaaagctctctgagctgggatggaatattagcgaagatgacacctttgcctcacaacgtctaaaagtcactctgttcaatgctgcgtgcgcatctggtgacaaaaaaatgcaaaatattgcagtggaaatgtttgaaaaatacaacaatggggacaaaaaagccattcttgcgttgatcaagccagctgttttcaacaccattgccagaattggtgaagatgctaactacgaaaaaattcttcacatctaccaaaaccctatttcttcagatgaaaaaattgttgcgttgagagccttgggtagatttgagaacagtaagttcttagaaagaaccttgggttacttgttggatggtactgttttgaaccaggacttctacataccaatgcaaggtatcagagctcataagaagggtatcgaaagattatggacttggctacaagaaaattgggacgaaattgtcaagagattgcagccaggttcacctgtcttgggtggtgtattgacgttggggttgaccaacttcacctccgttgaagatcttgaaaaaatcagtaaattctacagcgaaaagccaactaaaggcttcgaccaaacgttggcccaagctttcgacaccattagagctagggcacaatgggttagcagagatcgcgaagtggttgctgcttacttgaatgaacacgaatacgaacaatag

SEQ ID NO: 1120 - DNA, 732 bp, Saccharomyces pastorianus
atgactgtacaaattccaaagctattgttcttacaaggtttcttgcaaaacggtaaggttttttcagaaaaatcatccggtatcagaaaacttctgaagaaggccaatgttcagtgtgactatatcgatgcgcctgttctcttggaaaagaaggacctgccattcgaaatggacgatgaaaaatggcaagccactttggatgcagacgtgaacagagcttggttctaccacagcgacatctcccacgaattggacgtctctgaaggtttaaagactgttgttgactacattaaggctaacggtccatacgacggtattgtcggtttctcccagggtgccgctttgtcttccatcatcactaacaagatcacggaattggttccagaccacccagaattcaaagtcagtgtggtcatttcaggctactccttcaccgaagcagacccagaacaccctggcgaattgagaatagccgagaaattcagagactcattcgctgtaaagccagacatgaagaccaagatgattttcatctacggtgcctccgaccaagccgtcccatccgtcagatctaagtacctgtacgacatctacttgaaggcccaaaacggcaacaaagaaaaggtccaagcctacgaacacccaggtggccacatggttccaaacaagaaggacatcatcagacctattgttgaacaaatcaccgcttccctgcaagaaactactgactaa

SEQ ID NO: 1121 - DNA, 1662 bp, Saccharomyces pastorianus
atggtgtcccaagaatatgagcccatccaaccgagcgacgaactaccaacagatatcaatagcgacaccaatagtcactcatttgacgacagcaataacaatgccactcatgagtcgcctcggcgtacaacgacgcggccaggatcggcgccgaggagtatagtgggtacgttgaggaagtattctaagtttattgggcctggtttaatggtctctgtatcatacatggaccccggtaattacagtacggctgttgcggcaggctctgctcaccgatacaaacttttattctccgtcttggtctccaatttcatggccgcattctggcaatacctctgtgccagactaggtgccgttacaggtctagatttggcgcagaattgtaaaaaacacttaccctttggactgaatatcactctttacatcctggcggaaatggctattattgcgacagatctggccgaggtggtgggaactgccatttcgctgaacattctattccatataccgctggcattgggtgttattctcactgtggtagatgtcttgattgttctgctcgcttacaaacccaacggatctatgaaaggcatcagggtttttgaggcgtttgtttcgttattagtggttctgaccgtggtttgctttacggtggaattgttttacgcgaaattaggtcctgccaaggagatattctcaggctttctccccagcaaagccgtcttcgaaggtgacggcttgtatttgagtttggcgattttaggtgccacagtaatgcctcactcattgtatttggggtcgggcgtggttcaaccaagactgagagagtacgacatcaagaacggactttattcgccagaccttgatgatatggacaacaatcaccataattatagaccctcttatgaggcaattagtgaaactttgcacttcactatagcagaattactggtttcgttgttcactgtggcgctatttgtcaactgtgccattcttatagtctctggtgccacattatatggaacaactcaaaactcagaggaagctgatttgttttccatttacaacctgctatgcagctctctttcaaaaggtgccggtacggtattcgtgctggcgttattgttttcaggacagagcgcaggaatcgtgtgtaccttgagtggacagatggtaagtgaaggtttcctaaactggactgtgtcaccggcattgagaagatctgcaacaagagcggtagccatcacaccgtgcctgattctcgtccttgtagcagggcgcagtggtctctccggtgctcttaatgcgtcacaagtggtgctttctctactgttgcccttcgtgtctgcaccactgctctacttcacttcaagcaagaatatcatgcgcgtacagctcaaccgtgacaaagacctctcaagaacttcggacaagaaagacgtgggtcaacgaaatgaagatgacgaaaccatcgaattgcaagaaatgggcatgggtagcagctcacaggaccgtggcttgatctcgccccctcctgaatacatagatatgagcaacggaacaatcgtgaccgtgcttgcagtcattgtgtggctgatcatttcgggcttaaatttctacatgttgatgggcttcactacgggccaagaggttcacctctga

SEQ ID NO: 1122 - DNA, 447 bp, Saccharomyces pastorianus
atgttatcaagggccatattcagaaatccagttataaatagaactctgttgagtgccagacctgccgcttacactgcgaccagattgaccagaagttcattgattcagagcaggaagtattctgacgcgcacgacgatgaaaccttcgaggaattcaccgcaagatacgaaaaggaattcgatgaagcttacgacttgttcgaagtgcaaagagtgttgaacaactgtttctcttacgatttggtccctgctccggcagtcatcgaaaaggctttaagagccgccagaagagtcaatgacttacctaccgccatcagagtatttgaagctttgaaatacaaagtcgagaatgaagaccaatacaaggcctacttggacgaactgaaggatgtcagaaaagagctgggcgttcccttgaaggaagagctatttccaagctcttcttga

SEQ ID NO: 1123 - DNA, 618 bp, Saccharomyces pastorianus
atgaaagtatttggtttatggtactggctgctgctgcttcttagcgccaacgtaatcgcgtctaaagtgggtgagttggtagacaaagatgacgaggtgattactcaaaaggtgtttttcgatatcgagcatggtgaagaaaaggttggcaaaatcgtaattggattatacgggaaaatctgtcccaagaccgtcaagaacttttacgagctgagcaccactacggactcaaagaaggggttcgtcgagtccactttccacagagtaatccccaactttatgatccagggaggcgacttcacacacggcacaggtgtgggaggcaagtccatctacggagacacgtttcccgacgagaacttcaccttgaagcacgatcgtaagggcaggctgtcgatggccaaccggggtaaggacaccaacgggtcacagttcttcatcactaccgtggacgaggcatcgtggcttgacggcaaacatgtggtcttcggccaagtggtggacggtatggacgtagtcaattacatccagcacgttgccagggactccaatgacaagcccttggacccagtcaagattgcagactgtggtgaatggaccctcaaaccctcttcgtaa

SEQ ID NO: 1124 - DNA, 888 bp, Saccharomyces pastorianus
atgaacgtcacaccgttggatgaattgcagtggaaatcaccagaattgatccaggtgtttggtctaagaaccgaaaatgttctagattatttttcagaatcaccatttttcgacaaaacgtcgaataatcagattatcaaaatgcaaagacagttctctcagttgaatgatcctaatgctggcgtgaacatgacacagaacataatgaacctgccagacggcaagaatgtggaagacgaacttgcttatgtggacccggcaagaagacaaattctctttaagtacccgatgtacatgcaattagaggaagaactaatgaagctggacggtaccgagtacgtgctaagcagtgtacgagaaccggacttctgggtcatcaagaaacagaaacgaataaataatactactgcaggcagctctagggggcctaggatcattccgctacaggattactacataattggtgccaacgtatatcaatcgccgacggttttcaagattgtacagagcaggctgatgtctactagttaccaccttaacagcacattgaagagcctgtacgacctcatcgaattccagccctcgcaaggcgtgcactacaaagtgcccatagataccgccactaccaccgccaccactggcgcaaacaacggcaataatgttggtggcggcagtaataagaacagtgtacggcccaccggcgccgcaaatatggccactgttccctcgaccacgaacgtcaacatgaccgtcaacaccgtgggcacgggaggtcagactgtggacaatggtgccggccgtgccggcaatgggaacatgggaatcaccacggagatgctggataagctgatggtgacaagcattaggtccactcccagctacatatga

SEQ ID NO: 1125 - DNA, 393 bp, Saccharomyces pastorianus
atgatgtctctacgaatgaacaacggcctcccaatgctcttgaagaggtcactgactacttctaaagctgcgtatcggtttcattcaaccatccctaaaccaaacgaacagatacctgatgtcgatacatttctagccaaaatcggccgtaattgtaacgaactgaaggacacatttgagaacaactggaataatctttttctatgggattccaagacattaaaggaaaaaggcgtgaatatccaacagaggagatatatcttaaaccaaatccagaaataccgtaacaatgaacccatccgtgagataaaattgggcaagaagtcattttttggcggtgagaggaagagaaaggcatttactgctaaatggaaggctgaaaataagcagtag

SEQ ID NO: 1126 - DNA, 1353 bp, Saccharomyces pastorianus
atggccaaaagaagacaaaaaaagagaactcatgcgcaggttgtacctgagcaggaaaaaggtattccaaaatcaatggtcattagagtcgggcaaacttctctggccaaccactctttgaaccaattagtaaaggattttcgtcaaatcatgcaaccacatacagctataaaactaaaagagcgtaagtccaataaactcaaggattttgttgttatgtgtggtccattaggtgttactcatctctttatgttcacacaatccgaaaagacaggtaatgtttctttgaagatagcaagaactccacagggtcctactgtgaccttccaagtgatggattattctttagggaaagatatcaaaaagttcttaaaaagaccaaaatcattgaataatgatgacgtactaaatccaccattgctagtcttaaacgggttttccacatccaagaaatccgatgaagacaatcaggatgtaaacgtagagaaggtcgttgtttccatgtttcaaaacatctttccacctttaaatccagctaggacttcattaaattctatcaaacgtgtattcatgattaacaaggacagagcaacgggcgaaatttccatgcgtcattacttcatcgatattagagaggtagaaatttcgagaaacctcaaaagactttataaggctaagaataatttgagtaaaacggtgccgaatttacatcgaaaagatgacatttcctcattaatcttggaccacgatttgggtgcctatacgtctgaatcggaaatagaagacgacgctattgtgagagtggttgataaccaagacgtcaaagcaaagcaatctcaaaactcgaaacctcaaaagaaatcagcagagacaaaggatgctaaagaggaaggagaagaagaagacgtagaaatggaggagcccaaacgccatgaaccttcccaaccaactccacgcaagaaggctatcaaacttaccgaattgggaccaagactaaccttgaaactggtcaagatcgaagaaggaatctgttcaggaaaagtgttgcatcacgaatacgttcaaaaatcaagcggagaaattagagaattggagaagagacatgctgcaaagatgagactcaaggaacaaagaaagaaagagcaagaagaaaacatcgcgaaaaagaaggctgtcaaagatgctaagaaggaacgtaagttggaaagaagaaaagccagggctgcagaagagggcgacggtgaaaacaaggccgatgctgtgagtgatgatgaatcttcgtccagcgaggatgagcattacagtgatgtgcctgaggatctagatagtgatttatttagcgaagttgagtaa

SEQ ID NO: 1127 - DNA, 843 bp, Saccharomyces pastorianus
atgaaatctacaagatggatactcaaggatctcttatccaggcaccgtgttaaagcgttcaatagcttgttctcgagacgacttcctacaccgaatgcaacgaagcaacttcaaataggtgaacattttcttttctttccgccaccatttgaaaagtttggtaaagatgggtatttcaactaccaaagccccgccatactattggaagaccccaagttacaataccgcagaagggtttggggtcaaggcgagcttatccagtattcgcccatcaacttagaccaagaatacatatgccaagaatcgattaaatacataaagaagttgcggaacgagcatgtcgtttgtattgaaagggcccttctacaaagtcaccttgagaaaaggactaacaagagtgacatctgcttattggagagaagaatcttaatgtatacaaactcactaccaaacaaggctccaacagaccccccggcagaaagagtggggtacaaaagcttggggaatttcactgttactgatatggacatcatagcgtatgggcaattgtctctaaatccacatcgaatacattgggacaaggaatactgtcgccgagttgaggggtacgaagatatcatcatgcaaggtcccttttcaatccagctattactgaaatgcatccagccgcttttgagaaagcctattacacaactgcggtatcgcaatttaaattatatctatccaggaacaactttgaatatatgtcaatctttgaattcttcggcccacaaacagacgttccaagtcagagacctccaggaaaatagtatagtatacttgaccgcggaaatttgctgctag

SEQ ID NO: 1128 - DNA, 1164 bp, Saccharomyces pastorianus
atgtccgatattaacgaaaaactaccagaactattgcaagacgccgtcttgaaagcatctgttcctgttccagatgacttcgtcaaagtcaaaggtatcgactattcaaaacctgaggctaccgatatgagagcaactgacctgatagaagctatgaaaaccatgggttttcaagctagttcagttggtaccgcttgtgagattatcgagagtatgagatcatggagaggtaagcatattgacgaattggaagaccatgaaaagaaaggttgtttcgatgaagatgggtaccaaaagacaaccatttttatgggttacacttctaacttgatcagttctggtgttcgtgagactctacgttatttggttcaacacaagatggttgacgcaattgtcacttcggccggtggtgtggaagaagatttaattaagtgtcttgctccaacttacatgggtgaatttgcattgaagggtaagactttgcgtgatcaaggtatgaaccgtattggtaacttgctggttccaaatgataactattgtaagtttgaagaatggattgttccagtcttggacaagatgttggaagaacaagaagaatacgtcaagaaacatggcgttgactgtttggatgccaaccaagacgtagactcgcccatttggactccatctaagatgatcgatcgtttcggtaaggaaattaacgacgaatcttcggtcctttactgggctcacaagaacaagatcccaatcttttgcccatctttgaccgatggttccattggtgatatgttgtttttccacactttcaaagcgtcaccaaaacaactaagagttgacattgtcggtgatatccgtaaggttaactccatgtccatggccgcttacagagccggtatgatcattttaggtggtggtttgattaagcatcatattgccaatgcttgtttgatgagaaatggtgctgattatgccgtttacatcaacaccggtcaagaatacgatggttctgatgcaggcgctagacctgatgaggctgtttcttggggtaagattaaagcagaagctaaatccgtcaaacttttcgctgatgtcaccactgttttcccattgattgtcgctgctacatttgccaatggtaagccaatcaagaaagttaagaactaa

SEQ ID NO: 1129 - DNA, 1128 bp, Saccharomyces pastorianus
atgtttgaagtcatcacaatcaccaaacgaaatggggctttccaaaactcttccaatctgctgtataacaacgcaggaatatcggacgacgaggatgaagatgagcaagacatctatttgccggatgtaaactcacgttctaaagatgagtccgactctcagattgtgacacccggtgaactggtcaccgatgagtccgactctcagattgtgacacccggtgaactggtcaccgatgaccccatctggatgagaggtcatggcacatactttcttgacaacatgacctactcctccgtcgcgggtacagtgtcccgtgtcaatagactgctatcggttatcccattgagaggtcgttatgctccagagactggtgaccacatcgtgggaagaatcgctgaagtgggtaataagagatggaaagtagatattggcggtaagcaacacgccgtgcttatgttaggctctgttaatttaccgggtggtattctaagaagaaaatctgaaagtgatgaattgcaaatgagaagttttttaaaagaaggtgacctactgaatgcggaggtgcagtctctgttccaggacggtagtgcttctttacatacaagatccttgaaatatgggaagttgagaaatggtatgttttgtcaagttccaagctctttaatcgttagagctaaaaaccacactcataatttgcccggtaacatcaccgtggttctcggggtcaatggttatatatggttaaagaaaacctctcagatggacctggcaagagacacacccactgctaacaacaatgcctcgaataaatcatcgggccccactggagcagtatcgttaaacccttccattacaagactagaagaggaatcatcttggcaaatatattcagacgagaatgacccttccatatcaaacagcatacgacaaacaatttgccggtatgcgaatgtcatcaaggcgttggcattctgcgaaatcggtattactcaacagcgtgtggtgagtgcttacgaagctagtatggtctatccaaatataggcgaactgatcgaaaaaaacgtaatggagtccatcggtaatgatattcttaccgctgagagaatgagaggtaatggcgactaa

SEQ ID NO: 1130 - DNA, 1494 bp, Saccharomyces pastorianus
atgaaaaccgcactacccgtattgcaaagagtaaataaactgatcagatcgtgcaagatgtcaggagtattcccttacagcccgccagtgaaccgcgaaatgcgagaattagacaggtcgtttttcatcaccaggataccaatgtgtgcagtgaagtttcccgagcccaagaacatcagcacgttctccgagaacttcaaagattgcattctaagggtgccacgtatcccgcacgttgtgaaattgagcgccgccaagccatcggaggaacccacaagcgtgcaaaacaagaagctaaagaccgcagatagcgacaatggcacaatctcgaagggggtgttgttacacgattccattcatagtgtggaggaagcgtatgcgcagctgcctgcggaagcattggacttcctcaaggaaaaccgggccgagatcctagcgcatgaatacgtgctagactacgatttctggaaggcggaagaaatccttcgagcagtcttgcccgaggagttcttggaagagatccccacgggcttcacgatcaccggtcacattgcgcatctgaacctgcgtagcgagttcaagcccttcgactcgctcatcggacaggtcatcctggacaagaacaacaagatcgaatgcgtggtggacaaagtgagttccatcgccacgcagttccggaccttcccgatgaaggtcattgccgggaagagcgacagcctggtggtggagcagcgagaatccaactgcacattcagattcgacttcagcaaggtgtactggaactccagattgcacactgagcacgaaagactggtcaagcagtacttccagccaggtcaggtcgtgtgcgacgtcttcgccggcgtggggccctttgccgtgcccgcgggcaagaaagatgtcattgtgttggccaatgacctgaacccggagagctacaagtccctgcaagagaacatcgcactgaacaaggttgcccagacggtcaagtccttcaacatggacggcgcggagttcatccgtcgctcgccagaactcttacagcaatggatcaagaacgaagaagacggcacgattaagatccctgttcccgccaggaaacgccaccggtcccagcagcagcagcaacaacaacagcaaccgcgcttcaaagaagtgccgatcccagctcgaatcagtcactatgtcatgaacctgcccgacagcgccatctcgttcttgggcaacttccgcggcatctttgccgaatacgcccgcgaagacggtaacaacgaaatgccgtgggtgcacgtgcactgcttcgagaagtacccgcccggcgaagaggtcaccgagcacgagttgcacgagcgcgttcatgcgcgcatagtcgccgcacttcaggtcacggcgcacgagctgccatttcaagccgttgccctgcatctggttcgcaaggtcgcaccgaccaaaccgatgtattgcgccagcttccaactcccggccgccgtgtaa

SEQ ID NO: 1131 - DNA, 177 bp, Saccharomyces pastorianus
atgcatttgatgtacactttaggcccagacggcaaaagaatctacacattgaagaagagcactgagaccggcgaaattacaaagtctgctcatccagccagattttctccagatgacaaatattcaagacaaagagttactttgaagaagaggtttggtttggtacccggccaataa

SEQ ID NO: 1132 - DNA, 3000 bp, Saccharomyces pastorianus
atggaaacaattgatatccagaatcgatcatttgtggttcgttgggtaaaatgtgggcgtggcgatataatcaactatcagattaagccattgaagaaatctattgaaatcggtatctataagaagttgaaatctagtgtagatgatcatgcatccgctgttctcattgcacctgacaccaaaactttgttggactatacgacaaaatctctattaaataaaggaagctcgggtcacacagaggaacatcacagacgtccttctcagacttcgcataattctagtaatggatcggatggcaagagaaaggagagatcatattcttcgctgtccattagtagcatacagcagcaatctcaagaaatacctttacgtgagaaactatccgggtcgggatttacactagttaaaagggtcggcaatgtttcaggcaacaccatggttcaaggtgaccttgaagtaaaagacactgattactattatgcttttatattggacaactcgtcctctaaaaatgcaaagaagaaaattctctttaatgcgagtgttataaacggcgacaatcagtctatgataagcacaagatcgacacctccaacaaggcctgcaaatttgagtagaacatcaacccaacaggacatgttgtttagagtaggacaaggtcgttatctgcaaggctatctcttgaagaaaagaagaaagaggttacaaggtttcaagaaaaggtttttcactttagactttagatacggaaccctgtcgtactatttgaatgaccataatcgaacttgcagaggcgaaattgttataagtttatcatctgtcagtgccaataagaaggatagaataattatcattgattctggtatggaagtttgggtactaaaagctacaagcaaagaaaattggcagtcgtgggttgatgcattacaatcctgttttgacgatcaatttgaagagagagatatatccatattggaggaaagcccggagtcccttgatggtggtgagcaagtagataataagaacacccagaaagatcgtgatcagataacacccaccgttaccactaaatctacacaatcacgtacacagcatagtctgaaagatgtcgatgaaatgtatataccactctctagcgaatcatacgctactttttctatgaacctgcgtttgatccaacaacgactagaacaatgtaaaaaggactccttatcttacaaaccaaatgcgctacaccaaagatctgagggactaaataggtcaccttcgtcatcatccgtttttgcaaataatagagtgtcttcatttaatcactcttcctccggcatgacttcatctgattcgctagtttctgatgaaactccaacccacacaatgcatgccgaacattccgagcatgccttatacaatcaactggcagatctcgaagtatttgtaagtcgattcgttactcaaggggaggtcttattcaaagatcaccagattctgtgcaagaaggcaaaagacacgagagtttcactaacatcataccttagtgaaaacgatgaattttttgatgccgaagatgaaaccagtcgtggtgtgattttattacctgacacagaagacgatatgaacaacatggttgaagaaactcctcttctgggtaaaagcgaccaaaatgagtttacagaagaggtcgaaatatcagaagaagaacttataggcacatcaagtttggaaagtcgcacgactaatgacgaaaaccacaacggtaatcactacaaaaatcaccacaaaaatcgtcgccgtaatcaccaacatcaccagaaaaccaaaagtatagaatcatcagctgagactttcacaagtaaagatttatatgcgctttcctatccaaagtctatttcacgccgaaacgacatacctgaagctgcagcttctcctccaagtctcttatcatttttgagaaagaatgtgggtaaggatttgagctctattgctatgccagtaacatcaaatgagcctatttctattctacagttaatttcagagacatttgagtatgcacccttgttaacgaaggctacacaacgccctgatcctataacctttgtttcagcattcgctatttcctttctttctatatatagagataagacaagaactctgaggaaaccatttaatccgttgctggctgaaactttcgaactaatacgagaagacatgggattcaggttgatttctgagaaggtttctcatcgccccccggtattcgccttttttgcggagcatcttgaatgggaatgtagttataccgtgacgccttctcaaaagttctggggcaaatctattgaactgaacaacgaaggtattttgagattgaaatttaaagcaacaggggaactatttgaatggacgcagccaactacaattctaaaaaatctgattgcaggagagaggtatatggagccggttaacgaattcgaagttcattcatcgaaaggagacaaatcacatatcttgtttgataaagcgggtatgtttagtgggagatcagaaggatttaaagtttccgtaatcccaccagtttcaagtcaccgtaaaaaggaaactctggccggtaaatggacacaaagcttgatcaatgaaaccactcatgaaactatatgggaggctagtgaattggtaaacaactccaagaaaaaatatggcttcactaaattcaccgctaatttaaatgaaatcactgaaattgaaagaggtaatttgccacctactgattcgagactgagaccagatattagggcatacgaagagggaaaggtcgacaaggctgaagaatggaaattgaagttagagcaactccagcgtgagagacgcaataagggccaagatgttgagcctagatatttcgagaaagtatctaaaactgaatggaagtacataactggaccaaaaagttattgggaaaggaggaaaaaccacgattggtcagacgtttcccatttatggtga

SEQ ID NO: 1133 - DNA, 2145 bp, Saccharomyces pastorianus
atgtctcaccttattactttagctacgtgtaatttgaaccaatgggccctagattttgaaggtaatagagaccgtattttagaatctatcagggtcgccaaagaaagaggtgccagattacgtgttggtccagaactagaaattactggttatggatgtttagatcattttttagaaagcgatgtctgtctccattcgtgggaaatgtatgcacaaataattaaaaacgagaaaactcatgggttaatacttgacgtcggtatgccagttttacataaaaatgttcgttacaattgtcgtcttctatcattggatggtaaaatattatttataagacccaaaatttggttagcaaatgatggtaattatagagaaatgaggtttttcactccttggatgaagcctggtgtagtggaagactttattctcccacctgaaattcaaaaagttacaggtcagaggcttgtgccatttggtgatgctgtaataaattctttggacacttgcattggtacagaaacttgcgaagaattatttacaccccaatcgcctcatattgccatgtcgttggatggtgtggaaatcatcacaaactcgtctggttctcatcatgaattgcgtaagttgaataaaagattagacttaattttgaatgccactaaacgttgtggtggtgtttacttgtatgctaatcaaagaggttgtgatggtgacagattatattatgatggttgtgccctgattgccatcaatggtacgattgtagctcaagggtcacagttttccttagatgacgtagaagttgttactgctaccgtagatctagaagaagtgagaagttatcgtgcggctattatgtcccggggtttgcaggcttctttatcagaaatcaagtttaaacgtatcgatattcctgtagaactagccttaatgacctccagattcgatcctacagtatgcccaacaaagatccgagagcccttttaccactctcctgaggaagaaattgctttgggtccagcttgctggatgtgggattatttgagacgttgcaacggcacagggtttttcctgcctttgtctgggggtattgattcttgcgcaaccgcaatgattgttcattcaatgtgccgcttagtaacggaggccgctcagaatggaaaccagcaagttatcaaagacgctcgtaagataacacgtagtgatgatgattgggtcccaagcactccacaagagctagcctcaaaaatgttccattcatgtttcatggggacagaaaattcatctaaggagacaagaagtagagctaaagatctttcaaaggctattggatcctatcatgttgacttaaacatggactccctggtaacgagtgtagtgtctttatttgaagtggctacgggcaaaaaaccaatatttaaaatctttggtgggtctcaaatcgaaaatttggctttacaaaatatccaggcgcgactaagaatggttcttgcttatctgtttgcccaactattgccgtgggttcgtggcattccaaattccggcggtttgctggtgctaggtagtgccaatgttgatgaatgtttacgtggttacttgacgaaatatgattgttcttcggctgatattaaccccatcggaggtatatcaaagaccgatttgaaaagtttcattgcatacgcttctaaagaatatgacatgccaatcttggacgactttttaaatgctacgccaaccgcagaactagaaccgatgacaaaggattatgttcaatcagatgagatagatatgggaatgacttacgaggaattgggtgtgtttggttatttaagaaaagttgagaaatgtggtctttattctatgtttttgaaacttcttcatcaatggtcaccaaaattatcgcctcgtcaaatatctgaaaaggttaaaagattcttcttcttctatgctatcaatagacataaacaaaccgttttaactcctagttatcatgctgaacaatattcaccagaagacaacagatttgatttgcgtcccttcttaatcaacccaagattcccatgggcttcaagaaagattgacgaagttgttgaacaatgcgaatcgcacaaagcctcgaagcttgacattatgtcaattgattag

SEQ ID NO: 1134 - DNA, 3339 bp, Saccharomyces pastorianus
atgcgcgtacctatgaggaatatgttagtagtggcgctgctcgtttgggtacttacatctctggtttcatgctcagatcctcttttgtcccaagctctaagacggcagataccaaacaatgaaatgacatccactaaaaaactcaattcaaactctagctcagacaaaagtatacctcttcattttcctcccgctagaactacagaacatttaccaaaggaaaaacacagcttgaacccaacacctaatttgttacatactcgacgtgctgacaaaagagcccataaggctgctaattccataagtgtgccatatatggaaagccgttctttagaggatttaagcttatccgatatattaatcgcagccgacgttgaaggtgggctccacgccgttgacagaagaaatggacatatcatatggtccattaatcccgacaaatttcaacctctgatagaaatccaagaaccttcaagattagaaacatatgaaactctaattatcgagccttgtggtgatgggaatatatactactttaacgctcatcaaggattgcaaaagcttcctctgtctatccgtcagctagtttcaacttctccgctacacttgaaaacgaatattgtcgtaaacgactcggggaaaatcgtagaagatgaaaaggtgtacactggatcaatgaggactataatgtataccattgatgctttgaatggtgaaataatatcagcttttggacctggctcaaagaacgggtattttggaagccagagtatagattgttcgcccaatgagaagataaaactccaggaatgtgaaaacatgattgtaattggtaaaactatttttgaattggggattcactcttatgatggagctagttacaacgttacttactctacatggcaacaaaatgttttggacgttcctctggcacttcagaatacattctccaaagacggtatgtgtatagcgcccttccgtgataaatcgttattggcaagcgattccgatttcagaattgctagatgggtttctccgacatttccaggaattatcgttggcttatttgatgtgtttaatgaccttcgcactaacgagaatatattagtgccccatcccttcaacccagctgaccacgagagtgttctgagtaacaaagtttacttggatcaaacatcaaaactttcatggtttgctctatctagtcagaatttcccttcattagttgagtcggcccccaaatccagatatgcttccagtgatcgctggagggtttcttcgatctttgaggatgagactttattcaagaatgcaattatgggagtacatcagatatatggcagtgaatatgaccaactctatgaaacttatgggaaaccgaaggcattggacaccactcagaagcattcccctttgatgattgattctcccatcgatgctactaagttgcctcagaacagagatatagattcactaaacgaatatatgtcgtcagaagactttgaggcatatagagaaaaggtccataaacaaatatcaagagagctaaggaataagagtaagaattctttaattctgagggtcggtagtctcgtatatcggatcatcgaaacaggtgtgtttttattattgttcctcatgttttgtgctatcttgcaaagacttaaaattttgccgccactatacgtattattatcaaaaattgggtttatgcctgaaaaagaaattccagcaattgaactaaactcagaagattctgcaacaactggaagtataaccaagccgtttaatacaaaacctgaaaagcaggttgtttttgaaagtgcgctcaaaaatgcaaacccgaaatcacagaacgataacgatgacggtgatgatgacgacgatgaaaaatcacaagatttgactttagagaagaagaagagaaaaaggggatcgagagggggtaagaagagcagaaaattacgcaatgcaaatataccaaactttgaacaatctctaaaaaatttagtagtgtcagaaaaaattttaggttacggatcatcgggaaccgttgtattccaaggcagtttccaaggcaggcctgttgcggtgaagagaatgttaatcgatttctgtgatatagctttgatggaaataaagcttttaactgaaagtgatgatcacccaaatgttatacgatattattgctcagagacaacggatagattcctgtatattgctctagagctctgcaacttaaatatacaggatttgattgaatctaagaacgcatcagatgagaacttgaaattacaaaatgagtacaatcctatttcattactgaggcagatagcggctggggtcgcgcatttacattcgctgaaaattattcatcgggatttaaagccccagaatatacttgtatctacgtcgaacaggcttactacagaccaacagaccggagtagataatctcaggattctaatatcagatttcggtctctgcaaaaagctagattctggtcagtcgtcctttagaactaatttgaataatccttctggaacaagtggatggagggctcctgaactgcttgatgagtcgaacagttttcaatcccaagttgaaactgaacattcttcgagcaggcatactgtactttcatctgattccttttatgatccatttaccaaaagaaggttaacaagatctatcgatattttctcaatgggatgtgttttctattatattttatccaaaggtaagcatccttttggtgataaatacacacgtgagagtaatataataaggggaatatttagccttgatgaaatgaagtgtcttcgcgatagatctctggctgccgaagctacagatttgatttctcaaatgatcgatcatgatccattgaaaaggccgactgctatgagagttctaaggcatccattgttttggccaaaatcgaaaaaattagaatttctcttgaaagtcagtgatagattcgaggttgaaaacaaggaccccgcaagtgacttgttattgaaattggatgatatttcaggctttgttattcctaatgggaactggaccgtcaagtttgataaaaccttcatggacaatctcgggaagtacagaaaatatcattcttcaaagctgatggatttgttgagagctcttagggataaataccatcatttcatggatctgcccgaagatatagcggaaatcatggggccggtacccgatggattttacgattactttatcaagcgtttcccaaacctactaatagggatttataagattgtcaaggagaacttgagcgacgaccaaattttacatggatttttgtattcataa

SEQ ID NO: 1135 - DNA, 888 bp, Saccharomyces pastorianus
atggctgctggaaatgagataaacatcacgaataagctcaaaaggcaagagatttttgctgatataaaacatgagaagaataaagaacgtcatacaatgagaagaaagagggctaaggacgagagggagaacccagaactacgggagcaaagattgaaagataacgtaacgaagactatagaaaacacgagggtctatgatgagactattagcaaagaagtggaaggggacgaagaagatttgatgaaatactttaacggtaattccaacgaaccaccaaagatcttcctgaccacaaatgtgaacgcaaaaaagagtgcttatgaatttgctaacatcctgattgaggtgttgccaaatgtcacttttgtgaagagaaagtttggctataagttaaaggagatatctgatatttgtataaagagaaatttcaccgacattgttataatcaatgaagataagaaaaaggtaacgggtttgacattcatacatttaccagagggcccaactttctacttcaaattatcgtcctttgtggaagtgaagaaaattgttggacacggtagaccaactagtcatattccagagctgattttgaacaactttcaaacaagactaggtcaaacagtgggcaggttgttccagtctattttacctcaggaccctgatattgaaggtagacaggtgattactctacacaatcaaagagactacattttcttcagaaggcatcgttacgtcttcaaagacaatgaaagagtgggtttgcaagaactgggcccacagtttactcttaaattgaagagattgcaaagaggtattaaagaggaaactgaatgggaacacaagcctgaaatggataaagaaaagaaaaagttctatctatag

SEQ ID NO: 1136 - DNA, 849 bp, Saccharomyces pastorianus
atggacccaagtttagttttagagcaaacaatacaagatgtgtcgaatctcccatccgagtttcattatcttctagaggagatcggctcaaatgacttgaaactcaacgaagaaaaaaagagatatgagcaaaaggaattccagatacacaagtttataaggcagcaaggctccataccgaaacacccacaggaggacgaactagacgaagaaataaaaggttcacttttaaaatgtcagtctctacaaaaagaaaaatgcgttctagcgaataccgcgctctttttaattgctagacatttgagtaagttagagaacaacatagctctattagaggaagacggtgtgctagctcctgtagaagaagacggggacatggaaagtgctgctgaagcctccagagaaagttcagtaatgagtagtggtagcatgaagaagaaacgagctgcgtctagctcaggatctataccgcccactttgaaaaagaaaaaaaccaatcgtgcatctaagctccagaatgaaatagatgtttcaactacagaaaaatctgtcaccccaatgagtccgagctttgaaaataaaatcgcaaggacaaaagaaatcaaaaataatagaaatggcaagggtcaaaacggctcatttgagaatgaggacgaagacaaaaccttatactgcttttgccaaagggtgtcattcggcgaaatggttgcttgcgatggtcctaactgtaaatatgaatggtttcattatgattgtgttagtttaaaagaacctccaaagggtacgtggtactgtcctgactgcaaaattgagatggaaaaaagcaaattgaaaaggaaacgcaattaa

SEQ ID NO: 1137 - DNA, 1935 bp, Saccharomyces pastorianus
atgtttagaattcttcactttaagaatcacagcctgtcctgcaggggtcatttttcttcccaccctagatacaactcgatacctttgttgattacacattttaggcacaccttttgtaccaccagaaaagatagtggacagaataaatacagatctgaaagttcaaggccaaagttaagtaaaaaatccgaacaagcaaattatcctttagatactttacgcgaagatatttcaataatactgaatgatatatccggaataggccgctcgctgatagtcaatgcgctcgagccaacgaataatatggagggaggtgatctaatattgcctcttccgaaaataaaggtagctaatcccgtggccgttgctaagcgatgggccaccgagttaagcgcgtacgacagtttaggtaaagtttgtgcaaaggggcccttccttcagttcttcttcgatcagaagtatcttctccaatcagcagtaccgagtatactgcttcaaaaagaaagatatggtcaggaaaaatcttgtctgcagaaaaaagttgtagtcgaattttcatcgccaaacattgccaaaccgtttcatgctggtcatttgagatcgacaataataggtgggttcctttcaaatttatacgaggcaatgggatggtcagtagttcgtatgaactacttaggtgattggggtcgacagtttggtttattagcagtaggttttgagaaatatggtaacaaaaaggcgttagaaaagcagcccattcaacatttattcgaggtatatgttcaaatcaacaaggaccttgcggaagaagagaaggaaaacgacacatctcaatgtggcatcagtagcagggcccgtacgttcttcaaaaaattagaaaatggagaccagaatgctaccaagatctggaatagattccgctcactatccatccaccactatatccaaacgtattcacgtttgaacattaattttgacatattttccggggaatcgcaagtatccaaagaatccatggatgaggcattaaacatattttaccaaaaccatcttgttgaagaaaaggatggtgctctggtaattgatttaacgcaatggtcgaaaaacctaggtaaagctgtggtacaaaaatcagacggaactactctgtatctgacaagagacgttggggcagccatggagcgcaaaatagatttaaaatttgacaaaatggtatatgtgatttcatctcaacaagacttgtacatgtcccagctctttatgatactacaaaaaatgaacttcgattgggcaaaagatttgaatcacgtcaacttcggtatggttcaaggcatgtcgacaagaaagggaaacgtggttttcttagataccattctagacgaagcaagggataaagctttccaaattatgaaaaacaacaaaataaaaatagcgcaagtggaagatccacatcaggttgccgatttaattggtatatctgccataatcattcaagacatgaaggccagacgtatcaataattacgaatttaactggaacagaatgctatcttttgaaggtgacacaggcccctacttgcaatacacacattccagactaagatctttggaaaggagctccagtaatattacagccgatatgctggtgcaagcagatttttcaaatctcgacgaaccacaattgattaagcttgtcagactcctggctcagtatccggacgtcctcaaacgagcgtttaaaacacaagagcccgctacaattataacgtatttattcaaggtttgtcaccaggtctcttcatgttataaaaatgtatgggttgcagggaagtctgacgatgttgctataccacgacttgccatatattcagcaagcagacaagtactgcacaatgcaatgtcactcttagggctagtaccagtcgatagaatgtaa

SEQ ID NO: 1138 - DNA, 2796 bp, Saccharomyces pastorianus
atgtctcagcagaatattttggcagctagtgtttcagcgctctctcttgatgaccctgctgtgcattcaggtggagcttcctctaagaaaagcagaagacctcatagagcataccacaacttttcctcgggtactgttcctaccatgggtaactcgccctataccacacctcaattgaatcagcaggatgggtttcaacagcctccccaggcatttaccccgagacaatttggtggagctggctttaacaatggttcaggatccgttatgtccacaccggtaatggggagtcaagagcagtttggtgcgagtgaagcctcttcaccttacggtcagtccggtcttgatattacgatacctcagccgacttcgcatattgtcccaactcaaagattcgaagatcaagcacaatatttacagcgatcttttgaaacgtgcagagattcagtgcctcctttacccacaacacagttctattgtgttgaccaaggttcatgcgatccgcatttaatgagtttgtccatgtacaatattcctgagagtgaacatttaaggggcgctaccaaactaccacttggagtaaccatccaaccgtttgccagtttgacattaaatgacgcggaagttcccaccattcctttaccaatggatgggacacctttgcgttgtagacgttgtcgtgcatatgcaaatcctaaatttcaattcacttatgattcgagtgttatttgtaatatttgtaaagttaagatgcaagttccggcagaacactctgcacccatgggtcccaatggtcaaagaagcgatttgaacgaaaaactagaactattacaaggaactgttgatttcttggtgccaagtgtctacaacgccatccaagagaaagaacctttaccattacattacgtgtttttgattgatgtctcattattggctaatgaaaacggaagttctttagccatggtcgaaggtgttagatcttgtattgaatacattgcagattttcagccaaattgtgaggtggctttgatcgtttatgataataaattaagatttttcaatctaaggccagagttagacaatgctcaagagtacatcgtcagtgaactagatgatgttttcttgccattttatactggattatttgtcaaacctggtaactcgatgagaataatcaatgacactttgataaaaatcagtgattatatctctaccgataaatatagtcatgttccacaggtttgttacggctctgccttacaggccgcaaaattagcattggacacagtaactggtgggcaaggtggtaagattatttgttctttgaatagcttaccaacaattggtaatggtaatttatcattgaaaagggacaatgcgcacattgctcatgtgaaatgtgaaaatggattttacaagaaattagctacagagtttttgaaatcatacatttctttggatttgtatgttaccaatgccgggtttattgacatggttactgtgggccacccagtagagatgacatctggtatcttgaagtattatccacatttccaacaagaagtggatgcatttactttagtcaacgacatggtgacaaatgtttccaatattgtcggataccaagccttactgaaggtccgctgttccactgggttatccgtcgaacagtattattgtgactcgtccgaaaatactgatcatgatccaattattccagttttgacaagagattccacattagacgtgttactcaaatatgacaataaaatcaaagcaggaaccgacgttcatttccaaacggctttactatatacagacatcgatggtgttaggaaagttcgtactattaatacatcaggtgcggtatctaataatattcgtgaaatcttcaagtttataaaccagaatcctgttatgagaataatgatcaaagatgttattaagacactaggtgactgtgacttcgcaaaaattaggagattaattgatggtaaaatggtcgaaatattgactcagtataggggtttggttagtagcaattcgtctacacaattaatattgcctgattcgataaagacattgccagcttatatgttagcatttgagaagagcgaattaatgaagccaaacgcccaaagtactcgtggtaatgaacgaatttacgatttattaagatatgattcattgaactcagcacaactttgctacaaactttatccgcaaatcataccattccatgtattattagaagaaactgatctaaccttttatgatgccaacgataaattattacaaactaatcctgattcagtcaagaatttatccgtgagaagttcacattccaatttcgttaacggtggttgttacctgattttccaaggtgacatcatttacctgtggttcaacgagaataccaatagaattctgttgcaagacttattatcagtggaggaatcgttgcctatcaaccaaatttcgttgtttagtgggtcgttgcctgaaacgggcactgaaatcaaccaaaaagcatcgaatgttatcaagaactggcaacaaacggtcaacaagtcgactctaccagtggttttattaagacccaacgtcgaccaatactacagtaatgttatgagccagctgctctgtgaagataagaccgtcaataggatcgaatcgtatgacaattatttggtgataatgcataaaaaaattcaagataaactacaaaaagacgacttcatcaaagtgtcccccgcagcgcatgaaaacattcatcaaaagtttgtacaattctga

SEQ ID NO: 1139 - DNA, 558 bp, Saccharomyces pastorianus
atgaatatcagtggcacactaaatacgcttcggctgctttacaacccatcgctgtgtaagcctagtctagtcgtccccactttcaatgaactcccaataccaattcacgattctataaaggctgtggtggtggacaaagacaactgcatctcctttcctcacgataacatcatatggccggattactctcaacactgggagtctcttaaattgaaatatccgaataaatcgctcttaattgttagcaatacggcgggttccagttctgatgaagactatttgcaggccaaacttttggaagacaagaccggtgtacccgtattaagacattctacaaagaaaccaggttgccacaacgaaattttggattatttttacgagaacaagattataacaaacccaaaggaggttgccgttattggagataggcttttcacggacattctgatggcaaatatgatgggctcatatggagtatggatcagagacggcgttaaaatatcttctaatcctttatccaaattcgaaaagaaattgtatgatttttttggattttga

SEQ ID NO: 1140 - DNA, 3225 bp, Saccharomyces pastorianus
atgatggccaaaccgcaaaatgggaagcagggcctgtctgaaggggagatggacgtgagctcgctgtttaagaggacggaagttgttggacgagggaagttcggtgtagtttacaagggctataacgtgaaaacaagacgagtgttcgccatcaaagtactaaatctagactctgattcggacgaggtagaagacgtgcagcgggagatccagtttctggcgtcgctgaagcaaattcccaatatcacgcggtactatgggtcgtatttgaaagataccagtctttggatcataatggaatactgcgctggtgggtctcttcgttcgttgctaagaccaggcaaaattgacgaaaagtacattggggttatcatgagagaactgcttgtggctttgaaatgcattcataaagataacgtcattcatcgggatattaaagctgctaacgtattaatcacaaacgaaggtaatgtcaagctgtgtgatttcggtgttgctgcacaggtaaaccaaacttctttgcgacgtcaaaccatggccgggacgccatattggatggcaccggaagtaatcatggaaggtgtttattacgacaccaaagtagacatatggtctttaggtataacgacatacgagattgctacagggaacccgccatactgtgacgtagaggccttgagagccatgcagttgattataaaatcgaaaccaccgagattagagggcagatcgtacagctcctcgctgaaagaatttattgccctttgtctcgatgaggatcctaaggaaagattgtcggcagatgatcttttgaaatcaaaatttatcaagaaccataaggctactccgacttctattttgaaggaactggtatcaagatatttgcttttcagagacaaaaacaaaagcatgtataggatcgaggggagtatgccagagagcgaactattgaaaccgaccgaggctcaaagttcatcacaaaccagtgggggtaatgaagcacaaagaccagcgaaatcatctgagtatgaactcaagatggcgaacgaaggagacgtggaaaccaaatgggatttcgattccttgagttcgtcggattacattatcgagaataacatcaatctcgatgttcttgctgaagatacgaacaacgaatgggcgactgcacaacacgatcagtttaactatgcgtaccccgacgaagattcttattacttcgacccaacaaatcataataccagaccactagtttatcaagggactaccataggcaaaggctattctggtacaatagcacagaactccactctaaacgctcccgtaacaactaattacacaaattcaaaatacccttccaagatggtagctggaactacaaacacttctggaactcacactaatggtccgatgacatcttccaaaaaactagagaataaagctccaaagcagttgctcgagcttttcgaagacaacgacatcattactggtgaaaatgatatgaacgccgaagctcctaaaatgaacaagtctatttcttctttgaatgccggtaacaattcgagagaagatttcgtaccctccaatgaggtcaacgggaatatgaatagcaacaagatacggccgcatctcccacctttatcaaatgggaataactattacagccaaagtactcctgctttgccactactccaaacaaagtttaacaagacatcaaaggggcccccaacaagcgggttaacaacagccccaacatctattgagattgaaattccagaagaactaccggatagtgccttaccgacacccgtaagcgctgatccggtgttaattacaagcacaaaggcaaggtcctctacaatgacagctggtacatcaccgtcctccacctcagcacaatataagccagtcccaagcgtgtcgaggcgattgacagtaagtactaataggccagatcatagtccaagcatgataggaggtcagaaattaaccgcaacggcctccaccactgcaatcagcacgcttgctactagcagcagcatctacaacaacagtaatagtgccgatgatgaaacatcaagaggaagcagcggtagtaatactgcaaacagcatacagatgagcataagtaactcaagtaatacaacaaagttgttaactcataaagcttcgtctccttcaagaccgctactgggaacgggtacttctcccaataggaaaccagcaaattcgcctacacaaaatatcaatcataacggtattcacacaaatcttggggttcctcctacgatgaaaccgatggtcaatagcaaggatagcaaagatattcttttacaacctttgaatagtataactagctcttctaccatcaacaccactaatagcaatggtggtaatagcacgacgagtttgaatcatttctctaacgaaaaggaaaattcaagagttaacggcgacttcaaacgtaataacccaaacttaaaactacaaatgccattacctacgcctgttgtaagaaacaaattactggatccgaatacagcagctccatcgaataccaatggtatgccaggaagtgctggcatatgtacgaacgaaaacattaatcagtttggattcaacacaagtagcgcgtccaatattcctgtgtcaatgactccaataagtgaaaagcatattgattttggaagcaagattaagagaagtcagagtatctccaataggaagaactcttctgcttcggaacaaccattgaatatccttaactcaactgttcccggcaatccctgtggcaccaataacaataacaccggcgctaacaacaacatttctcttgctattaacacgggtgttgctggaaccaacactaatgccactgccgccaccattccaagttctaccacagctgccacaactgctccaatttctcaacagagtattcaaccgggaacccaatccaatcatattttgaattctactactgctgttgcgaacccaacaaatttgctaggcctagcgatgtatcctccaccacagagtttacaaatggagatgtttttggacttagaaacgagtctatcaggaaaacaaagacggatagacaggaaacctcaagttctgaaggagctagaaaatcttttacagatgtttgaggagggactcccttgtatcgaacatgctttgaaggagcaactcacgtcaacgctcatcaaggacaatgaccattag

SEQ ID NO: 1141 - DNA, 2553 bp, Saccharomyces pastorianus
atgacttcgattcaagaacggagcactaaagctcatcttcattctgttaaagagggtgaagttaccggccatcctaatgagatgttactcaagcaaaggaacttagtagggtctcacatccaatgcccatcatcccagacggctttagggagatctagggctggcagtaacacgatgaataaagtttcaggcttagacattgctcgaaggccaagtgaaaatttactattgaacatgcacagtaataatgacgataatgagggaaaaatcctgaactcatttgttaatacggctctaccaccaccgaaagtgaatggtgttcaaacgagacgtgaacgccccgcttccaatagctcaattggtaccaagactaccgaagtgttttcctccacttccggatcctcctccttggaagatactagtgatgagggagacaatcacgatgccgagaaatgtaggctaagtggtatgtccaacattttaatggacagggccacccaaggtatacgtaccgctgagaatgaaacgagaagggcaagtagccagtctagtatagaaacaactactgatagtgttaaaactgcactacagaaaagcatatccttagatgaaactgcaatggaaacatccctaaataactctagacgatcttaccaagaacaattttatgcaaagaaaaatcaagcatcgatgcttaacagcaaacaaagaacacgtgctaaatcgcaaaccttttcttccataggccataagaatccctattctcccttacaaacatttggtatagcctccaaattttctaattcaactagtcggttagaggcctctccactcgaatctaatattccatcacaaaaacccttgaatggcaaggcattaaccccatctcaaaagtatagacttcgtaaagagcagtcagaaacgaacttaagaaatactatcaaaagaagagagaaattctatgaaagtcaagaacagatcattgaattacaagaaggagacatagacgactcattgatttggaatgtccctatggcatcatactcgacaaattcttttttggcatcagcaaaacctgaagatatgaatcacttgaccgccaataatgtcccatcagaattttcggaagactctatgaacgataatactgacacgaaacaatcatatagacattcaaacatatcgtttgcgagcacaacctcaaatgcttctctgttagattacaatgaaatgcctacatccccaatccctgggttgaacaaagtatctgatttccaatttattcaagacacaacaaaaagtttagcttctgtttatttgcattcttctaataggctttcaagaaccaaactgtccgacagaaccaaatcatctgaatttttaccactagagttaaaagaagctcaaaatcaaggtatggaagatctaatactcatatcagaaggcaaactggatgcagtaagtcactcaaggccaagttggctacctcctaaggaccgtcaagagaaaaaaattcatgaaaagcaaatcaacaaaagcatgagtgttgcgtctcttgatcaattagtgaagaataaaggtaaagaagaaaaattgattagagacgacacaaatagacagaaatatgtgctattattggacagagacataacaagaaactcctctttgcaaagcctatgtaaaatggtttgggatactccatttagtgatgacactagatcatcaatatacagcgaaattcttcaaagtaaggctaaatttattaccaggaattttatccaaccatttagcgagcttcaggacctgttaacaagaatgggagatttccccaaaaacaaagaagttgaaatctcaaaaattattgaaacaagtttaaagcgaaaagtgaacggcttggatgacatatcaccgcagttaatgctaatgttgaaattaaaatccatctcgtcacagggtatagttactggtgacgaactcttattccatcacttcctcgtgagtggatcatttcagggcttaggacttgaggaaatttggaacatcgtcaatttggtgcaaatgacatgtttcaacgatctatgtaaagagaaattcgattctaagatcctagaacgtaagggcgtggccgccggatacttactgcaaaatgatgaattcaaaaatgaatttaatacagaatgtatcaacttcaacacgtggtggaacatcttggaacgcattgatcacaaacttttcatgtgggtcatggatatcatagtagtgaacaattctcagagttacaaaaatagcaccatcaatgaaaacgaattttccagcagggattgggaatattatcgttccaaaaaagttgtgactaactacaagatcttggtttcatttgcattgaatgtattattgaactatcattttgggttcagtgacttaaaaagcctttgtcacgtaggtgaccaaaggttttgcatccccgtattcatcgacgatgaactagtagacacagataccgttaacgacgtgtttataaaaaaatgggcccactattacaaaaagttttga

SEQ ID NO: 1142 - DNA, 984 bp, Saccharomyces pastorianus
atgtcatcactagtcactttgaacaatggttacaagatgcctctggtcggtttaggatgttggaaaatcgacaagaaagcctgtgcaaaccaaatttacgacgctatcaagctcggttatcgtttgtttgatggcgcttgcgattacggtaacgaaaaggaagtcggtgaaggaatcagaaaggccatatctgaaggtcttgtcactagagaagatatatttgttacctccaaattatggaacaatttccatcatcccgaccatgtaaaactagccttgaaaaaaacgttgagcgacatgggcctggaatacttggacttgtattacatccacttccccattgcctttaaatacgttcctttcgaagagaagtacccaccagggttctacacaggtgcggaggacgacaagagaggtcatataaccgaggctcatgtccctattatagatacataccgtgctttagaggagtgtgctgacgaaggtttgatcagatctattggtatttccaatttccaagggagcttggttcaagatttactacggggatgtagaatcaagcctgtggctttgcaaatcgagcatcatccctacttgacccaagaacacttggtggacttctgtaagatgcacgatatccaagtcgttgcctactcctcctttggccctcaatcgttcattgaaatggaccttggcttggcaaagagcacaccaacgctgtttgaaaatgacctagtcaagaaggtttctgaaaaccacccaggtagcactacctcccaagtgctcctgagatgggctactcaaagaggtatcgccgttattccaaagtcctccaaaaaggaaagactattgggaaatttggaaatagaaaagaaactcactctaaccgagcaggaactcaaagaaatttcttctttgaatgccaacatcagattcaatgacccatggacttggttggacggtaaattccccatttttgcctga

SEQ ID NO: 1143 - DNA, 1764 bp, Saccharomyces pastorianus
atgtcacatccacactctcatagtatatacctgtccgaggctcccgttaggagaccacaggccatgggcaattcgcttctaaggaagattcaaagagcctgcagaatgtcattagctgaaccagacttgggattgaatctagatattgctgattacatcaatgagaaacaaggtgccgctcccagagatgcagccattactcttgctaaattgatcaacaatagggaatcgcacgtggccatattcgccttatctttattggacgtgttagtcaaaaattgtggatatccgtttcacttgcagatttctagaaaagagttcttaaatgaattggtcaagagattcccaggtcacccaccattgcgttactctaagattcagagattgattttgacagctatcgaagaatggtatcaaaccatttgtaagcactcgagctataaaaatgatatggcctatatcagagatatgcatcgtttattgaagtacaagggttatgcattccctaagatcagcgagtctgatttggcagttttgaaacctagcaaccaattgaagaccgccagtgaaattcaaaaagaacaggaagtcgctcaagctgccaaactggaagaattgatcagacgtggtaagcctgaagatttaagggaagctaacaaattgatgaaaatcatggctgggtttaaagaagacaatgtcgttcatgctaaacaggccatctctaatgaattgaacaaattaaaacgtaaggcagatttgctgaatgaaatgttggagtcaaatgacttacagaattgggataatgagactacgcaggaactccaaggttcattgaaagctgcccaaccaaaatttcaaaaaattattgaagaagaacaggaagacgatacattagtgcaagatatactgaagtttaacgatacggtcaaccaattgttagagaaattcaacttattgaaaaatggtgagtccaacgctgcttcacaaatccatccaagtcatgtttctggtccaatacagcaatcttctggggctctaaccaatgaaattaacctagtcgattttaacgatttagacgaaacaccctctcaaggaaacaacactagtgctgcgggtacttcaggagaagtagaaacatctgccaatgatttattaggtgatctgactgacttatccatttcaaatactccaagcggtaaccaaacagcttttggtcttggaggtgacattgtattggggtcttctcaacctgcacctccagttaccactaccacaaattcgaataacgacttggatcttttgggactttcaagccctcaaccaacaactaataaccaagcattaaacggtggcgggtttgacattttggctggatttagcacaacatcaagtacggttgcctctctaccaaaccttgcaagaaccttggttaatgagtcatccaatttgagaattgagttcgaaatcatcagagagtccgattctgtcataaggataaaatccttttttacaaacttaacctcgtcgccaatctcaaatttagtcttcttattagcagtaccaaagtcaatggcattgaaattgcaaccacaatctggtaatttcatggctgcaagtgctaaagacggtatcacacaagaggggattattgaaaatgctccaattaacccttcgaaatctttgaaagtcaaatggaaggccacatattctgttaattccactccagccgacgaaacagctatttttacagtacctaatgtataa

SEQ ID NO: 1144 - DNA, 639 bp, Saccharomyces pastorianus
atgaaacatattctagtgtttggaatttatctgatctttgcgcttgtccaaagagtggaaggtgttcatttttacgccagacccggagaaactaaatgtttttatgagcatttatcaaaggggaacttattaattggcgatttggatatatatgtagaaaagaatggtatgtctatggaggacccggaagccagcttggccataaccgtggatgaaacattcgataacgatcaccgtgtcctgaaccaaaaaaactcacacacaggtgatttcagtttcacagctttagacacaggggaacataggatgtgcttcaccccgtcgtacaacaagaagtccactccagtaagagtgttcattgaactagaaatcggcaacgtcgaagcgcttgatagtagaaggaaggacgacatgaactcactcaaggggagagtgttccagttgacccaaaggctatcttcgattcgcaaggagcaagacaatatcagagaaaaagaggcagagttcaggaaccagagtgagtctgccaacagcaagataatgacgtggtccgtacttcagttcttcatgctagtggcagcgtgcgtcttccagctacgctacctcaagaatttctttgttaaacagaaggttgtatag

SEQ ID NO: 1145 - DNA, 1323 bp, Saccharomyces pastorianus
atggctgaacatcaacagggaagtacagaatctgagctggaaacattaaggttggagaatgccaaattaagggaacaactggctcgggtgcaagacaacaagaaggattacccattatctttggaggaataccaacgctatggtaggcaaatgattgtcgaggaaacaggcggtgtcgtgggccaagtcaaattaaagaacaccaaggtcttggttgttggcgctggtggtctgggatgtcccgccttgccgtatctggcaggcgctggtgtgggtcagatcggtatagtagataacgacgtagtggaaacttccaatttgcacagacaggttcttcacgattctagcagagtaggaatgttgaaatgcgagtcggccaggcaatcgattacgaaactgaatccgcacgtcaatgttgttacttatcccgttagactaaactcaactaatgcatttgagatatttgaaggttatgactatgtattagactgtaccgattctcccctaaccagatacttggtctctgatgtagctgttaatctgggaataacggtagtgtctgcatctggtttaggtacagaaggtcagctgaccattttgaactttaacagaatggggccatgttatagatgtttctatccaactcctccaccaccaaatgcagtgacttcatgccaagaaggtggtgtgataggcccatgcattggattggtcggcacgatgatggccgtcgagactctaaaactcatcctaggtgtctataccaatgaaaatttcaagcccttcttgatgctatattcaggcttcccacaacaaagtctgcgtacattcaaaatgagaggcagacaagagagttgcttgtgctgtggcaagaatcgaaccataacaaaagagaccattgaaaagggtgagattaattatgaacttttttgtggctcgcggaactataacgtttgtcagcctgatgaaagactaagtgtagaagcttttcaggatttatacaaggacaatgaccgtaaaacgaaccatatcttagtggacgttagaccatcccaccactacgaaatatctcattttcctgaggcaatcaatcttccagtcaaaaagttgagagatatgaacggtgatatcaagaagttacaagaagagcttcccactgtaggaaaggacaccgatatagtggttctctgccgttatgggaatgactctcaagtagcgacaagattgttgaaggacaaatttgggctctcgaacgtaagagacgtgagagggggctacttcaaatacattaacgatatagaccaaaacattcctaaatattag

SEQ ID NO: 1146 - DNA, 1137 bp, Saccharomyces pastorianus
atggttgatttgtcaacagctttgattcatggcgacgataaagacaacagagttactgacgttgcgcccccaattaatgtatccacaacgttccgttacgatgatgacgatttgattccatggacagagcgtgaaaatttggactttatggaaaagagacccgtttattctcgtctggcacatccaaacagcaccagattagaaagtgtcttttcagacatactcgatgggtatgctgttgtttattcttctggattagctgcgttcttcgcggcgatggttcactacaatcctaaaaagatctttataggtcaaagctaccatggtgttcgagcaattgcaaatatattgacccgtaattatgatatcaaacaatatccactagaagacattgaaaaatatgcaggtgaaggcgatattgttcatctggagtcgcctgtaaacccatatggtacgtcttacgatattgaaagttttgctcgcagagctcatgcaaagggcgccctactagtactagattccacgtttgcgtctccaccattgcaatatgcatggaattttggagcggatatcgtcttgtattccgctaccaagtacttcggcggtcactctgacttattgagtggtgtcctcgtagtcaaagatgaagctgtttctcggcgcctaaaggacgataggatttatttgggtaccaacgttgcaaatttagaaagtttcatgttattgcggtcactcagaacttacgaactgagaataaacaagcaatccgaaagtgctaccaaaatagttaaattcttgtttgatcatcagtccaaatttgataaagtactgaaaacaatctatcactcatctttacagaccgaggaatttgttaaaaagcaactagtgggtgggtatggtcctgttttcgccatcactctacataccaaggagcagtgcaagatatttcctctcaagttaaaatactttcaccatgcgacctctctgggtggcattgaatcccttgttgaatggagagcaatgacagacccatacatcgatcagactttgataagagtgtctgtaggatgcgagtccgccgatgatttaatcagggatttggcttcgacactgcaggagctgcaagatgctgcttga

SEQ ID NO: 1147 - DNA, 1473 bp, Saccharomyces pastorianus
atgttcaggatacaattaagaactatgtcaagcaaaacagctaaaaacgattacccaaaggagtttgtaaatttcttgaacagctctcattccccctaccatgccgtccataatatcaaagaacatttagtgtctaaggggtttaaagagttgagcgaacgtgaatcgtgggctgatgaagtcgcactcaaaggcaagtactttgtaacaaggaacagttcttctattattgcttttgctgttggtgggaaatggaaacccggcaacgccatagccatcacgggtgctcacactgattctcccgtattgaggatcaaacctatctccaaaagggtcagtgagaagtatctgcaagtgggagtggaatgctatggtggggccatctggcattcgtggtttgataaggatctgggcgtcgctggtagagtcttcgtaaaggacgccaaaactggcaaatccattgccaggttggtagatctaaacaaaccattgttaaaaattcctactttggctatccatttggatagagacgtgaaccagaaatttgaattcaacagggaatctcaattgctaccaataggtggcctacaaaaggataagactgaagcttctcctgcaaaagagaccgatgagtctggcttctcctctattaaaacaatagtggaaagacaccataaagaactattggagttagttgccaaggaactggccattgatgcaattgaagatatcgaagacttcgagttgattctttacgatcataacgcgtccaccctcggtggcttccacgacgaatttgtcttttcagggagactggataatttgacttcttgtttcacatcaatgcatggtttgacgttggcagccgacacagaaatcgatcaagaatcaggtattcggttgatggcgtgctttgatcatgaggagataggttcgtcttctgctcaaggggcagattccaacttcttgcctaacatcttggaaagattgaccattttgaaaggggacggttctgacgtatctaaaccattgcctaactcatcgattttggaaacctcttccaaatcgttcttcctatcttctgacgtcgctcacgcaattcatccaaattatgcaagcaaatacgaaggtcaacacaaaccactattgggcagtggtcccgtcatcaagataaatgctaaccagcgttacatgaccaattcacctggcctagtcctggtgaaaagactagcagacgccgctaaagttcctctgcagctgtttgtcgttgcaaacgactctccatgtggttccacaatcggtcctatcttagcgtccaagacaggtatcaggactttggatttgggtaatcccttgttaagtatgcattctattagagaaaccgctggttctgccgatttggaataccaaatcaaattatttaaggagttcttcgagcgctattcttctatagaatccgagattgttgtataa

SEQ ID NO: 1148 - DNA, 1251 bp, Saccharomyces pastorianus
atgtccatcaatactgccccctcgtcgccccccagccaggcgtctcccgcagcagcagcagcagccgctgctgctgcttcgcacgaccacaccaaatttaataatcccatcagattgccgatatccatctctctcaccattaatgatacgcttaatcacagcagcaataacaatggcggtaccaatggtttgggcattttgccctcgcgcacggctacttctttggccatggtgaacggtaacagtgtcaatgctgctactgctgctgccgccgccgccacagagacaagtgcagtccccgctgtggccagcacgaagagtatccgccatttcgtgtatcctccaaaccaagtaaaccagatcgacttctcgttagacatacaccccccaccaaacacctcgctgcccgagcggatagaccagcccattttgaaacacagaatggacaagcacgggctcttcagcatcaggctgaccccttttatagacacgtcatcctcttcttcagccaaccagggtcttttcttcgaccccatcataagaaccgcgggcgcaggctcgcagataattattggaaggtataccgagagagtaagagaggccatttccaagatcccggatcagtatcatccagtggtcttcaaatccaaagtaatatcacggacccatggctgtttcaaagtcgatgatcagggcaactggttcttaaaggacgtcaagtcctccagtggaacgtttctgaaccaccaacgcttgtcgtcggcctccactacctccagcgaccaccttctacacgatggcgacatcatacagcttggcatggactttcgcggcggcacagaagagatataccgatgtgtcaagatgaaaatcgaactgaacaagtcctggaagctgaaggccaatgcatttaacaaagaggctttgaaccgaataaaaaacctgcaaaaactaaccacgggtctagaacaagaagactgctccatttgcctaaacaaaatcaaaccttgccaagccattttcatatctccatgcgctcatagttggcatttccattgtgtgagaagactagtaattttaagctatcctcaattcatgtgccccaactgtagatcgaactgtgacttagaagccactctagaatccgaatctgaatctgaatctgaattcgaatccgaaaacgagtcagacatcgagatgaatatcgacatggatacgaataacaatttaggcgttcgcttaatagattaa

SEQ ID NO: 1149 - DNA, 1929 bp, Saccharomyces pastorianus
atggccgaaaactcgttctcgaagttcatcgcaaggaacaagctagccattgtggccacagtctctgcggggaccgctgccgtaggtgcctacgtgtactaccatcagctcaagcaacagcagcagcagcagaaacagcaatcgaagggcactaaggaccgccagcgccagggagaggtatgtcctggccaggacgaagacgaggtagaattgaaggaggacggcagctccactgctggtagcaacaagaagaagaagaagaacaaacggaagaggaagaataagctcaaatcagcggaagagttcgagtaccccctcttgcctgacggcgagcccgacatggaccgattaagaggtctgcccgtcccacagaggcaggcgtttgccgtgcagttgaaagacaaaggtaatcacttcttcgccggtaaaaacttcgacggtgccatcaagtactaccagtacgccatcgagctggacccgaacgacccggtgttttactctaacatatctgcctgctacatttccacgggcgatctggacaaagtcgtggagtacactacaagggcgctcgaaataaagcctgaccattccaaggccctgttgagacgtgcgtccgctaacgagtcgctggggaattttaccgacgccatgttcgacctgtctgttctgtccctcaacggggactttgatgggacctccattgaacccatgctggaaaggaacttgaacaagcaggcaatgaaagtgctaaacgaaagcctaaccaagaacggcgacgacaaggactcgcaaatactaccttccaacacgtctttagcatcgttctttggaatcttcaaccctgacttggaaacttcccgtgtcaacaccagttcggttctggacagtgccagcgccacgttgtcggaggccttgcaaagcttatattccgctacaagggaaggctatctgatagcagacgatcttcttacaaaggccacagatgcataccattctctgatctgtgccaacaaggaggattccgctataagggaaaatgctgcattagccttttgctacgcaggcattttccaattcttgaaaaatgatctgttgaatgctcaagctctcttgcaagaagccatcaaccttcatccaaccccaaattcgtacgtgttcatggctttgaccgtggccgataaggagaactctcaagagtttttcaagtactttaaaaatgcaatcgacttggaccctgagtacccgcccacttattaccatcgcggccaaatgtactttatcctacaggagtacaccaacgctaaattagatttccaaaaggcccaaagcttaaaccctgggaatgtctacccctacatccaattggcttgtttgttgtacaagcaagataagttttccgaagctgagtctcttttcaatgaggcaaaattgaaattccccattttacctgaagtacccactttttacgctgagatcttgactgataaaggcgacttcaatactgcgatcaaacaatacgacattgccaaaaggttagaggaagtgcaaaagaaaatacacgtaggtattgggcccttgattggtaaggccactatcctagccagacagtcttctcaagacccaacccaactagatgaagaaaagtacaatatggccatcgatctattgactaaagcatgtgaattggatccaagatccgaacaggccaagattggtctagcccaactagagttgcaaatggaaaagattgacactgccatcaaattgtttcaggagtcggcaactttggcaagaaccatggatgaaaaactgcaagcaactacatttgctgaagccgcgaagatacaaaagcgtttgagagcagatccaatcattagcgcaaagatggagcaaacattggccaattatagggctcaaggaatgatgtag

SEQ ID NO: 1150 - DNA, 3258 bp, Saccharomyces pastorianus
atgtctggttactacagaagaacgcatccatcatctgggcaatataagcaccctcaagagcagcctaagtattcacgtcctggccaatatcggtacccaaatgaccaaacataccaacagtatcctaaccaatacaatcaacgtcgacactataatcacaatgaaagctcaaggcgacgttatagtgacgatcgcccgcatagctcaaatattaccaatacacgacattcatattacggtaataacgacaaccaaagtggcacatatgtaaataataaatctgacgttaataatgtaagaggtttgccacagtcacgctactcaaataccagtgctaatactgcatcaacatccccgaatacgcctctactcacaaattctgccttacttctacaacaaagaccaccttcagttttaaaatataatacagacgtcttgatgtccaagttccattacttcgaccctataaaaggcgaattctccaataaagacaaaatggtttcatggagggctacagataaagaatttgcggaaaccggatattacgtagttaaagagctacaagatggacagttcaaatttaaagtaaaacacaggcatccggagattaaagcatccgacccacgtaatgaaaacgctactataaccaatggaaaagttgcgagccatagaaaatgcaggaaatcgttagtcttgctacctcgcatatcatatgacaaatattctttagggccacctcctccatgtgaaattgtaatatatccaacgcaggattcaacaaccactaacattcaagatgtatcgataaaaaactattttaaaaaatacggcgagatctctcattttgaagcatttaatgatcctagtagcgctttacctttgaacgtctatctcataaagtatacaagccctgatggaaaacttaatgatgcagccaaatcagcctttaatgctgtaaggaagcatgaatcttcaggttgttttatcatggggtttagcttcaacatcgttctgaacaaaaatactatcttaaacaacatcattgccaaatttgtcgaaacaaatgttaaaaacttacaaaagttgcaagaagacctgaaaaaagccaaggaaaaggaaatggagaaagaaaaggtgaaggagacccaaagtaaagaaattaatttgccgaaggagcctaaggtagacacattatcgcatacatcaggatatgaaaagaagatcccctacgatcttttgggcgtagtcaataacaggcccgtcttacatgtctcaaaaatatttgttactaagcatgggtttcgagttgaggactttaagtataaattaagaggctacagatgtgcacgatttattgaccatccaacgggtatatatataatctttaacgacatcgcgcatgctcaaacctgttcaaacgcagaatcaggcaaattgacaataatgtctcgtagtagaagaatgcctattctaatcaaatttcacctgattctccctaggtttcaaaacagaaccaggtttaatggacccggcgcatcgactacatctgaacatgtacccgtggaatatgagtctaaagaagagtttattgacgccactgctaaacaaatactaaacgatctagagaaagccttgcatgtggatatcaagaaaagattaataggacccacagtgttcgatacattagatcacgcaaactttcctgaagtactagccaagagagaattacgggaaaaagagagaaaacaagaaatagcctctaaaattgctgaaaatgagttaaaacgtaaaggggaagctaaacgggactttgatttatttggtttgtatggtggatatgcaaaatcccaaaagagaagtttagatagacacagttcgcttacaatggaccgtacatctttgaaaaggaagaagttatccaagggcatcaaaccaatggcgcacttgttaaatgaggaaacagattccaaagaagctactccatataatgatggcggaactcctttctcaaatgatcgtttctcaaaagaagacgagaatatgacatcttctaattcatcatcatccgaagaggaggaggaggaaggaacagataagaaattcaagagtgaatctgagccaacaactccggagtctgatcacctccatgccattaaatcattgctgactgatgaaaacggatcccttgacatcttggatacacctttgatgtataagcctacagctaccgaaattcccgagcctgtatatccacctgaggaatatgatctaaaatatagccagacgttatcacccttggacctgcaaaatgctatcaaagatgaaaaagatatgctgattttaaaggaattgttgaaatcatacactgtcacttcttcttcttcggaatctggtgcgctcttggagtacaagacttggaaatctcgtagccaaaaggtcgaagaagaaaaggcatctgactggcaaatcaaacttaacggtactttgtttgatagtgaactacaaccacttagttccttcaaagctgaaggctttagaaaaattgcagataaattgaaagttaactacttaccccatcgtcgcaaaatccaccaaccgttgaacactgtgaatattcataatgaaaagaatgaatacactcctgaactttctcaaagagaagaatcttcaacaaaagagccttcggactcagttccccaagaagtctcatcttcgagagataatagggcgtcgaacagaagattccagcaaaacatagaggcccaaaaggctgcaattggtactgaatctgaactgctgtcactgaatcaattaaataaaaggaaaaaaccagtcatgtttgcacgttctgcaattcataattgggggctatatgctctggattccattgcggcgaaggaaatgattattgaatacgttggtgaaagaatcagacaacccgtagcagaaatgagggagaaaaggtatttgaagaatgggattggttcaagttatctctttagggttgacgagaacacggttattgatgctactaaaaaaggtggtattgccagatttatcaaccattgttgtgatccaaattgtacggcaaagattataaaagttggtggaagaaggagaattgttatttatgcattgcgcgatatcggggctaacgaagaactgacctatgattataagtttgaaagggagcaaaacgacgaggaaagattgccctgtttgtgtggcgcccctaactgtaaaggtttccttaactga

SEQ ID NO: 1151 - DNA, 2874 bp, Saccharomyces pastorianus
atgaatcctttgtttagagtaccgaaagtatatctaccaatttgtagagcctcaatacgatattctagtaatgcaaccgctcaaccaaaaattgcaaagctcaaaatcaccttgaacaaagctgccgaatcgagtagtgagaaaacagacacatatgcaattgatacagatagttgccctatagcacagcgaaatggtaaggcagcatcctctcaacccccgaaaccttctttgcctccatcgttgcaatatgtacgtgacttaatggatttgtataaaggacatgtggttctaacacagatggggtcgttttatgaactatactttgagcaagcagtaaaatatgcaccagagttaaatatagcattgacaaatagagcttacactcacggtaaagttccttttgcaggattccctgttcatcaattaagtcgacatttgaaaatgcttgttaataattgtgggtatagcgtaacaattgccgaccaatttaaaaagaatgatgtggcagataacgaaaccaacaaattttatagaagagtgaccaggatagttacgccaggtacatttatcgatgaagcgtttgagaatttaagagaaaatacatatttattgaatattgaatttcctgagaattgcatgagctcggtggcagatgcgagcctaaaagtcggtatatgctggtgtgacgtgagcactggggaaatattcgttcagcaggtatatctgaaggatttagtttccgccataacaagaattcagcctaaagagattctattggatgaaaagttgttggagttccatattgagtccgggacttggtatcctgagcttgttgaatttaagaagttctttatcaaatatcaaaaaatgcccagccagcatcgcactatagaatcgttttatgggctgttcaatctgggtgaaagagaagcaacagatagacaactgagaatccaatttcaaactttcacccagaaggagttggctgctttaagaaacactctaatttacgtaagcgaccatctacccaatttctccattaattttcaaattccccagagacagttggcaacagccataatgcagattgactcaagaaccagtactgctctcgagctacattcgactgtaagagacaacaataggaagggctccctgttgtcatctatcaggagaactgtgacaccttctgggacgagaattttaacccaatggttaagcggaccctcccttgatttaaaagaaatcaagaaccgccagagaattgtgggatttttcaaaagcaatgttgatatcactgaagacttacggttgatgttaaagaaagttcatgatctctctcgtatattgcaaaaatttagttttggaagaggtgaggcactagagctcattcaaatggcacgctcgctacaggtatcacgagaaatactggattatatattagaaaatacgtctttgatgagagttacgttgaagagccaaataatgcagctgattaaaactttggactttgaaaagaaattgattgatgatatattgaagtttttgaatgaggaggaactggttaaatcgcaagatattaagcaaagtgatgatttgaatgtgatccttgagacggacttaaagggaaagaaagcgtgtagaaaagatgaagttcctgaattgacaggatttattgtaaatccttctttcaacgccaaacttgggaaactgcatgatgcttatcaaaaaattgggcagaaaaaagtagaattaaacgcttcgctaaaggatctgtttattggcaaactaggcgccaaaacttttgctttgaaggaaaggcagaatggcgaatatgcactacatgtgacaggaacagcttccaatttgaaaaaaatcaatgaattaaccagtgaaagcgattttaatggaagcaagtttcatattttacagcaatctagccagactcgctggttgagtcacaaatcctggacagacttgggccatgatttagagctactggctttaaagatcagaaatgaagaggcgaatattattgattcatttaaaagaaaattcatcgataaaagcaacgaagtcagacaagttgcgactactctaggttacctggatacgttatcgtcatttgctattttagctaatgaaaaaaatttggtttgtcctaaggtggacgaaagtgataaactggaagtagtgagtggaagacatttaatggttgaagaagggctttccacgcgttctttagaaactttcacagccaatgattgtgagttggcaaaggacaacttatgggtaattactggaccgaacatgggtggtaaatctacattcttgaggcaaaatgcgatcatagtaattttggcacaaattggatgctttgttccatgcagtaaggcacatgttggtattgtagataagcttttcagcagagttggttccgcggatgatctatacaatgagatgagtacattcatggttgaaatgatagagacatcatttattcttcaaggcgctaccacacgatcactggccattcttgatgagattggacgtggaaccagtggcaaagaaggcattagcattgcatatgcaacactaaaatacctgttagaaaacaaccaatgtagaactctctttgctacacattttggtcaggaactgaagcatatcatagacagtaaatgcacaaaaagtttacgtgaaaagattaaattttatcaaagtggcattacagatttaggaggcgaaaatttctgttacgatcacaagttaaagccaggcatttgcatgaaatcagatgccattagagtggcagagttggccgggtttccgaccgaagcattacgagaagctcgagaaatattaggttaa

SEQ ID NO: 1152 - DNA, 564 bp, Saccharomyces pastorianus
atgagtgtcagtcttgagcatacgctcggattcagaataaaagtaacgaacgtgttggatgtggttactgagggtagattgtattcgttcaattcatcgaacaataccctcactatacaaacaactaaaaagaaccaatctcctcaaagtttcaaagtgatcaagtgtacattcgttaagcatttggaagtcattggtgacaaaccttcctttaattcattcaagaagcaacaaattaaaccctcatacgtgagtgtggaaagggttgagagacttctaaaggataaaataatagcatccaaaaagagtgaacttttgaaaggcaaaggagtgagtgtggaaggtcaatttatttttgatcaagttttcaagactataggtgacaccaagtgggtcggcaaggatatcgttatccttgatgacgttaaggtgcaaccaccatatacggttgaagacatcaaagttttacacgaaggcagtaaccaatccattacattgattcagagaattgtagagagaagttgggagcaattggaagaagacgatggtagaaaaggtggatag

SEQ ID NO: 1153 - DNA, 693 bp, Saccharomyces pastorianus
atgtctgaatttttgaacgaaaatcctgacatactagaggagaaccaacttcctaccagaaaagaagatagagccaaggaccttttgctaggcggttttagtaatgagactactttagagaggaggaggctcttgctgaagatagaccattctcccaaatctcaagtgttgcaagatatagagctattggacaaactactctcgattcgagctccacccgaattgacttccgatgaagatagtttgcaagaaagcgaggaagaattcatgacaagtcaaaacgatgaagaagaagagctagattttattgatgctcaagaaatatacgatttgattgcgcatatttctgatcctgaacacccactgagccttgggcagctttctattgtaaatttagaagacatcgaagttcatgattcaggtaagcagaccgaaatggcggaagtcatgatcagaataacgccaaccattacacactgctctctagctactttgattggtttggggatacgagtcaggttggaaagatctcttcctcctagattcagaatcacgattttgttgaagaaaggtactcatgacagtgagaatcaagtaaataagcagctgaatgataaagagcgtgtagcagctgcttgtgagaatgaccagttgttgggtgtggtctctaagatgttagtaacttgcaaataa

SEQ ID NO: 1154 - DNA, 1887 bp, Saccharomyces pastorianus
atgaacgaaatagaaaatgagagtccaattttggagaatgagctcgtatctaaatatgaaaaagaattgagtacagaacaagaagaagatgggcctatgatccttacgcagttgaatgaagacggcaccacttctaattattttgataaaagaaagcttaagattgcccctagatcaacgttacagttcaaagtgggtccaccatttgaattggttcgggactattgttcagtagtagactctcaaagtggaaaggaattgcaattgcggattattccaagaatcgacagaggattcgaccatattgatgaagaatgggtaggttataaaagaaattactttactctagtatccacgtttgaaacagttaattgtgactcagattcatttttaaagggtgtttttgacctgcagtttgaagattcttcgttagacgacaaagtaagagtgcagtattttgcgatcaagataagagctaagaatgacgatgacgacacagaaattaatcttgttcaacacacagctaaacgtgacaaaggaccacaattttgtccctctgtatgccccttaattccttcccctttaccaaaacatcaaattattagagaggcgtcgaatgttcgaaatgttgctaaaatgaagaaatatgattctactttttatttgcacagagatcaagttgattatgaagaatacagagtcgattctttattattttcttacccagaaaattctattcaaaaggttgcccgttatgaaagagttcaatttgcttcttcaattagtgtgaagaaaccatcccaacaaaataagcattttagtttacatgtaatattaggtgcagttgtagatccagatagcttccgtaatgttaaacccggaattccttacgatgaattggccttgaaaaatggatcaaaaggagtatttgtatatttgcaagaaatgaaaacaccccctctaattattagaggaagatctccgtctaattatgcgtcatctcaacgaataacagtaaggactccctcgagtgttaattcttctcaaaacaacactaaaaaaagaatggcctcaacaacacctcagccattgaaagaaagctgcttaaatgcaagacccgcgaagaggcgatccaaagtaacggtagatgtattgaactcaggtatatctagctcgccgattaaatcgcggcaatcaactccagaagaagcttcaaaggaaaacgaggatccgttcattaggccaagaagaagggtagaaactcttgaacatatcgaaaataaattgggtggcttgaaaactcaatatccagattcctctttaaaatatccgagctcctcttcaagggatgtagaagaatctctagaaaatgaagatttggcatattcgagcagtatttctgttaatatgaagcaaattgaactaaaaccagcatacacctttgaacatgaaaacgtttttagagttggttcgctagcattcaaaaaaatcagtcaactaccgcatgaaaaatacgatattacaaaagagaaaaaatgtatcgagcagaattattcaagaattgaggtatattcacgatctgagtgcaaaactagctctgggaacgaactctctcttccaaatatctccttttcgatattacctaactcagcagaaaatttccatttggaaactgcacttcttccagcaatggaagaggacgtaccaaggaccttttcaagaatactagaaacaggttcatttcaaaattattatcaaagaatggaagcagaaaacgtggatcgactatgttctaaaggtgtcaagttagtagcgagtggtactctaccatctcgtacatttactagcgaagaattatttgaagaagatagtttctataagcattaa

SEQ ID NO: 1155 - DNA, 768 bp, Saccharomyces pastorianus
atggctaggagcaagacaaacagcaagaagaattctgcgggtaaacgtttaatagacagggtagttcccatggacagaataaaaaaagttggtacgcataaaaaaacacctgtaaagcatactaaagagggatttagcgtagtaaacggtaaacttgttagcagtaatgacatcggggtacttttgagagaggctcaaggagccatagacaagagaaataatgtttcgcaaggaaaaaacaagaaaaatggcataaggactaataataagagtaataataggcaccaaatcaatgttaacaccagccctggctggggtgcccgcgaagaaacagaacgcgggccttctagcaaaagaagatcccagaaggccagcagtacaaataacatgaacatctcattgggctccaatactctcaatggcaagaaacagcgacaacaatttgacggagaaatgggaagtggcagccagctcgttatctcaaccaattcagacgcatcagataaattattgatgctgttcaatctgacattgggtgtaaaccacgaaaacttaaaaaacgtcctacaaaatctttcacaagtgcagatagctcacgttaaagtgagggatttgccttctggatccgctactgcaaaagtcagactagcatatcctacgacacaatctctagaaaaagtaaggaaattgtttcatggagctctagtggatggaaggcgtatccaagtggtgattgcatccgaagaatcgacacacttatcgtattag

SEQ ID NO: 1156 - DNA, 1155 bp, Saccharomyces pastorianus
atgaaccaattgagtgatagtgatgctttgtacaatcagccgatagtaatcgacaatggttcgggcattattaaggcagggttcagcggtgaggaaaaacctaaagctttggaatactctctcgtgggacatgcgaaatatgataaagttatgcttgagggccttcaaggagatacatttgttggaaataaggcgcaaagactgcgcggtttgctcagactacaataccccattgagcatggtgtggtcgaagattgggattcgatggaacttatatggtcacatattctaaacgacgtattgcaattgcaaaatataaaagagcatcctttgttgattacggaagcacccatgaaccctttgaaaaatagagaagttatggctcaagtgttgttcgaaacgtttaatcttcctgctttatatgtttcgaaccctgctgttttatcgttatatgccagcggaagaactacaggctgtgtggttgattgtggtgaaggatattgtagtacggttccgatttatgacggtttcgcattacctgcatctatgatgaggatggatatcggcgggagagatatcactaaacaattgcaatttcaattgcgaaaatcagctggcgtttctttattttctagtagtgaacgtgagattgttcgtacgatcaaagaaaaagtttgctatatggcgacagacattaagaaggaagaaaacacatatttgcaagaatctcaggattcgacatctgtattcaagctacctgacgggaaatgtatagaaatcgggaatgatcgatatcgtgctccagaaatattgttctctcctcaaatcgtcggctcggaatatgacggattatcggatatgtgcatgcaatcgatttggaaagtcgacttgaacttgaggtcaactttgctttcatcgataattcttagtggtggaaccacaactcttcgagggttcggagatcggatgttacacgatttagaagcttttactaaaggagcatctaagataaaaataatagcacctccagaaagaaaatacactacgtgggtaggaggttctattttaacagggttatccacctttcaaaggctttggaccaagaaatctgattggctggaggataataccagtgtatattccaatctaatgtag

SEQ ID NO: 1157 - DNA, 396 bp, Saccharomyces pastorianus
atgtcagaggatctttcacccaccagcagcagagtggatttgagtaacccccaagggtttactaaagacggagtggatttatcgaagttgacaccacaggaattgaaattatacaaaatgtatggaaaattgccatctaagaaagatctgttacggcacaagatgcaagaccgtcagtattttgacagcggtgattatgcgttgaagaaagcaggtgttattaaatcggacgatgttattgtgaataattctagtaataatcttccagtcaccaatcccagtggcctgagggagtctattattagaagacgtatgagtagtagtagcggtggcgactccatttcgagacaaggaagcatctcaagtggacctccaccaagatctccaaataaataa

SEQ ID NO: 1158 - DNA, 1647 bp, Saccharomyces pastorianus
atgtctaggcccatggtaagcactactctagcagtcaacaacctcaccaacacgaacgcaaacgtgaacgtgaacgctgccaagcacctctaccaccaggccgtcgactcacccgcaagatcctcaatgactgccacaaccgctatcaactccaacggcaactccgccagagacgactcgaccattgtcgggctgcactacaagatcggtaaaaaaataggcgagggctcgttcggtgtcctcttcgaaggtaccaacatgatcaacggcgtgcctgtcgcgatcaagttcgagcccaggaagactgaggctcctcaattgcgagacgaatacaaaacctacaagattcttaacgggacgcccaatatcccatacgcgcactacttcggtcaagagggcctgcacaacatcttggtaattgaccttttgggcccctccttggaggacttgttcgactggtgcagcaggaagttctccgtgaaaactgttgtccaagtcgctgtgcaaatgattactttgatcgaggacctgcacgcgcatgatctgatctaccgtgatatcaagccggacaacttcctgatcggtaggcccggccaacccgatgcgaacaacattcatttgatcgacttcggcatggctaagcagtaccgtgacccgaagaccaagcagcatatcccgtacagagagaaaaaatcgctaagcggtactgccagatacatgtccatcaacactcacttaggaagggaacaatcaaggagagacgatatggaagccttgggccacgtttttttttatttcttaagaggccatttgccttggcagggcctgaaagcaccgaacaataagcaaaaatacgaaaaaattggtgaaaaaaaaaggtccaccaacgtgtacgatctagcccaaggtttgcccgtacaatttggaaggtatttggaaatcgtcagaagtctttccttcgaagaatgtcccgattacgaaggctacaggaagctactactctctgtattggatgacttgggtgaaacagcggacggccagtacgattggatgaaattgaatgacggccgtgggtgggaccttaacataaacaagaaaccgaacctacatggttatggtcatcctaatccaccaaacgacaaatcaaggagacatagaaacaagcagcttcaacttcaacagcagcaacagcaacagcagcagcaacagcaacagcaactagagcagcaacaacaacagcagcaactagagcaacagcagcaacagcaacagcagaatgctcagaaaaatgatgctgatttacgcaattctcaatataaaccaaaactagaccccacctcttatgaagcataccagcatcagacccaacaaaagtatttgcaagaacaacagaagagacagcaacaacagcagcaacaacagcaaccacagcaactacaacagccccgtgttccaggccaacctcaacctcaactccaatcccaaccccaaccccaaccccaatcccaacaattcggtgccactcgctaccaaccgcaacaacaaccctccgctgctcttagaacccctcatcaacaactgaatgatgatagttcaagcttagcagcttcccgcaagggcttcttccaaaagttaggttgttgctga

SEQ ID NO: 1159 - DNA, 1110 bp, Saccharomyces pastorianus
atgaaattcacatcagtcttcaccttttttctcgctgctttaacagcttctgcaacaccactagggctttacaagagacagactacaaatgtatccagtaacagttctagttctggcggcggtacagttccagtaatcattactggaggttctgctgtatccagtagtagccagtctaacgtgaccaccactactctattcaattctacttctacattaaatgtcactcaactttaccaaattgcctctcaagtcaaccagactttacaaagtgggtcttcttctggtattattattgttactaactggcaatccattgaaactctaagtttcttctgctcaattgtttttgatacatccaagaccattgtcattactgaaaattacttgtggggtgtaccaatcttaagcagttcgcaagcacaaggtagaggtactttggttgctggcagcgataatgttatatactctggtgttttcgcaccatataccgttcccgtgggtgtttcaagccaaaagcaagttcagtggttctacgacgcatgtcaaccaaccttgattgctagtaactctactatcagacttcagtattctaacttcaccaacacacagatatctagctccactagtaccagtagtacttcaggtggtgctggtggtggtgcttcaaacagctctagcaattcttcctctaccgcatctaactcatctactgcagctgggggggccgggtcgtcatcttcgtcttcatcgtcatcttctggtccattggttccaattatctacgaagaaggcaactctcaaactttgattcaatcgttaggctccaatattcagggtctagtcgtgatcagttctggtacgagcggtaacagtactacaacatcatgggcgtcggtccccttcccagttgtttatgctattgatgcgtcttccagtcatgatggttcgagtattgggttcttgagcaacacaagcgtcccacaaggcgcagtctctgccgggtacttatcaccaattcaagctcaaactttgttgtctatcgccatcaacaacaaggttacaagtgccagtgacttacagaagattttcccagcaagtcaacaataa

SEQ ID NO: 1160 - DNA, 951 bp, Saccharomyces pastorianus
atggcatttagtgattttgctgccatatgctccaagactcctctaccgttatgttctgtgataaaatcgaaaacgcatttgatactatcgaacttgactaccatacacgattttaatccatccaatttaaatgttggtgtactgccacgttgttatgccagatcaattgatcttgccaatacggtcatctttgatgtcgggaacgcatttatcaatattggtgccttaggtgtcatcctaatcatactttataatataagacaaaaatacactgctattggcaggtctgaatatatgtacttcttccaactgactttattattgatcatatttactctggtagtggattgtggagtgtcgcctccaggttctgcgtcatatccttacttcgtggccatacaaataggatttgctggcgcatgttgctgggctttattaataaatgggtttttaggcttcaacatctgggaagatgggactacaaagtctatgctattggttcgaggagcctccttattgggatttgtagctaacttcctagcttctattttaactttcaaagcatggataactgatcacaaagtagcgtcgatggatgcttccgggatgattgtcgtcgtctatataatcaatgccattttcttggcggttttcgtcatctgtcaactactggtttcattaatagtggtccaaaacctatgggctacaggagcaattgtattggggcttttcttctttgtagcaggacaagttttagtttatgcattctcttcacagatatgtgaagggttcaagcactacttggatggcttattctttggaagcatctgcaatgtttttacatttatgatggtgtataagacttgggatatgactaccgatgatgacctggaattcggtgtaagcgtaagcaaggatggcaacgttgtgtatgataatgggttcatgtag

SEQ ID NO: 1161 - DNA, 213 bp, Saccharomyces pastorianus
atgtctcgcgaagggttccaaattccaacaaatttagatgctgctgccgcaggtacctcccaatccagaaccgctactttgaaatatatttgcgctgaatgttctagtaaattatccttgtctagaactgatccagtccgttgtaaggattgtggtcacagaatcttgttaaaagccagaaccaagagactggttcaatttgaggcaaggtaa

SEQ ID NO: 1162 - DNA, 948 bp, Saccharomyces pastorianus
atgcttgtcggagtgagcggtacaaagttttgtgggtgcgaagacgtgattaagatattagccaataattttgattttgaattactcaatcatcgtgacaatcctgatgatattttagactatgcgaccaaaaattacacaagaaacttggtcgtgcctctagaaacattatcattactggagaaactggagaaacggcctttttttgttcacctttccatcgatgcttcgatcactacaagagttaaattatacaggacactgaataaagtggaaaatttgtcactggagcaaatagttcaagccattgacgaacatgattttcaagctgatggtatcaagttaagggagagatcgcatttgaagtttaaaatagtcaataaagaccgtgaccaaattaagcaacacttaattgatagtattaccatccaatttaagattcttaataacggcaaacaagcaaatacagaaatggtcccaccaatgagacctagttgggatagctatttcatgaagctggccacattagcggcatctcgttctaattgcatgaagcgtagagtcggttgtgtaatcgtaagggagtgcagagttattgccactggttataatgggacgccccgtcatttgacaaattgtttcaacgggggttgtccacgttgcaatgatggtgactccaaaaacttacacacttgtctctgtctacatgcagaagaaaatgcgttactagaagccggtagggaccgtgtaggtcaaaatgcgactttatattgtgatacttgtccctgcctaacatgctccgtaaagatcgttcagacaggaatcagcgaagtggtttatagccaaacatacagaatggacgaagaaagcttcaaagtcttgagaaatgcaggaatcactgttcgacaatttagtttcatggaagaaccaaggacagtgatggtttga

SEQ ID NO: 1163 - DNA, 645 bp, Saccharomyces pastorianus
atgtcatttattcaaaagagattactgtcgcagactaaattattacgctcccatgtggggtcactaccgctttacacatcgccagaagttcaggtttccatgagtacactgtctataccaaggattattagaaagggaagagcttcattgaatatatcacagaacattactgtagagggtcccaaaggggaactatccattgaagtccctgatttcttgcagttggatagggatgaaaagcacggtaaaataaatgttgtgattcaaaatgcagaggataagtaccagcgttccatgtggggtacggtaaggtcacttataaataaccacatcattggtgttactgaagggcatcttgccgtcctcagattcgtaggaacagggtacagggcccaattggaaaacgatgggaggtttgttaatataaaggtgggtgcgtctattaaacagggattggacgttcctgaaaatattgttgtcaaatcacctgctcctacatctctgatcatagaagggtgtgacaaacagcaagttcttctctttgctgcgaaattgaggaagttccatccaccagaaccatataaaggtaaaggtatttatgttaatggcgaaacaataaaattaaaagataagaaaatcaaataa

SEQ ID NO: 1164 - DNA, 552 bp, Saccharomyces pastorianus
atggttagaaaactaaagcatcatgaacagaaactgctgaaaaaagttgatttcctcgagtggaagcaggaccaaggtcatcgcgacactcaggtcatgagaacatatcatattcaaaatcgtgaagattatcataaatacaatagaatttgcggtgatattcgtcgcctcgctaacaagttatcattgctgtctcctactgatccatttcgtaggaaacacgaacaattattattagataagctatatgccatgggtgttttgactacaaaatccaagatatctgatctagagaataaaattaccgtcagcgctatgtgtagaagacgattgcctgtaattatgcacagaatgaaaatggcagaaaccatacaagatgcagtcaagttcattgaacaaggccatgttcgtgtaggtcctaatctaataaacgatcctgcttaccttgtgacaaggaatatggaagactacgttacttgggttgataactctaagattaagaaaactgtgttaagatacagaaaccaaatcgacgattttgacttttcgtaa

SEQ ID NO: 1165 - DNA, 1587 bp, Saccharomyces pastorianus
atgtggatactcctatacctttttgtcatatggtcctcactgcgaacgttcgtcactgcttcagactctacggcgacgatcgaaaatgttaccgtgacgagtgaaacggtttcaacgtcgctctggtccacgatgttcccccaaatgactgtggcctttaggtctcagagagacattatggggaaccttaccgttgaccagttaccatatgttggcgtgaatctgcgacgggtcttgctgaataacgaaactagcatggtaaatgacggcaacaatacgaagatacttaccttgatcaaatctatgttagcttccgaggccaacgtttttgttctggatttgaaacagcataataatgatctgatggtggtagattccacactgctgttcagcgacgttctgtccactttacaatcttttattgttagcacgcagaacaacctttacgcagacatgatcgtattattcttgaacatatctaccactgagcaaggttataccgcagacgattaccagatacaaacactgaacactaccttcttactagacaagaatttggggagcatgtacatttacaggcctacagatttacaaaatgacagagcaaagaataatgcttggaatgtctacggcaaatcttccacagatggctggcccacactaggctccgtactgttcgagcaaaaaaagagactaatcatcggcgagctgacccatgtcttcaatgaaactactgcaccatatattttctcccatgatgtgttccattatgaacaggggaattccacgttaggttgtccatccacagtggacggcctcactaatttatcatcagtccaatggagatttttggattcgcaattcaccgctggcgacatcaaagagtatatttcatgtgggttatcgccaataataagcaatccatctaacataaataatgtaacccaactgtcgggaataattcacgaaggcagtatctggtcatgggacaacaatcaaccatcgatcacccagtcaacttctaagtccatgaactcggccggcacgctagaggcttacaattgcgtcctcttgcactatttcgccaataatgggacagcgacttggcgagtcgataactgttataattccgatgttggactttgtagatatgagaattcggcattcaaatggttggtgagaacaaacaaggcttcgtattttgatttcgatagttataaggggtctaaatgtccggatcagtatagcttcaatatcccaagaacaccattggaacaaagatcgttgatctcttatttgcaaaacgagtccttccctgatacggaaatgtggatcgatttaaattcaatatcagtgagtaactgttgggtcagtggcggtccgtatgcaagttgtccgtaccaaaaagtcatttccacaaggaatttcgtgacaatgatggttcctgcatcggtttgttcctttgccctattatttattgttgtttacttgagtgtgttgagagtccctatttatgataacaggaaaaattggagaagagttatcaataaaatttctaagtcggaattagaaggtgtaccttcctga

SEQ ID NO: 1166 - DNA, 513 bp, Saccharomyces pastorianus
atgtcaagcaagacaagtgaccaatcagcatacacggtttccttccttaagactgataacaccagaaaaaacaatgccactaccgacaataacaacggcgacagtaacaacaacaacaacaacggcaacaatgcatccgcagagactgaaaaagacgctaataaggagaacatacctggtttagagggggaaatcacagcattccgaattttcaaaaagaagagcacgtcaagctcaaagacatcacatactagtagtaactttataaaaaagactatattcaaaagggacctcttgaagcaggattcgaagagaaaactacagctgcagcagaggtttgcatcaccgactgatagactagtatcaccatgctcgcttaagttgaatgagcataaagtgaaaatgttcggaaagaaacagaaagtcaacccgatgaaacttaacttcaagggtcatctcgaggccgattcggaagatgtagaaattgacgaagatgaggagttcttctactag

SEQ ID NO: 1167 - DNA, 1059 bp, Saccharomyces pastorianus
atggaatatatgcaaagctcgaactttttgaaactaaaaaggaagaccaatcaagttgtgagtgatgaagaactcgacgatgagctttataataaaaccaaaagacatagaggtagtgaggtaaaaatggcggagtatgattcagattctagtgtcgaggactcttcggatgacgaaaatggtgagaaagagttgaatatgaaggccaatgtgaagaatgagaaagaaagtgaagatatgtttctgtcagatgttgacgatgttggtgcccaaggccataagaagcatgaaaagtcaaagatccaacttttggatattgcagagtttagaaaggaaaatctggttgacctggacgttacggttgataacggcaaagtgcaagaagaagaaaaaattgtggatatagagccattcaatatcgatgatgaagtgcaacacggtgtatttgacaaagatggcaattacataaaagcagaggacaatgcagatgatgaaccgcaagacaacgaagaatggatgaacgacgtcatagatgcagaacaagcaaacagacttgaaaggaaacaaaatacaagggttcagaattcaagacactatatggtacatgaggcattagttattttcaagttttttcttactgatgataaagaaacagcgctagaagccctggcaaggttaaacaaactgcgaaaaatagccatctccaaaaagagtgattcagtaaaatacatcatccacgggatcgaactgttgtccgacttggccaacatactggaaaataaaggattcaacggaatttacgaatataatcgtaagaaaattcaggatgccattgaagaggagttgttcgatgatgcctctgcgataaataaccagaagacaaaactatggagttttagatggttgaataaacctggtcaaactctcggacaattcacgaattatgaaatgtcgtactggcaaaacacctacttccaaaacaacgtcattgtgaaatttcgcgaagaattggatcaagatgaaaactggatacatgtatcatgtctgaaatttatgtaa

SEQ ID NO: 1168 - DNA, 558 bp, Saccharomyces pastorianus
atgtctacgaacaaggaagaagaacatcagattgtttgcacacaggactttcttcgacaatattacgtatctgaaagtgtaagtattcagtttggattaaacaacaagactattcgaacgataaatgaagaagaatttaataatgcagcaatgtgcatcatgacacgtacgaactatcctgaatcaactttaaaacggtcagcttcaacttaccttttgaacagttatcacaagaagccagcgactctatctcttccttttgtctttggcgacactataaacctctcagaagacatggaggataacaacgaaaataatctattgtacagcgacacattatacggcgacgactcattgacacaaagaggtgaccaggtggtgtataaaatagatacacaagaagaagattctagctttacattgttacaaagtgaggccaatgaaacgaggccgctgtcttcgtctagcaccccacaaatactgcagtccgattattctgtcgtaatgcaagagggacagacatcaaatggaagcatatttcagtttagcagtccctga

SEQ ID NO: 1169 - DNA, 849 bp, Saccharomyces pastorianus
atgaacactggtcaatgccaaaccaacgcagtgcacacgtttgttaatagagcggaaaagggcgcgtcgtcaggctttgagaatgcgtcttcgtccaacagaaccaagagtattcaaggtccatcagcgacctgtacaattaacgttgagcagagatttttccggtattcaaacacatttgatcattcgccgtcttacagggatgcgttttctaggactacagaggatccaaaccagaaattctcagcgccaaaaatagactgtagaggaacttcctgggctacagatttcaaacgtaattacactagccaaatggaaatccctctgcgaaacgaattaaataatctcaacttaagtacagaaatacgctcgcctcaggcagcgccatctttagggttttcacgccatactatggacatggcttcgttttccacgacagatcatcaattaccgaaggcaaggaacctggaacttcctataaatagttgttttgactctttaatcaacgcagagttcttgaaactagaaggtaacgatttacacgaagaatccaatacaggcgaaataagtccaaacgcggggttggaaaaggaagaagctgccatgaaagggttggcttccgatatagtggatttttgtgatagcaatagcacggatgataacctaaaagaaagactagcaagttcaaaatttgttggactaatgggtaatattagtgatggctctgtgattttgaaaaaagatgaaggtacaaaaaaagattgtcgaaaacatgtaggtttttgttttgagggtactgaaagttgggctggcttcgaattccatgatgttgaagacagaattgcgtaa

SEQ ID NO: 1170 - DNA, 1890 bp, Saccharomyces pastorianus
atgacgacatatttcagattggtgaagggtgctaccaagatcaagtcggccgcgcccaaacagaagtatttggacccgatcttgttggggacgggcagcgaagaggactttcacgagatcgtgaaggctttggattcccgaattaatgacaccgcatggaccattgtttacaagactttgatagtggtgcacctgatgatgagggagggtgataaagacgttgcgttgcggtactactccaggaggctggaattcttcgacattcataatctccgtggctctaatggcagtgcgtctgcagatatgagggcgcttgaccgttacgatagctatctgaaggtcagatgtagagagtttagtaaaattaaaaaggactacgtgagagacggctaccggacgctgaagttgaatggcagcaactacggcaactccaaaaacaagcaacaatgtattgacgttgcgctagatcatgtggagtcgttggaggcgcaaatccaggccttgatcaaaaacaagtacacgcactttgatttgaatagcgaattgatcatatgcgggttcaagctgctgatccaggacctattggctctctacaatgcccttaacgaaggtataataacgctattagagtcctttttcgaactgtctcatcataacgcagaaaggactttagatttatacaagacgtttgttgacttgaccgaacatgtggtgaggtacttgaagagcggtaagagtgcgggcttgaaaattcccgttatcaaacacatcactacgaagctggttagatccctagaagagcacctaatcgaggacgataaaacccacaacacttttgtaccgatcgacaattctgaaggcagtattggctcagcggcgcccaagtcaattgcgcaggcaaggctggaacaaattcgcgaacaaaagaggatattggaggcacagttgaagaatgaacaggtagcgatatctcctgccgtcaccacagcgacgacagcccaaccatacaacccattcgggacagacccctccatgcatgctaagatgcaaatggcgggagctaatcaagtccaacaaaccgtcaacaatccgtttttagttcaaacgcaaccacagccacaagctgcccgcacagaacctgtaactctcaacgctacacagtatgtaatgactcaacccattatgaacgcgactccggcacaagaatctggtgtaagcgcacagcaaacaggctattattctatcaataaccacctgacccccacattcacgggtgcaggatttggagggtattctgtttcgcaaggcacgacctctggtcccaatcaacaagtcgttaaagcacaaactggttcgaacaacccatttgcactacacaacactgcgaccgtcgcagtgggaaactctacacaggaacctactttgccaaatctgttttcgcaaaacactgatctaccactacagcaacaagtaataagtaatcccttccaaaaccagacccaacacatccagcagcagcagcagcagcagcagcagcagcaacaacaacaacaacaacaacagaaaatacctccgcacgcaataaacaacgttatgacgactccgacgagcatgcaggggtctatgaacgtattacaacgttttgataatgcggaatctttgcctcaatacacccagcaaccgctacagcaaccgctacaacaaccacaacagcagcagggctattttgcacccgtaaactccactgtcaatcctattctaaataatgcgggtattgcccaaccgcagactgttccattatacccctcacagcaacagcagctgcagcaaccacaacaagggttgcgaaaccagtacacgagcagcaactttaatctaattgatatgtga

SEQ ID NO: 1171 - DNA, 390 bp, Saccharomyces pastorianus
atgtctacatcctcggtacgttttgcattcaggccgttctggcagagcgagacaggccctaagacggtccatttctgggctcccactttgaaatgggggttggttttcgctgggttcagcgatatgaagaggcccgtggagaaaatttccggtgctcaaaacttgtcgctgctctccactgcgatgatttggacccgttggtcgttcgtcatcaagcccaggaatatcttgttggcctcagtcaactcgtttctttgcctaacggccggctaccaattgagtagaatcgccaactacaggatacggaacggtgattccatatcgcagttattcagctacatcctcaggggtgccgacgaaagcacaaaggaaattactacaggcagataa

SEQ ID NO: 1172 - DNA, 4533 bp, Saccharomyces pastorianus
atgccaggaacgccacagaagaataagagatcggcgagtatatctatttcgcctatgaagactgcagaggagaaagagccacctcacaatgattcaaaagcaacaaagttaaaccaaacaaaaagaaaaaaaaagtacgcatttgctcctataaataacttaaatgggaagagcagtaaaatacccaatgctggtgtgttaaaatcaatatctgtttcacaagtacgaaatacagcaaggaccaaagaaacaagcaaaacgattagcaaaagcacaaagtcactaccgagttcgcaagctaaactcaaacgtgaagtctcaaatatgaccaagtatcacgacttcagtcatgatgaagacggccctatggaagaagtgatatggaagtattcgcctctacagcgagatatgtcggacaaaacaacgagtgccgccgaattttctgatgactatgaagatgcccaaaatccctcttcgactcctatagttcccaatcgtttaaaaaccgttctcaattttacaaatattcacgtacccagtgtaaacgaaaatccaatcacacaagaaaatgcagacgatcaaacacgatctagaccaacgaacatctcaccaaggggttcttttcgtaacatagatgacattctggatgacatagagggtgacttaactttaaaaccgaaaatgacgaagttcaacgatttgccttcttctcctaccaaagcacctgatgttgcacaaccagaggtgattgtcgaaagagcggataatgtaaataccacaggtgatagtaacgatggcgatgattctttaattgatattttaacccaaaagtacgttgagaaatacaaggatgttggtgaaagccaaattgcaaatcaaagcagcggagacgatcgactaagtgaagaaagtgaagaaaatgaagaaaacgaaacaaaagaagccaataaagtcaacgaactcaataagagtcaagcagatcacacatgtctaaaaattcaagaaaccgaaagaaacggggagaatttatcagacgaattttcagacgattcgttgatagaactgttaaatgtaaatgaaacgcaaacagcaccaaatgtcattgagcaagagattgaaaaggtcgaggaaatggtatctcacgatttgaaagtcgattatgataccgatttatctacgtatattctcaaagctaaatcaggtgcaccaagaaagggggtggtacgattggtagtaaccagtatacgtactgtagagctgccaaaaatcggaacacaaaaaatactggaatgcattgatgctaagggcgaactaagctctgttgtcgttcggcatccttgggtgtatttagagtttgaagctggcgatgtaatacatataatagaggggaagaatattgaaaacaaacgacttctttctgatgataagaatcctaaaactcaattggcgaacgacaacctactggttttaaaccctgatatattattttcagcaacatcagttggaagttcagtaggatgtttaagacgtgcaattctacaaatgcagttcaaagaccctcgtggagaaccaagtctagtcatgactctgggtaatatcgtgcatgaattactacaagattcaatcacgtataaactttctcacagcaaaatttcaatggaataccttgtgcaaaagttagattcactattggaaacttactcgtttgcaataatgatttgtaacgaagaaatccagtatgtcaaagagttagttataaaagagcacgctgaaaatattctgcattttgtcaataagtatgtgtcaaagaacaactatggctgctatacatctgtctcagggaccagaagaacacagccaatatcaatatcgaatgtaattgacattgaggaaaacatttggtctccaatatacggccttaaagggttcttagatgccactgtagaagctaacgttgaaaataatcaaaagtgtatcgttcctttagaagtaaaaactggtaaatctagaagtgtttcatacgaagtccaaggccttatatatacactgcttttaaacgaccgttatgaaataccaatagatttttttctactttattttacaagagaccaaaacatgacaaaatatccatctattttgcactctatcaagcatattctgatgtcccgaaacagaatgagcatgagcttcaagcatcaacttcagaaagtttatggtcaagctccatcaaagtttgaattaccacctttattacgagattcatcttgtgacacatgctttatgaaagaatcgtgtatggtactgaataaattactggaaaatggaacctcagaagaaagcggcctgattgaaggagaattcgatactttaacggagcacttgttgccaaacctcaccatttataaggatttctttacaaaatataacgatctcataacgaaggaagaatcaagcataacgtgcatcaataaagagctttttttattggacgggtttacgagagaatctagaagtgggaggtgtctgtctaatttagttgtgttagagatgattgatcatgaagaaaaggaaggcacgtatttatattgcttccaaagacacggtaaagataacgacacacaatccatgttatcttcgcaaatcacagtaaatgactttgtaattattagtgatgaggaaggccacttttgtctatgccaaggtcgtgtacagtttataaatccagacaacattggaatatccgttaagcggaaattattaaacaaccgactcttagataaagagagaggagttactaccattaaaagtgtagttgactctgatttagatctttctaatcttgtcgccactcaaaatctagttacttataggatcgataaaaacgacattcaacaaagtttgtctctagcacgcttcaatcttttgagtttatttctcccagctgtttcacctggtttggatatcattgacgaacgtagtaaattaacccgtaaaacaaagagatctgatggaggtaacgagactctacgaactcttctcgttgataatcgggcaccaatatttagaggtgtaaatgatgaccctgtaataccatatgacttaccggcggatatagctttaaacgtggatcaaagactagccatagataaaataatgagagccgaagactatgcattgatattaggaatgccaggtacaggtaaaaccactgtcattgcagaaattattaagattctagtctccaaagggaaaagtgtacttttgacatcatatactcattctgcagtggataatatcttgatgaaactgaataatactagcattaacataatgagattgggattgaaacaaagagttcactctgatacccagaagtatgtgccaaactatgagtcagtgaagagttacagtgattatctagctaaaataaactccgcttccgtcgtcgctaccacgtgtttgggcataagcgatgttctatttacactgcatgaaaaagactttgactatgtgatcttggacgaagcaagtcaaatatcgatgcctgtggctttgggacctttacgatatggatgtaagttcattatggttggagaccattaccaattaccaccattagttaaaaatgatgcggctaggttaggcggtttggaagactcgctattcaagaccttctgcgagaagcatccagagagtgttgtggagctcacttatcagtaccgtatgtgtggcgatattgttaccttgtctaactttttaatttatgaaaataaattaaagtgtgggaataacgaagtatttgtacagtctctggaattaccaattaaaggtgcattgtcacaatatagaagtgaatcgattgagtctaagaactggcttgaagatatactagaacccaacagaaaggtcatatttttgaattatgacagatgccccgacattatggagcaaagcgaaaaggataacataacaaatgtaggggaagcagaattgaccttgcaatgtgtagaaggaatgatgttgagcggtgtgccatgtgaagatattggcgtaatgacgttatacagagcgcagttgaggttactgaaaaagaaattcaataaggatgcttacaaagggctagagatcctgaccgccgatcagtttcaaggtcgtgataagaaatgtattattatttccatggtcagaagaaactctcaattgaacggggggtcattactaagagaactaagaagagtcaatgttgccatgacgagagccaaatccaaactgatcatcatcggctcaaaaagtacaattggttccgttcccgaaataaaatcgtttgtgaacttgttagaggaacgcaattggatttatacaatgtgcaaggatgggccatataagtacaagttccctgagagattggtgaacagtgagatggcatataaaggcttcaagaaaagaacgggtgccaaggctatcacgtctcaatccaaactcgttagcgacaaacctatcataaaggaaattttacaggagtatgagagttaa

SEQ ID NO: 1173 - DNA, 7254 bp, Saccharomyces pastorianus
atgagtggaataccgccgcctcctcctggctttgaagaacacgaagacttaccaccaccaccacctccgccacctggatatgaacttgaagaaccaaacaattcttcaatacagccaccaaatagtgatggtatattcttcccacctccccctcctcctcctccaccacctccaggtgactttgaagtacctatcgagccacctttagaggctgctttgccgccaccaccaccgcctccctcagacatcgatggattcgagaacaccaccacaattaagaaccagctacacgggaaaaggaaattgaacataatgaaggggtcgtctattactagtaaagaaagaaaacgtcagaaaaaaacggccaaaaaggctgtcaaaagcagtttatatactcccaaggccgaaatgcctcctgagcacttgagaaagattattaacagtcatagtgaaatggcttcaaagatgtacaatacggataagaaagcctttttaggcgccctgaaatatttaccacacgccattctaaaattattagagaacatgcctcagccatgggagcaagccaaagaagtaaaggttttataccatacctcaggagcaataacctttgtgaatgaaacaccaagagtcatagagcctgtatacactgctcaatggtcagccatgtggatagcgatgagaagagaaaagcgagatagaactcacttcaaaagaatgagattcccaccctttgatgatgacgagccacctttgtcatatgaacagcatatagaaaacattgaacccttagaccccataaatcttccattagactcacaggatgatgaattcgtcaaagattggctctatgattcccggcctttagaggaagacagtaacaaagtcaatggtacatcctataaaaaatggaattttaaactacctgagatgacaaacttatatagactatcaacgccattacgagatgaaatcacagataaaaactactattatcttttcgataagaaatcctttctaaacgggaaagctcttaataatgcaattcccggtggccctaaatttgaaccattatatccaagagaggaagatgaagattacaatgaattcaatttgatagatagagtgatatttagagttccgataagaagcgaatacagggtagcatttcctcatttatataattcaaggcctcgttcagtgcaaataccgtggtacaacaatccagtatcctgtactatccagaaccatgaggaccataatacacccgcattcttttttgatccgtccttaaatccaatactccttcatggcgacaagacatcaaatttcagcaaagagttaaacgcaaaagagattgaaagtttttctctaccagagagtttcgtacctattatggctgaggaagaagagcttattttgcctactacaaaagatgccattgcattatacaattcgcctttcccttttaacaggactcaagggaagatggtaagggcacaagatgttgccttggctaaaaagtggtttttacagcatccggatgaagaatatccagttaaggttagggtatcctatcaaaaattattaaaaaattacgtacttaatgaattacacaccacaccgcctacaaatcacaacaaagttaaattattgaagaacctaaaaaacaccaaatattttcaacaaacaacgattgactgggtagaagcagggctccagttatgtcgccaaggacacaatatgctaaatctgttaattcacagaaaaggcctgacttatttacatctcgattataatttcaatttaaaaccaacgaaaactttgacaacaaaagagcgtaaaaaatcaagacttggaaattcattccatttgatgcgagagttattgaaaatgatgaagttgattgtggatacacacgtacagtttaggttaggaaatgttgatgctttccaattagctgatggtatacattacattttcaaccatctagggcaattgactggcatttaccgctataagtataaagtaatgcaccaaattcgtgcatgcaaagatctgaaacacgtcatatactacaaattcaataaaaatatgggtaaagggcctggatgtgggttttggcaacccgcgtggagggtgtggctgagcttcttaagaggtaccatacccttactcgaaaggtacatcggtaacctgatcacccgccaatttgaggggcgttccaatgaagtagtcaaaactacaactaaacaaagactcgatgcatattacgatcttgagttgagaaactcggtcatggatgacattctagaaatgatgcccgagagcattcgacagaagaaggcgagaactattctacaacacttaagtgaagcttggaggtgttggaaagctaatattccttgggatgttcctggcatgccggctccaatcaaaaagataatcgagcggtatataaaggccaaggctgatgcatgggtatctgcagctcattacaatcgggaacgcataaagcgcggtgctcatgtagaaaagactgtggtcaagaaaaacctagggcgcttaacgaggctttggatcaagcatgagcaggaacgtcaaaagcagatacagaaaagtggtcctgatataactcccaaagaagcgacagctatcttttctgttatggtggactggctggaatcgaggagtttttcgccaatcccatttccacctctaacttacaaaaatgataccaaaattttggttcttgcattagaaaatctaaaggacgtttatgcatcaaaagtacgtttaaatgcatctgaaagggaagaactggcgttaatagaggaagcttatgataacccccacgatactttgaatagaataaaaaaatacttgttgacgcaacgtgtttttaagcctgttgatttgactatgatggaaaactatcaaaatatatctcctgtttatgcagtcgatcccttggaaaaaatcaccgatgcatatcttgatcagtatttgtggtacgaagccgatcaaaggaagcttttccccaactggataaaaccaagtgattcagagataccacctcttctggtatacaagtggtctcaaggcataaacaatctatctgacatttgggatgtctctaaaggtcaatccacagttttgctcgagaccacgttaagggaaatggctgaaaagattgattttactttgttaaatagattacttcgtctgattgtggaccccaatattgctgactacattactgcaaaaaacaatgttatgatcaactttaaggatatgagtcacgttaacaaatacggtctagtacgcggattacagtttgcctcttttatattccaatattatggactagttgttgatcttttgttgttgggccaagaaagggctgctgatttggctggccctgccaacaatccaaatgattttatgcaattcaaaagcagagaaacagaaaagacacatccgatcaggctctataccagatatttggatcgcatttatatggtctttcgctttgaagaaagtgagggaaatgaactgacagatgaatatttagcggaaaacccagatccaaactttgaaaatagcattggatacaataacagaaaatgctggcctaaggactcacgcatgaggctaatccgccaggatgtaaacttgggacgtgcagtgttttgggaagttcaaggcagagtgcctacttcaattacatccataaaatgggaaaatgcatttgtttcagtgtatagtaaaaaaaatccaaaattattattctctatgtgtggctttgaggttaggattttaccaagacaaaggatggaagatgtaatttccaatgatgaaggtgtttgggatttaatcgacgagaaaacaaagcagagaacagcaaaagcgtacttgaaggtatctcaagaagaaatcgataaatttgacagcagaataagaggcatattaatggcgtccggttccaccactttcaccaaagttgcggcaaaatggaatacctctttaatatctcttttcacttacttcagggaagctattgttgccacagagcctctattagatatacttgtaaaaggagagacacgaattcaaaacagagtcaaactaggtctaaactcaaaaatgccaacaagatttccacctgccgttttttacacaccaaaggagctgggtggtttaggtatgatcagtgcttcccatatcttaattcctgcatcagacttgagctggtcaaaacaaactgatactggaatcacacactttcgtgctggtatgacacatgaggacgaaaaattgattcccacgattttccgttatataactacttgggaaaacgaatttttagactctcagagggtatgggccgagtatgcaaccaaaagacaagaagctatacagcaaaatagaagactggcttttgaagaactagaaggatcatgggatcgtggtataccgcgtatcagtacactatttcaaaaagataggcacaccctggcttatgatagaggtcatagaatccgtagggagtttaagcagtactcactagagagaaacagtccattttggtggacaaactcacaccacgatggtaagttgtggaatttgaatgcgtatagaaccgatgttatccaagcgcttggcggtattgaaacaattttggaacatactctattcaagggaaccggatttaattcatgggaaggtctgttttgggaaaaggcttccggttttgaggattccatgcaatttaaaaagttaactcatgcacaaagaacaggtttaagtcaaattccaaatcgtaggtttactctatggtggtctccaactatcaatagagcaaacgtttacgttggtttcctagtacaattagatctgactggtatattccttcacggtaaaattcccacactaaagatatctttaattcaaatatttcgtgctcatttgtggcaaaaaatacacgaaagtatagtttttgatatttgtcagattcttgacggggagttagatgttctacaaattgaatctgtatcgaaggaaaccgttcatccccgtaaatcatacaaaatgaactcatccgctgctgatgtcaccatggatagtgtttatgaatgggaggtctcgaaaccttccttattacatgaaactaatgataacttcaaggatgtggttaccaataagatgtggtttgatgtgcaattgagatatggtgattacgattcccacgatatatctcgttatgtgagagcaaaatttcttgattatacaacggataacgtcagcatgtatccctcaccaactggtgttatgattggtatcgatctggcctacaatatgtacgacgcttatggtaactggtttgacggattaaaacctctggtacaaaatagtatgagaacgattatgaaggccaatccagcattgtatgttcttcgtgagcgtatcagaaaaggtcttcaaatatatcaatctagtgtacaggaaccgtttttgaactcttcaaactatgcagaactgttcaataacgatataaaactttttgtggatgacactaatgtttatagagttactgtccacaagacttttgaaggaaacgttgctacgaaggcaataaatggttgtattttcactttaaaccctaagactggccacttatttttgaaaatcattcatacttctgtatgggctggtcaaaagcgtctgagtcagttggcaaaatggaaaaccgccgaagaagttagcgctcttgtaaggtctctacccaaagaagaacaaccaaaacaaatcatagtcacgagaaaggcaatgctagatcccttagaagttcacatgcttgattttcctaacatagcaatcaggcctacagaactcagattgccattttctgctgcgatgtcaatcgataaactttctgatgttgtcatgaaagctacggagcctcaaatggttcttttcaatatctacgatgactggttggagcgtatttcgtcgtatacagcgttttctagacttacgttactgttgagagctttgaagacaaatgaagaaagtgcgaagatgattctactcagtgacccaacgatcacgatcaaatcgtaccatttatggccatctttctctgacgaacaatggattaatatcgagtctcaaatgagagatttaattttaacagaatacggtaaaaaatacaatgtcaatatatctgccttaacccaaactgaaataaaggatatcatattggggcaaaatatcaaagcgccatctgtcaagagacaaaaaatggctgaattagaggctgctagggctgaaaaacaaaatgatgaagaaactgtaggtgcatcaactgttatgaagactaagaccataaatgcgcaaggtgaggaaattgtcgtagtagcttctgctgattacgaaaaccaaacgtttagctcgaagaacgagtggagaaaatcagccatcgccaatacattattacatttgagactgaaaaacacttatatctcagccgatgattttgtagaagagcagaatgtttatgtgctcccaagaaatttattaaagaaatttattgagatatctgatgtgaaaatccaggtagctgccttcatttacggtaaagcggctaaagatcatccgaaggtaaaagaaatcaagactgttgttttggcgcctcaattgggtcacgtaggctccgtccaaataagcaacatccctgaaattactgccctgccagatacagagggcctggaattgctaggttgggttcatactcaaactgaagacctcaagtttatgacagcgtctgaagtaacaacacattctaaactttttgcagacaaaaaaagagattgcattgatatttccatcttttcagctccaggatctgtttcattaagtgcttacaacctaactgatgacggttatcaatggggagaagagaacaaagacgtaacaaatatattatccgaagggtttgaacctactttcagcacacatgctcaattactactttctgaccgtatcatgggtaactttatagttccatcaagaaacgtttggaattacacatttatgggcacagcctttgatccagaaggcgaatacaatttgaagtatggtatacctctggatttttataacgaaatgcatcgtccggtgcactttttacagttcaacgagctggcaggtgatgaagaattagaagccgaacaagcagacttgtttagctaa

SEQ ID NO: 1174 - DNA, 1881 bp, Saccharomyces pastorianus
atgaatgacgagggccaagacaaaatagtacaagacatacgtatacaactacgaaaggctgtcacagaattgtcacgatggaagatgtacggctcctcaaagtgggcagcggaggcactagtggggctcgtcgaacctatggatgtcgatcaatcacggtccttaatggatgaatctccactgagaaataagctaagtgtaccgaagcaaagctttcaaataccacaaaacgggtttgggctatcagagtccgagtacgatctctacctcctcggttctgcattatttgacgctaaagagtttgatcgatgtgtttttttcctaaaagatgtttccaatccatatctgaagtttttgaaattatacagtaaatttctgtcatgggataagaaaagtcaagagaatatggaaaatgtcttaactacggggaaatttgctgacggaacgtacagggctgataaagatggtgatggtaatggtaatgacgatatgaaccaaggtggacgtcaacgtagcaattctgggatgattaccagtgagcatgagacacaatcaaatatatcatcgattttaaaggagataaatgcgtttctggaagtttatgaagtgaaaatagacgatgacgaggctgacttgggactggcgctattatattacttacggggagttacgttaaaacaggaaaaaaacacttctaaagccatgtcatctttcctgaaatctctgagctgttattcatttaactggtcctgctggttagaattgatggactgtttacagaaagtcgacgatgcattgcttctaaataattatctatatcagaatttccaattcaaatcatcagagaatcttggtagccagagaacaatagaatttaatataatgatcaagtttttcaaactgaaagtatttgaagaactgaatggccaattggaagactactttgaggatctagaatttttgttacaggtattccccaatttcacttttttgaaagcatataatgccaccattagttacaacaatctggattatgttaccgcagaaggccgattcgatgacattgttaagcaagatccataccggcttaatgatttagaaacatattcgaatattctttatgtcatgcaaaaaaattcaaagttagcatatttggcccagtttgtctctcaaatagatcggtttagaccagaaacatgctgtatcatagctaattattacagtgctcggcaagaacatgaaaaatccattatgtatttccgtcgagctctaacattagacaagaaaaccactaacgcatggaccttgatgggccacgaattcgtcgaacttagcaattctcatgctgcgatcgagtgctaccgtcgggcagtggatatctgtcctcgagactttaaagcatggttcggattggggcaagcctatgcgctcttggacatgcacctatactctctttactatttccagaaggcgtgtacattgaaaccatgggatcgtcggatttggcaagtgttgggagaatgttacaataaaacaggaaacaaactcgaagctataaaatgttacaagagatccataaaggcttcacaaacggtcgatcaaaatacttcgatatattaccgattagcacaactatacgaagaacttgaagatctgcaggagtgtaagaagtttatgacaaagtgtgtggatgtagaagaatttctggaaggtgtagtgacagatgaaaccgttaaagcaaggctttggctggctgtgtttgaaataaaagcaggcaactatcaactagcgtacgattacgcgatgggagtgtccagcggaacgtctcaggagattgaagaggctcgcatgctggctcgagagtgtagaaggcatatgtaa

SEQ ID NO: 1175 - DNA, 1563 bp, Saccharomyces pastorianus
atggattttgcgcctgttgatcagcaccagcaccagcaccaaaatgctgctacgcttctatgttgtaactgtggtaccccgattgatgggtctaccgggttggttatgtgtttcgactgtatcaagttgactgtggacattactcaaggtattcctagagaggctaacatttcgttttgtagaaactgtgaaagatttttgcaaccacctggacaatggatcagagccgaactagaatctagagaattgttggctatttgtttgcgtcgtttgaagggtctgaccaaagtcagattagtggatgcttcctttatttggacagaacctcattccagacgtatcagaatcaagcttaccgtgcagggggaagctatgacaaatacgattattcagcagacttttgaagtggaatatattgttatcgctatgcaatgcccagactgtgctagatcctacaccacgaacacgtggagagctaccgttcaaatcagacaaaaagtggctcacaagaggacatttttgtttttggaacaattgattttgaaacataacgctcatgtggatactatttctatcagtgaagctagagacggtttggatttcttctacgctcaaaaaaatcatgctgttaaaatgatagacttcttaaacgctgttgttccaattaagaacaaaaaatctgaagaacttatctctcaagatacccataccggtgcgtctacttataaattttcatattctgttgagattgtcccaatctgtaaagatgatttggtagttctacctaagaaactggctaaatccatgggtaatatctctcaactcgtcttatgttctaagatttccaacactgtccagtttatggatccaacaactttacaaatcgcggatctgtcgccatccgtgtactggagaacaccatttagctccttggcagacgtcacccaattagtcgaattcatagtcctggacgtggattctacaggtataagtaggggtaatcgtgttttggcagatataacccttgctagaacttcagatttgggtgtcaacgaccaagtttactataccagatctcatctcggtgctatttgccatgcaggtgatagtgtcatgggttatttcattgctaattccaactacaattcagatctgtttgatggattaaatatcgactatgtgcccgatgtggttcttgtgaagaaattgtaccaaagaaagagcaagaagagtagacactggaagttgaagagaatggctaaggaacacaaggatattgacgcctctctggattacaactcgaaagcccaaaagcaagaaatggaacgtgccgagaaagattacgaattattcttgcaagaattggaagaggatgctgaattaagacaaagtgttaacctatataaaaaccaagcaccagctgcgcctactgaagagcatgatatggatgaagatgaagacgaagatgctccacaaattaatatcgatgaactactggacgaattggacgaaatgactttggatgatggagccgaagctgcccccgtagaagctcagcaataa

SEQ ID NO: 1176 - DNA, 2472 bp, Saccharomyces pastorianus
atggaaattaaagaagtagatgacagggctgaactactgaaatataccaacaatattcccttactcggcaaactagttaaccaccagccattgtggagtaccaatcctaagctgaagtccttttctttggaaaaactttcagctccggaccaaagacgtatacaagaggcactagttgtgaaagaccttttgaatgtattaattggacttgagggaacgtacatcagatatttcaatgagtacgaacccagtgatgcggaaacattaatcgaattcaagattgcgaagaaaatggacccttctttcaaaacattcagtagaagaatagttaggtacggtaagcaatacatgatattaacgaaggcgtatgaaacttggtccgacacgacttttggaatggtcttgcaaagattcggttatgaaataagaaaatttttagaagatgtttacctgaaaattttggtagaaaggctcgaaagggatttcaataaggtacctaatttttccattagagaactggagcagattatcaacgaaaccgaggtaaccaaacagatggaattgctttacaatatctacgaggaagtttgtaaggagatagaggaaagaagaacaaatcactcttcacaagatgacttcaataatttcatggacaatatgaaaaatgaaagtagtttacatttgaggttgatggtggcgttcgatacaacgatctatccagtacctaaaggtggcgttattataaaaatttttcagcgaaagatactcgaaaacatgggtgatagatcaaacgtgatatttctgaagaagctactaaataacataagccaggactattgtacgatgttatatgagtggttaacacagggctcattaaacgacccttatcaagaatttatgatttatgatgatttagaaggaaaaacagaaaatatatttgacgcaagagacagagcttgggatacacaatacttcatcagaaaagacgtcttattgcgggattgcgactcacaagaagataagaacctactattcaaaatcctaagaaccggtattctactcaaagtagtacgagctagcttacagatatctactataccttccaacaacggtgatgcacccattcaagagatccaagattttgctgagttgatggaaggtaccaatttagaactttatgttgagaaatgttacaatagagctaacaaaattttcttgaagctgttttttcagggctatgacctagtcaatgtctcaaaacagttacaaaaaatcttttttggttatcagtatggccataatgttttaaagtttttgaataagaatatgggcgaattgaccaagcattataaaaatatcaacagtgcaagtcacgataagctgatgcagaatttcgagttagatagacaatcggaacatccaaacaatctgatgaggcaactcttgaccatacagcttgatagggaagcacttccgcaagttttatcacattatcttcagatttatccagagttacctgaaaactactccatgaacgatgacagtgacccattgatgcaagcgaataatttcaaaaatatgaatgctattctatttgacgaactaagtaaaagaggaaccgatgccagtcatgaacccaacccggaactagatatgtccagaagtgtaatctatcacttgaaatttgacgttaacataccgtatccactgaatatcataatcagcaggacatgcatgataaaataccagatcatatcccgctaccaacttgtcttgcaatatcattcaagattgttagacgacacttggatggatctgaataaaaactatatttggaagtacaggggttattcaagtactgtgaaaaaggggattataagaaccacaagagtactacatggcaagatgaaccatttcatcaaagccatcatggagtacttcaaccaggacgtaattgacaaagaagtgcggacactgggaaaatcctataatagtcccatccttgccgttgatattcagaatgatctagaggggggactgacaaacataatgacaaatcgttgcttatctgacttgattcccctacaattgcaaatatttgacattgtgtacaagttctgtaagttcatcaaatccataagaacaaaattatgtcaactagatcccgtactctatgaaaagcatagaatcgtatcgataaaatcaccaaacgaagaatatcgtacatataatgacgaccaagaagatgccggctaccaggaagatactgccttggagctcatgcagagactgatggactatatcagcaatgcttccagaaatttcgaccagtgtctcgcgaggtttgcccaagagttgaatacccaaaaattcgacttttacgacagttcgagtgccgatgctgcaggtatagaacgaattctcttctctataacgccatctcatttagcaccagcttcatctcaaaagtga

SEQ ID NO: 1177 - DNA, 2256 bp, Saccharomyces pastorianus
  modified_base (644)..(685): a, c, g, t, unknown, or other
atgaatgatgctacttttgcgcagcaatctggaaggtcacaacgaacaactgaactctactcgtgcgcacgttgcagaaaattaaagaagaaatgtggtaaacaagtaccgacgtgtgggaattgcgataagaatggagcacattgtttgtatccaggtagagctccaaggcgtaccaaaaaggagttagcggacgcaatgctccgaggagaatatgtccctgtgaaaagaaacaagaagacaggaaaaagtcctctgagcaacaatagtatgagctcgtccagttcagcatcaaccaatggcgctatcacgcccgggttttcaccttatgaaaacgatgactcccacaagatgaaacagttgaaaccgacggatccgataaaccttgtcatgggggccagtccaaattccagtgaaggcgtctcatcgctaatttcggtacttacatcattgaatgatagctccaacgcgccctcccatctttcttccaatgaaaactccatgattcctgcgcggtcattgcctgcttcagtacagcaaacttcgacagcttcatcctttgggtcatatagtacgccttctccgctaatatgtggtccggcgcccgtgaatgcccaatctgtaccattacaacacaacaacannnnnnnnnnnnnnnnnnnnnnnnnnnnnnnnnnnnnnnnnnacaacaacaacaacaacaacaacaacaacaacaataataataataatagtacaccacacctgaacctgagcacatacgcaaacaactctgcttcaaatggcagatacgattctgtacctgtcgatgcatcctcgattgaatttgaaactttatcttgttgctttaaaggtggtagaacaacatcatgggtcaaagaagatgggtctttcaggtcaatagaaagatctttactggacaggttcatcgctgcatatttcaaacacaatcatcgtttatttcccatgattgataaaatagcatttttaaatgacgcttccacaatcacagattttgaaacgttatgtgacaacaaggactaccctgacagctttgttttcaaagtttacatgataatggcgattggctgtacgactttacaacgtgctggtatggtttctcaggatgaagagtgtttgagtgagcacttggcttttttggccatgaagaaattccgcagcatcattatattgcaagacattgaaacagtacgatgcctgttattattgggtatttattcattcttcgagccaaaaggctcttcatcgtggacgatcagtggtatcatcatgagactaaccataggcttaggactaaatagagaactgaccgccaaaaaactaaaaagcatgtctgccttggagacagaggcaagatatagagtattttggagcgcctattgtttcgaaaggctagtatgcacttcacttgggcgtatttctggaattgatgacggggatattgccgtacctttaccaagagcgctgtacggggatgaaagagatgatttggaaatgacccagctgatgatttcactaaggaaaatgggcggtcgtatttataaacaagttcattctgtgagtgcaggacgacaaaaattaaccatcgagcaaaagcaagaaataataaagggattgcggaaggagctcgatgaaatttattctcgggaatccgaaagaaggaaactaaaaagctcgcaaatggatcaggtagaaagggacagccattccactgccaatgtgatatctttccatagctcagagatttggttagcaatgagatactctcaattgcaaatattactgtacagaccatctgcattaataccgaagccgcccatcgactcactatccacattaggtgagttttgcctgcaagcctggaaacacacctacaccctatacaagaagcgattattgccattaaattggattactcttttcagaacattgaccatttgtaacactattttgtactgtctttgccaatggagcatcgacctaattgaaagcaaaattgaaatccaacaatgtgtcgagatactaagacattttggcgagagatggatctttgccatgaaatgcgccgacgtgtttcaaaatatcagcaacacaatcctagacattagtttaagccatggcaaagttccaaacatggaccaattgacaagagagttatttggcgcaagcgattcgtaccaagatatcttagatgagaacaacgtggacgtctcatgggtcgacaagctcgtataa

SEQ ID NO: 1178 - DNA, 687 bp, Saccharomyces pastorianus
atgctattagaattagtttcttatgcagggaccattttagggtttctgtttttaacactttcaattgcatcaggtttatactatattagtgaactagtcgaagaacacacagaacccacaagacggtttctaacaagggcaatttatggcataattttgttactagtactacttttgctactggatggattcccattcaaactcacacttttttctattgcatgttatatagtatattatcaaaacttaaaaagcttcccctttatctcattaaccagcccaaccttcctactaagttgcgtatgcgttattttaaaccattacttttggttcaagtatttcaatgacacggaaattccaccgcagttcagatatgatccgaactatatacctcgtaggcgtgccagttttgctgaggtggcctcattttttggtatatgcgtttggttcataccatttgccctatttgtttccctatcagctggtgattatgtcttgccaacaaccagtgaacagcatatggctaagaaaaatgatgacgctattacaagtaaccagccaagattacgtaaaagagccgttggtttggtccgtgtagtgatcaattcggtaaggaagtacatttattctgtagctcgtgtatttggctacgagatagatcctgattttgacagactagctgtttaa

SEQ ID NO: 1179 - DNA, 2358 bp, Saccharomyces pastorianus
atgtctgccgaagaacacaatgatgaaagtgatcccggtgatcgtcttgaagaatcgagtcaggtctcaattgctaatgaaacggtaaaatttttatcgagaaatagatattggactagggattatacaaccggtatcaaattgttcgtcaaacacatgaggacacaaaacgatatagtggttagatatattaaattttatagtgattttactgacaagttttggaaaccagcgttaaatgatctacaaaagctagagccaaccaattcgatgaataaacaactacttgaattcataaaggaaagttttaatagaatatccccagagcaaatcgagagtgattgtaagaaaccattacagaacctgaagaatcataacgacggttttcttcgtgaagccgaaaatgatttatcatctcgttattcagtttatgtcaaagatttagtcagggtcaaagaagcgttaattgaatgtgaaaaaaaaattcaaatgtgtaagatgaagcaagtcgacactccaatagatgatcgtccccatacctctaatagcgataagaacgaaaattctttgaccagaataaaattcacatgcgaattcccttatgctttggatgagaggttaaagttcgataatagcgttcaatttatgtcatttcttcaaaacctaaaggagcatgttcatttgcagaaaagcgtgttccctgttccggggttaccaaatggaagttttcaaggccagtcagtggtcaaggaactgaagaaactggagcctaaattagacctatccttatttaatatcgatagaataggcaatgaatttactcaactaggtgtaataaaagagtattcattgagtttttattctaataagaatcctcagttcgatcaggataaatactactactggaattccgaaatcttcagcaaccaacaagagcgaaatggtgacgcggttacgaaggctaagaagtcgtatggtgatttggcagagtctgataatgtatctggtgaaaagccgaacacgtcttccatcaaaacatccatatccgattggatccgcaaagtcagtctcaatgacaatgatgaacgtagtgtatcaggaaacaaggatataaatgaaaacgattggggagctttgaaacaacaattacaatcgttacaagacaacttcttttccaggtgttgtcaattggaatattccaaagtacagttagagaaaactatttatgaatactgtaaaaactactctcgaatggagaacgaaattgagcaaagtctaaagtcatcggataagatatttcaacagagttgtgaatcattcaccaaatcaccgattcccctcccacaagaagacgtcctaccatgtaaaggtaaggacgtagaaataagaggatttttcctcagggacaatggtataccgttccgcaagtggaataccatagaggagaaagacccagtcaagtcctacagggaaatttcaatcaaatgcgagaagtttttctgtggtagcgagataaacaatgatctgactttcctagatactttggaaactataaagatcatattgcagcagatcgaaaaagaaccaaatgcaaacaaaatcgtacgaagttggcacgacgatatagattttgtaagggtctcgaacctgaagagagacctaatggggaaattcaaagaatcgaaaaccattgaaaatacgaattcaaccataacagcccaatttttggaaaacctgcatacatttgtgacgaacgattttgttggactcattaaattgtggctactcgaactgcccgatagcatagtcccttcaaacagttacgataccttggtcaaaacaaaagagccgttgatttcgttgtgcgggaaattccccacgaacacagtaagattcctacaagagtttacaaggcattttcaagtgctcagccgcaagtcgtcactcccaccacgaaccgtgtgcgatttattcatagaaaacagtgacatagacatcccattagcacaccactttttaagaagaacagggttacaagaccccacagacataaagatcttgtcgccagcgttgtacacattctttaccaatcaagatacagtaaacatattgcaagaactaatcactacctccgccagcaccagctccaccactgtccttcaggaaccaccaaagattgtcataaaggacaccgcctcaaccgcatcctccacgcccaacccaccgctaggagaccaaaatggcccgttcattccacggcctttcaagactagttccacaccgacaaccccagagagaacaaagcgcaagagcggcctgtttcttcctgtcaacgtcaacgaccggcctcctacataa

SEQ ID NO: 1180 - DNA, 1470 bp, Saccharomyces pastorianus
atgtctgctgatttcggtttgattggtttagccgtcatgggtcaaaacttgatcttaaatgctgctgatcacggtttcactgtttgtgcttacaacagaactcaatccaaggttgaccatttcttagctaacgaagccaagggtaagtctatcattggtgctacttccattcaagatttcatttccaagttgaagagacctagaaaggtcatgcttttggttaaagctggtgctccagtcgacgccttgatcaaggaaattgtcccacttctggaaaagggcgacatcatcatcgatggtggtaactcccatttcccggactctaacagacgttacgaagaattgaagaagcacggtattcttttcgtcggttccggtgtctctggtggtgaagatggtgcccgttacggtccatctttgatgccaggtggttctgaagaagcttggccacacatcaagaacatcttccaatctatctccgccaagtctgacggtgagccatgttgtgaatgggtcggcccagccggtgccggtcactacgtcaaaatggtccacaacggtatcgaatacggtgacatgcaattgatttgtgaagcctacgatattatgaagagattgggtggatttaccgataaggaaatcagtgaggttttcaccacatggaacaagggtgtccttgactcttttttgatcgaaatcaccagagacatcttgaaattcgatgatgtcgacggtaagccattggtggaaaaaatcatggacactgccggccaaaagggtactggtaagtggactgccattaacgccttggacttgggtatgccagtcactttgatcggcgaagctgtctttgctcgttgtctatctgctttgaagaatgaaagagtcagagcttccaaggtcttgccaggcccagaagttccaaaggatgccgtcaaggacagacaacaatttgtcgacgatttggaacaagctttgtacgcttccaagatcatctcttacgctcaaggtttcatgttgatccgtgaagccgctgccacatacggctggaaactaaacaaccccgccatcgctttgatgtggagaggtggttgtatcatcagatccgtcttcttggctgaaatcaccaaggcttatagacaagaaccagacctagaaaacttgttgttcaacaagttcttcgccgatgctgttaccaaggctcaatctggttggagaaaatccattgcattggctaccacatacggtattccaacaccagccttttccactgctttgaccttctacgatgggtacagatctgaaagattaccagccaacttactacaagctcaacgtgattacttcggtgcccacactttcagagtcttgcccgaatgtgcatccgaaaacttgccagaaaacaaggatattcatatcaactggactggtcatggtggtaacgtttcttcctcaacataccaagcttaa

SEQ ID NO: 1181 - DNA, 1719 bp, Saccharomyces pastorianus
atgaggagttcaggtacatatgaggatgagccatctcaggaaacaacttcttctcctccaaagcaaccgcagcagaaaaagccaactaaatttagagaaagaatgcggaagtggttacaaagtgggaaaaataatggttaccaggacaaaaaagatgatcccaaaatatttgacagaattctttatcaacaaggagatatgactgcatttaacaataatgaaaatggggcaggtcaggatataacaaacaacttttttttaccagatgaagatgagtcgtgcccagtgcaaagtagtgttaagaccttcctgaccggaaataatgacgataatacagacttacagtctcaagatcatacaaatcaaaaccagaaacagaccaccgaacttccaagattaccgtatcagcagaggagtccacaagaagtaccatcgttgaaggaccttttcatcactaacaaatatgatgatccttatttaaactcttcaacaaaatttggtaacataacatcaactttccccagcagtctatctttaaggactgttaccttacaaactataaaaagaagaatcgattatatttcagccaaaaagaaagaggtctggaaaacagaggagaagtttttgaaagacatattgatgtggctacaaagctcaaattttgaagatcctgacacgatatcgttgatccatgaaattgagaaagtttttgaacaagatatactttttgaacagaatatttcagattgtctaagagacatttcaaataatttcgaatatatttgcgtgagagaaactcaattgattaatgaaggaaatattttaaagaatgacctgaaaaaatactcaaaatcaagagagcataaaggcgaaaaacatgaagatacagaggtatttagagagaaagtgatatcatcacaaaaatcgtttgacgtagtgaagcgacactacaagcacgcaatatcaataacaacaagacagctatttatgaacctcgcttttgaatactatgagaattgttccgatatgaaggatgtttcaagaaaatacttacaagaatccttgtcaactttacaaaccatagacactttaggattttcagaagaattagaaagaatcaggaaaagaaggtttgacaaattttgggccaaagcaaatccagacccgacaaataatattcagaagtttgttaatatgagaacaggtgtagccggattcaatgattcgttgatgaatcatttgtatggtaaactacgcttcggagtcgcgccacttgaggaagaactgcaaaatcagcaacctgagctcattggtatgcaagagaatgtttggaacgaaacactctctgagtataattcagtagatggtaatcccattacttcaaataagttcttatctgctaaagaagttgagtcagatcagctagtaagaacattcagtcaaaacgacgaagcaaaggataatattccgccaattataagtgttcaacaggtatcaacacctgaaggaaagaaagaaaatttagaaaacaatgaccctttgatattgagaagcgcaaaaagaaatgtaaatatcaatgctgctagtttaaggaaccttgccatcaaaaaatctcaagttaaaccggaatctgcgaatgaagagagtaaaatcttcgctgcagcattgaatgatgcaagacaaaatttggacgaaaacgtttggaagagtccaatttag

SEQ ID NO: 1182 - DNA, 4674 bp, Saccharomyces pastorianus
atgccagagatttatgggcctcagccgttgaaaccactgaatacggtgatgagacatggatttgaagagcaataccagagcgagcagctgttgcagtcactcgcaaacgattttatattctattttgatgataaacgacacagaaccaacgggaacccaatccctgatgaggataaacaaaaagatgtgaatcgttattaccagccgattacagattggaagattatgaaagacaggcaaaagacggtaagtgctgccctcttattatgtttaaatttgggcgtcgaccccccagatgttatgaaaacacacccgtgtgcaagggttgaagcatgggtagatcctttgaatttccaggactcaaagaaagcgatagaacaaattggtaagaatttacaagcgcagtacgaaacactgtccttaagaacacgttacaagcaaagcttggatccctgtgttgaggatgtcaaacggttttgtaactcattaagaaggacttctaaagaggataggatccttttccactataacgggcatggggtacccaagcctacgaaatcgggtgaaatttgggttttcaacaggggatatactcagtacattcccgtttcattgtatgatttgcaaacttggttgggtgccccatgtatattcgtttatgactgtaatagtgccgagaatatactaattaacttccaaaagtttgtacaaaagagaatcaaagacgatgaagacggaaaccacgatgtggccgcaccatcgccaacgtcagcctatgaagattgcttccaactagcttcttgcagatcagatgaacttttacttatgagccctgaattaccagcagatttgtttagttgctgtttaacttgtccgattgaaatcagcattcgtatctttctcatgcaatcacccttgaaggattccaagtataaggttttcttcgaaaatgcaacttcaaaccaatcgtttgctgatagtagaaactcattcaagtccaaaatacccaacgtaaatattcctggtatgctatcagacagaagaacaccactgggtgaactaaactggatcttcacagctataacagatactattgcatggacctccctccctagaccactttttaaaaaattattcagacatgatttaatgatcgctgcactttttaggaattttcttttggccaaaagaataatgccgtggtataattgtcaccctgtgtccgatcccgaactaccagatagtataactacacatccgatgtggaactcttgggatttggccatggatgaggtgctaactaaaatagtcattgaccttaaaaatgcgcccccagccactgccttagaaagtcagatgattctacaacaacaggaaacgttgcagaatggtagcagttcaaaacctaccccccaagaaacaaaggctggaagtatgcaaactcaatcaagattcgcagtggcgaatttaagcacaatgtctttggtgaataaccctgcggctcaatcgagaaagtcgatatctctgcaaagttcacaacaagcacagcagcagcagcagcagcagcagcaattcacaggtttttttgaacaaaatctgaccgcttttgaattgtggttgaaatatgcttcaaatgttaggcacccgcctgagcagcttccgatcgttttacaggttctgctttcacaggtacaccgtatacgtgcgttagtacttttatcgagatttttagacttggggccatgggcagtttacctgtcactttctattggtatcttcccctacgttttaaaattactacaaagcccagcaccagaattgaagcccattctagtatttatttgggctcgcatcatgtcaatagattataagaatactcaaagtgaattaatcaaagaaaaaggatacatgtactttataacagtattggtaccggattggggagtaggtggaccttcacctacgaatggctcaactatgatgaatggcggaaatccactaacaatgactgcatcgcaaaatataaatgccccaagatcgagatattatgatcagcaacaggccaatagaacaccgaatatgggccatagtagtctaccattctatcattctaacgacaccactgatgaacaaaaggctatggctgtgttcgtgttggcttctttcgttagagattttcctttggggcaaaagaattgttttagtttggagttagtaagcaagctgtacttttatattgaaaactcagaaattcctttattgagacaatggtgcattattttacttggcctattgtttgctgataaccccctgaacaggtttgtctgtatgaatacaggtgctgttgaaatattgttgaaatctttgaaagacccggtatcggaagttagaacagcttccatattcccattgaaacatttcgtatctggatttcaagattcagaggtgattttgaggttgcagcaagaatttgagcaacaatatcaacaattgcattcccaattacaacatctacaaagccaatctcatgttcaacaacagcaacagtcccaacagcaacagcagcatcttgaacaacagcaaatgaaaattgaaaaacaaattcgtcattgtcaagttatgcaaaatcaattggaaaatatcgatttgagaaaattgaaaagacaagaaattgctgatctaatttcgattctacccttaatcaatgatggatcgccgttagtccgtaaggaacttattatatacttttctcttatcgtgaaccgctattcaaattttttcatcgtcgttgtattcaatgatttgttggaagaaataaaacaactagagaaaacagacatcaatacacggaatgcttcagataagtattcggtaagtcacggttcaattttttatactgtttggaaatctcttttaattttagcagaagacccctttttagagaataaagaattatccaagcaggtgatcgatcatattttgctcgaattgagcgtccataaagaactcgacggcacctttgaagtcatggaaaaattcttattgaaaaggagttcgaaagccaacgaaagtggtaaatttggattcaattcttctcaagttcaatttgtgaaaagttcgttgaggtcattttcaccaaatggcaggacagatactaatgcgcccaaaaaggaacaacaacaacgtgacccaaaggtatcccatccaatacaaatgtctataactaagctttttcaaagtcttggtttcagcgaatcaaatagtgacaatgacactctatcgtcaagtgcatccattgaatccaatggtacaaaaaagggccctccaggcctatacttgtcgaatggcaataacaatctttatccaactgccagcactccaaggtttcgtaggtatactgaacccttaagtatgccattacagagcacattcctagattactcaattgagtattttcaagagccacaaatgagaaagcaagaagcggatgaacctggcagtgttgaatacaatgccaggttatggagacgtaatagaaatgaaacgattatccaagaaacacaaggtgaaaaaaagctatcgatatatggaaattggtcaaagagattcatcagtttgaataacaaaagccaaccaaaattaatgaagtttacccaatttgaagaccagcttgttacggcagatgataggagtacgattacggtatttgattgggaaaaggggaaaactttgtccaagttttctaatggtactccatttggtacgaaagttacagatttgaaatttatcaacgaagatgattcggctcttttgttggcaggctcctcggatggggttattaaaatatatagaaactatcatgatatcgataattttgaaatcgtatccgcctggagaggtttaactgatatgctgttaactcctagatctactggtttattgacagagtggctacaaataaggggttcattattaacgactggtgatgtgaaagtcatccgtgtttgggatgcgcatactgaaactgttgaagtagatattcccgcgaaaacatcctccttgattacttcactgacggctgatcaattggctggtaatatctttgtagcaggttttgcggacggctctctcagagtatacgatcgccgtttagatccaagagattctatgatacgtcgttggagggcaggaaacgagaaacaaggtgtttggatcaataatgttcatttacaaagaggtggctacagagaattggttagtggggctaccaatggtgttgttgagttgtgggacataagatctgaggatccagtggagtcgtttgttgaccagaatgtggcttcccaatacggatcacaacaaaaaccgaccacaatgacctgtatgcaggttcatgagcatgctcctatcattgcgacaggtaccaaacagatcaagatttggacaacatctggcgatctcttgaactctttcaaaaattcgcatactaatggtgtaactagtacgttagctgctactggtattccaacatctttatcgtactcttcaacatcagacgcgttcttatcctcgatggctttccatccccatagaatgatgatcgctgccaccaattctcatgattctgttgtaaacatctacaaatgtgaagatgaaaggatcgattatttttag

SEQ ID NO: 1183 - DNA, 930 bp, Saccharomyces pastorianus
atggcaagttcatcgcataatccttcgattcttttaaaaagaatcttatcgcttacggagagttctcctttgattctgtgtttggactccatggcccagacgtcatacagactaatccatgagtttatccaccagaataagagtaaaggcaacgaatgtcccgtaatatacatttcttttgaaacggttaatatgccgtcttactgtacacacttcatcgacgccactcagatggatttcgtgcatttggtgaggcaaattacatcgtatttaccgagcgctactgctacacaaactaagaaacacatggttgtcattgactcaataaactacatatccacagatcacattacaaggtttttgtccgagattgcatctgttcactgcactatgcttgctacttaccataaagatattactaacgacgatcatgtggcaatacctggtgggaatagcaattatcccgataaactggctcttttacagttcatggctactacgatcttggatattgacgcgatgttggtgggcagtctagataccgaggaggttagtgaactattgagtgaatttaggattccccgtgggttgaataacgatatttttcaattacgattcatgaataaacggaaatctggaagatcgctagaatacgatttcatgataaattcaaaaagtcacgaatacgagttgctgttgaataataaacaaggtgaggaggatggtggtagtgggctagaaactcctgaaatgttgcagggactgaccacttttaacctgggaacatccaataaacagaaattggccaaagaccaagttgaattgcccttcttagaggcacagagttttggacaaggcggtgccattgtctatgaatatgaaaaggatgatgattatgacgaggaggatccatacgaggatccattttga

SEQ ID NO: 1184 - DNA, 1836 bp, Saccharomyces pastorianus
atgattggctcgctggcgtattgtatattgggtacgttgctggtaggtgcggttgcgcaagacacgacggtgccccagatcggtgttgacgacagcttatggtatccgtacgacgaaacgctgctcttgaaaccgctgcccaacaatgatttactgctttcattcaccttccaattgcagtcggaaccgttcgacccggccgtgtcgtcgcactcgtttgatgcgtatgagtactacacgactttcccccgggccatcccacctttgttggattccactgccacgcgtcagttccatctacgcttcaccagagggttctgggatgctctgtcatggggccagttgccgcatggtgggaaacaggcaggtgcctcaggtgtggagttgtggtctttggttcaggctgctgaccaggaacaggccttccagaattggaagaaactcgctaattccttgagtggattgttctgctcctctttgaattttgtagatgagtccaggacgactttcccccgccggtcgtatgcatctggttcagcgtctcctcttttcaacgacactgaaaacctgtacttgatgagagcgtccttgcccaatgagcccatctgtaccgagaacctgactccattcataaagttattgcccactagggggcattccggtttgacgtctctcttggacggtcataagctgtttgactctctttggaacagtatctcgttggacatcaccaccgtttgcaccgaaaacggcgattcgctgtgccactatgagatggaagcacacgtcgacatggccacgcacgttccctctgtcttagcaaggaatgagagacccatccctaaacctctggacgggaactccttgcgctgtgacatggataagccatttgattcctaccaatgcttccccctaccggacccttcagagactcacttgaaactgtctcagctgttttccaagtcaattaagaacggaaatttgtttgctaataggccaacgaagatatgtgcagacgtggaccgctccacttggacagcgcacttgtccgtggatgacacaatatacagcacgcacgataattgtttcgaattgtcgaatgaccagaatgaaagtggttcaggttacgacttcattttggaatcatcggataccactcaagtctcccctgtagaccctgttcctattcatgtgggcagatccctgaccggcaacggtcaagaccgtggtgggattcgtactgccttccacaacgataacgatacccctgtaaagttgatatatttcgaatcgttgccatggttcgtcagagtttacttatcctctttgcaaatcacttccacaacctcttcacacttgcatgaggacgatatcattacggataaatactatctccaagcggctgatagacaaaggcccgctcatctggaattcacaatgttgattccagcccattcgaacatcgtcatgacttatcaattcgataaagctcttttgcagtttgccgagtacccaccagatgctaatcacggttttgaaattgatgctgcggtgattaccgtactgtcaccagaatctgaagaacctgtgtacgaaacgagaacctccactctgctgttatctctatctacaccggattttagtatgccgtataacgtcattattttaacatccaccataatggggctcatattcggtatgttgtacaacctaatggtgaagagaatagtcactgtcgatgaggctgataaaattatgttaaattccggtttgaagtataaactgttaaaactgaaagaaaagctcttgaagacgaaacagactaaaatcgattag

SEQ ID NO: 1185 - DNA, 573 bp, Saccharomyces pastorianus
atgtgcggcaaatggagattggtactgacagggataggcaatccggagccgcaatatgctcgcacccgccacaatgtcgggttgtacatgctagagctcttgcgtaagcggcttggcctgcagaacaaggcctactctcctgtgccccacacggggggcaaagtgcactacatagagggtgagaactgcacgctactgaagtcaggcggccagtatatgaacctgagtggagagcaggtgtgcaaggtttgggcccggtacgccaagtaccaggctcgtcacgtggttatccatgacgagttgagcgtggcgtgtggcaaagtgcagctgagggcggccagcgccagcatcagaggccacaacgggctacggagccttgtgcaatgtagtggtggccgtgtaccctttgccaggttggccgtgggcatcggcagggacccagggtctaattctagggaccctgcgagcgtatcccgatgggtgttggggactctcaccccacaagaacagcacaccttggtcacagagagcgaacctgccgcttggcgtgccctagcccagtacatttcatag

SEQ ID NO: 1186 - DNA, 1335 bp, Saccharomyces pastorianus
atggggaaactattgcaattggcatcacatccgatcgagttgaaagcagctttgaagctgaagttttgtagaacaccgctattttccatttatgaccagtccacgtcgccatacctattgcgctgttttgagctattgaacctgacctccaggtccttcgctgcggtgatcagggagctacatccagaattgagaaactgtatcactctcttctatttaattttaagggctttggataccatcgaagacgacatgtccattgaacacgatttgaagatcgacttgttgcgtcatttccacgaaaaactgttgttgaacaaatggagttttaacggcaatgcccctgagatgaaagacagagctgtattgacagactttgaatcgattcttattgaattccacaagttgaagccagaataccaggacgtcatcaaagagatcaccgataagatgggtaacggtatggccgactacattttggacgaaaactacaacctgaatgggttgcaaactgttcatgactacgatgtctactgccactacgtggccggtttggtcggcgatggtctaacccgtctgatcatcattgccaagttcgccaaccaatccttgtactccaacgagcaactttttgaaagcatgggtcttttcttacaaaagacaaacatcatcagagattacaaagaagatttggacgatggcagatccttctggcctaaagaaatctggtctcaatacgttcctcaattgaaggacttcatgaaacccgaaaacgaacaactgggtctgcagtgtataaaccaccttgtcttgaacgcattggatcacgtcattgatgtgttgacctacttagccagtgttcacgaacagtctactttccaattctgtgcaattccacaagtcatggccatcgccactttggctttggtgttcaacaaccgtgacgtgctacacggtaacgttaagatccgcaagggtaccacatgctacttgattttgaattccagaactttacgtggttgtgtcaagatctttgactattacttacgtgacattaagtccaaattggccgtgcaagatccaaactacctaaaattgaacatccagatctccaagattgaacagttcatggaagaaatgtaccaagataaattacctgccaacgtgaaaccaaatgaaactccaatttatttgaaggttcaggaaagatccaagtacgatgacgaattggttccaacccaacaagaagaagagtacaagttcaacatggttttgtctatcattgtttccgttcttcttgggttttattatatatacactttacacacagcttaa

SEQ ID NO: 1187 - DNA, 402 bp, Saccharomyces pastorianus
atgcccagcgtgaaaataggtactgctcaatggcagaagctgacacagtcccaggagaaacaaaccactgtgataacaccgctggggatgactatgctggagattcaaggtgatctggaattacctaaggacttctcgtcgctggcacagggagattcccactatgaagcaaggttcagcaaacaggacggtaagaacgtaatacggtttgggctattacagcttgacggcgagagagctactctgtttgtcggtaagaaacagcgtttactggggaaagtgacgaagttagacgtgccggtaggtattatgcatttcaattcaagcgataataaagtcgaactggtggacgtggtgaaatataaaattatctttaaagatagacctttacctattatgtaa

SEQ ID NO: 1188 - DNA, 1758 bp, Saccharomyces pastorianus
atgttgctttttgccaggcctcttcttaggaggtgccggccgtttgccgtgccaagatatgtgtactgggctagaagtgcagttcttcgaagaaacctggggatcccgccaggaacagtaacaagaaactcgtcattggtactgctagctccgtctgcgagggcatactctaatgagccagaacatagacgggggcctcctcctgaggtcaaacgcaacttgaaatatatcaccgagagggattcgctgctggtgcagaccaataacatcttcaccaaattgaagatcaacatacgatggttcttgaaaaaatccacccggccgttcaattcagacgatataagcgcgttcatctcatggatcctcgtcagcaacattttcattttcatcttctggacgaccacattcgtgtctttggttctgtatttggtcaataccgtgtttgcgcaggaatatctcgcgagcaagatcggtaagttcatcaccaagaatgactcgttgtcgattgtgtttgagactgccattgtgccggactggtcgtctgggaagatcagcttccaaaaggtcttcgtgtccagaaggcccaaggtgtcgcatgggtttaccaagggctcgcagcaggatgcgttgcaaagagcgaaactggcccttagcgaaaaaattctggtcaaccagcaggacttcgataatgggaactacacgcagttcgatctgaccatcgaccaggtggatatatcgctgaatttcagaaaatggatcaatgggaagggcatcctggatgaagtgaccatcaacgggcttaggggcgttatagacagaacacacgtgacgtggaagaaagatgatgacccaaagaactacctgaacgtatatcaaccgggagatttcgaaatctcaaaattcacaatgaacgacgtcctttgcaccctgtaccagccaaacgggttccggccgttccaaataagcatattcaactgcgacctgccgcagttgaggaaacattggctgttctacgacattctaaacgccaacaatattaatgggacctacgataattccatgttcaccattcacaagaagttcaggaccgatgaccaaaatcaggactccgcgtcgctgtggaagcaaatgacaaggttcagggtggacaacctggacatcgaccatctgaatgccggcatcgaggggccctttggatggatcaacgagggccgggttgacatggttggcgacgtacttttgcccgacgaagatgcagcttcagattctttgcaactaactgaaattctcacagagatcggggaccgcctgattagggaagccaaaagatacacttcgtccttccccctggtccggccaggattctcccacaccgtcgacgaaattgaccccatcgactacttcattatggacttctccctaagactttacaacgtcaaggccgagattcccctcttcacttcgggactgacgtatattaatagcgcattgatccggcccattgtagggtacatcaattctcacagaacttacattcctatcaagtgccggatcgtgaagaagaaatccgactttgaaggctcatggaccatctacgattcctacttgatgcgagatttgagcgcagaggtgtacgacgcctttgctaactacgccgctgacgatgaaaagagatctttgcgcttgagaagggtcggcttttggtcgctacaactcgttctgcaagtgatcctaatgagtctcggtgcaatcgcatga

SEQ ID NO: 1189 - DNA, 963 bp, Saccharomyces pastorianus
atgacacgtcctccagtgatgcgaggggcattttcagtaggcctttctgtagcagtattgaaaggtgtcaaaaagacagttcgtaagcatttggaaaggcgagggtggctagaacctcataaagtagactacgagttagtctttacgatagacaggttgaaaaacttggtagacgagaagcatgattctgtcttagcagtcgggcagcacgatgccggtgaattaagctggcggaaagtgttcaatttcatctcaagacagtcgagcgaactggatacccgaatatacatctttatattgctgctatgccttgtagttcctgttgtctggactgtactggacggcgatcatgataactcgctggacgacaacgacgactatgaggacgcaagaaggctgaaacactatggtgacggtgaaagagcagtgctacaattcggtaaaaataggtctgaacccatcatactgagctataaagatatggacgttccagaaggggagcgtgagtttaccgccaagagagaccataacagtagaagcttgacaagcaagagcgaggacgcattggatggactgaacaacgaagacacgcttagtgaccaacctgaggagcaggtggaagttgacataggatgcgatgagaacgaattaggggaagaaacaaatactaacgatattgacgaccaggaaaaggactgctgttccagtccagaagtagaaccgcacgacgaattcaacgaagacaacccaacggagccagagttcctcacgcgggacaccaaaacgacatcttcccttaagtcaagcacatcgtttccgttatcattcaagggctcaatagacctcagatccatcaaccaaccctcctctctattacacatccaggtgtcccccacaaaatccaccaatttggatgcccaagtaaacactgaacaggcatattctcaaccgttcaggtactag

SEQ ID NO: 1190 - DNA, 1728 bp, Saccharomyces pastorianus
atgggctcttcttttgatttggtagcgagtttctcgcatgactccacacgctttgcatttcaagcaagtgttgcacaaaagaataacgttgatatatatcctcttgatgagactaaggattatgttgtgaacagctccttagtgaaccatattgattatgagacaaacgacatgaaagtttctgatgtggtcttctttggatggtgcagtgacttggtggatacacaatcattgaacatcaagagaaaattagatgaagatgaagagagtactgaatccaccggccaaaaatacgaaaacttttttgtaaatggattccctgatgggaaagtcgttgtttactcttccaatggtaaagatattgttaacatcatcaagagtaagaaggaaattttgggtgcagacacagatgaatctaatatttggattttggacagtgataaagtagtcaagaaactacaatacaataactccaaaccaattaagactttcactctggttgatggtaaggaagatgacatagttcatttccaaatcttacatcaaaacggtaccttagtagtatgcgttatcaccgagcaaatggtttatatcgtcgacccaacaaagagaagaccctctacgaaatacaagtttgaagtaccaggtgctgtcacatgcgaattttcctcggatggcaaatatttgctaattgcggatagagaaaaattagctgcttatgatttgagcggtgattcaaaccctgctcaagtatggtctgttcaagtgaaaaaattaaggatttttagtgacttgataatggctttaaccgctgacgggaagatgttttttttcaaaattagtgaggccgataggatttgctctataaatgtcaacgaagacttagaaatcattgattttacacctataagcaagaagcaaaaaatcttaatatcttggttgaatgtcaatgaacccaactttgaatccatttccttgaatgaaatcactactaagaaaaatattaccatcaatgaaggaaaagaaaccaagcttgatgaatcagaactaaaacaaccagaagtagagaaaattgagccagaagcacaagatgagaaggcgaaaaccgaaaccaagataaacaggaaagttagtaaatcagaacaagcagaaatctccaatattcttttgtctcatttagaatctaactcaacagaattattggacgatctggcttccgaaagctggacagaatctgaaatcaaaaagttcattcttacaaatattaattcattggaccatttgagcagaatattttcaacagtatcagagccaataacacagaatccatggaatgagcaacgtctgcttccgttgtggcttaaatggttactgactttgaagagtggagaactgaattccataaatgacaagcatacaaagaaaaaccataaacatttaaaatcagcattaagatcttcagaggaaattttacctgttttacttgggatacaaggtagactggaaatgttaaggaggcaagcaaagctaagagaagaccttgcacaattgaccatgcaaaatcaagacggcgaagatgaggaaatagaagttatagagcattcaaacgtaattaataatcctttgcaggatcaaacatcatctgttaaaaagcctgaacaagactcgatcgtttatgccaacggagagagtgacgaatttgtcgatgcatctgaatatagagattga

SEQ ID NO: 1191 - DNA, 933 bp, Saccharomyces pastorianus
atgagtttgctcagtaaggtattggtcagaagaagctgcttcgatgtgggcatgagaaggaccccacaatggcacccccactactctaccacggcgggcaacaccagcgtgaacaagaagggcagcaaggtagtgcccgtgttgacggcgttggcattagcatcgattttcgtgaagaagtggtatgaggactcgaagatcaagaaggcagacgccaccagcgttacggtggacccggccatctctgccttcccgaagcggatgggccctccacagtggccatttgcgacgcagtacgggttgcttgggaagggcgtgcggtgtgtgtcctccatcactttcaaggcctacggcctgggcatctacgtggcggcagaggacaagcacttggtcgccgaggtgctggactcgaagttcctgtctcaggcgtttatcgacatcgcggctccctcattgccggcaaagacacaccaggagaacctgcgtacagccttggacgaccctgccaaggccccggtcttgatcaataacctcttggacagtgggatcaggctcatggccaaaaacaccccaataaaggcggggtctttcaaactgctaatggacggcaccaggaagagcattctgaagaacccggactcgcagacccaggacaaggaacgactggaggccgggtttcaagaactacacgactgcttcaggagtgtgaaggggcttgtagctcgggacgacgacttcttcattgagttgaacaaggactgctctctgagcctgtcctactacaccaagaaaagggacgagttcgtgatactgggtactgtcaaagaacctctcatcgggaagctcttattcgcccactacctagccggcgtggaccctccctccctggaagttaaacaagaggtggcggacgcgctcgtatccttggcctag

SEQ ID NO: 1192 - DNA, 798 bp, Saccharomyces pastorianus
atggtattggaagctacagtgttgataattgacaattcagagtactctcgcaatggggactttcctcgcacacggttcgaagcgcagatcgactccgtggagttcatattccaggccaagagaaacagtaatcccgagaacacagtggggctcatctctggtgcaggcgccaaccctcgggtgctgtccacgttcacggccgagtttgggaagattcttgctggtttgcacgatacgcaggtcgagggcgagctgcatctggccactgcgctgcagattgcccagctgactttgaagcaccgtcagaataaggttcagcaccagagaatcgtggcgttcgtatgcagtcccataagcgacgctcgagacgaattgattagactggccaagacgctgaagaaaaacaacgttgctgtggacattatcaacttcggcgagatcgagcacaacacagaactgttggacgagtttgttgccgcggtgaacgaccctcaggaggagactagtcacttgctgaccgtggtgcccggccctagactgctgtacgagaacatcgcgtcctctcctataattcttgaagagggctcctccggcatgggcgcctttggcggggctggcgctgactctgacgctaatggcacgttcatggacttcggtgtagatccatcaatggacccagaactggcaatggccttgcgtctctccatggaggaagagcaacagagacaagaaagactaagacagcaggagcagcaacaagaccagccggaccagccggaagaacgccaagacaaataa

SEQ ID NO: 1193 - DNA, 1815 bp, Saccharomyces pastorianus
atgataccaaccttcgtgcattcgttggcacttctatcagggctagtctttacgaagccacttcagcatcaacaggcggtttggagcccatcacaagacgtacaattgagagacctccatataggagatataaattttgtccatacaacagatacacatggttggttgggttcccatttgacacaaaccaactatgatgctgattggggggatttcgtttcatttgtagatattttcaggaacaaattgacacagctatccagggacctaatagtcatcgatactggtgacaaaagagacggtaacggtttgagtgacgctacttggcctcccggcttacgcagctcgaaaatattcaatatgctggactatgaccttttgaccttgggcaatcatgaactgtacacagctgaaagtgctattttggaatatagaggaacttcacagtccactaaattcaaagacaagtatgtgtgtagtaacgtggagttcattgaagacgatggtaagagagttccctttggaaataaatttgtcacctttgagactcccatacaaaaacaaagaattttagcgatgtcgtttttgtttagtttccaaagagctaataacagagccattgtaacacccccattggaagaaataatggagaagggctggtttcaaaatatggtcgagacaaacaaggagggcgatattgacttgattgttgtttttggccatttgcctgctactgatcccacagagcgtgaaatgcataagatccatgctttattaagaacgcactatccaaacactgttatacaatattttggaggtcacactcatatcagagatttcgtgcaactggactcgaagtccacttgtttgcaaagtggtagatttgcagaaaccgtcggattcttatcaataaatacgacaaatgcaatggacgaggataatcctagtttcacaagaagatatatcgattttaataaagactcattcgaacaccatttgagcaaagttgcaacggacgtagatacctcagcatcattaaaaaaaggcgaaacaatttcgcgactaataaatgatctacgtcatgaattaaacttgaatcagaaattggggtatatacctgaaacctattatgtggcaacaagacccttggactctgaaaagaatctttatcacttgattacccataaaattctgcctaatttgataccctcgaaaaactatgaaccctttatgagtcgattcattttgataaacactggttctgtaagatatgatctttataaaggcccattcacaaaagacacagaatacatagtaatgccgttcaataacgattggcatttcatcacagtaccattggtagttgcctccaaggtcgaaaactatttaaataagggcccggttatcgcttcgctgggcataccatcatctctccatcaacatcaacagtttaaccgtttccaaaagtgcccgtttattgaaaatccaaacttaagtgaaggctacactacggaagatgattttggctgccatggtgatgacacgcctcataactcacagcgggaatatgttattcccaacgtggttcaatgtgaggacatgaagaagtcaaaagaagaagaagaagaagaggatccattgaaaatggtacacgttatcttttacacatttatggagcttgacgtattgaacgccgtaaattctatcatcaataatttagacctacgcatgaagaacctgaccgccaacgactgttctcattatggcggcgaatccaccaaaaaattgctgcgtgattactttgctcaattctaa

SEQ ID NO: 1194 - DNA, 2391 bp, Saccharomyces pastorianus
atggtttcttggttatggctgttacaagtatcattccttcgaatagaacaagtagcgtgctacgactatgcttattcattcactgctaaagaactcaaggcttacaagcaagaggtgaaggagttattctattttgggttcgacagttatttggagcatggatatccatttgatgaggtgaggcccatttcttgcgtgcccaagaagagaaactttgaggaccttaatgaccacgtgaccaacgatatattgggcaatttcactatcacgctcatagactctttaacgactatagctgtgttgcaagacatgccacggtttcgggaagcggttcgactcgttgaaagaacttttccaaacggggagttcgatgtcgattctacggtgcaagtcttcgaaactagcatacgtgttctcggatctctgctttcttcacatctttatgccacagaccgcacaaaggcggtctatctaggccatgaatatgatggctcgttattgcgcctggcgcagaatatggcggataggcttttgcctgcatacttgacgtatacagggttacctgtaccacggatcaacgttaaatggaagttcaactttcccggtttcacggattctttggtgacagagaacaatgtggcagccatgtcgtgccctatgttcgaattcacaattctgtcttacctgacaggtgactccaaatatgaaaaagtgaccaggtatgcctttgataagatatggtcgctcagaaccgatttggatttgctgcccatgtcatttcacccggaaaagttgactccatatacatccatgaccgggataggtgcttccatcgactcatttttcgaatacgccttaaagggtgccgtactatttgatgatgcagaattaatgaatgtctggaacgtggcatacgaatcgttgaaaacaaattgtagaaatgattggctttttgccaatgtattggctgacacgggccaaatatttgtcccttggatagactcgctaagtgcatttttccccggcttgcaagtccttgctggtgatttggatgatgccatcgctaagcatttactgtttctaaagatatggaacacttttggcggtatccctgaaagatggaacttcagccccacagaaatctctcctccactttcaccaacggaaccgctatcggttacgttgaaggctatccttcccttggaatggtacccgttacggccggagtttttcgaatcaacctacttcctatatagagctactaaagatccattctatttgaatgtcggtgtgcacttattaagggatttaaaacagcggttcaagtccaagtgtggatttgcaggtttccaaaatgtcatcacgggcgaactacaggacagaatggaaacatttgtcctgagtgaaactttgaagtatttgtatttgttatttgacgaaggcaacgaattgcataagagcgggagcgatgtagttttcagtaccgaggcccatcctatgtggctgccccaagaggtgagatccaagtataagcgggacgctaagttcagcgactctacttattcgtcacacttaaaaacctgctataaaagagacagagagcttcaagctaaagaaagtacactaagccaaagaattgtgggatttgccagatcagtgttttcacaacaaccggaagaggaacttgcaaacttgacccgtaataacaaaaccaactttgaagctcccggcttatgtccgataatgccccgtcctagaagtgatcacgacacctggtattctccgttgctgagtaaatacagccggctgttcgagatcgatagccggtacaatgctacattgataaagccttcacacatgcaacactatcgtgccattgagctagaacctgcgttctatagcagatggtcaaatccgcagttcagtacgtgtcagatcgagcccaccactgaaatattcgaactgctcttcgaccttcctggagtacacgaacagaatccttcaattgctgacaacggaacgatcacgtatggagcatttggaagtaggtcgaggttaaagatcgaaaaactacaaatctaccaaagtgactactacggcgacctagtcactgcatcaacgttccaagacatctcccgccgagacacctactcccacatgtgcgataccacggcggatttgtattcttccgtgtttctctaccgggtggtggccgtcaacggacgtatagtgccccgacatggaactgtccaaattgagaaacacaactttatgcatgtttccaccgacatagaagagcaaggcacactcataatagggggcataggggtcaacgaccaagcacaactcatgctagagtgcacacccatcttaaacctcctccttatataa

SEQ ID NO: 1195 - DNA, 2448 bp, Saccharomyces pastorianus
atgatgaatttcttttcttcaaaatcatcgaaccaggagaattccggtgccggtttcggccctcaacaccaacattcaaatggcccagataatgggaataacaacagcagcaacactggtaatatcaacggatacccaagtaagctagtgccaactggcaccggcacgtcgtcaaatagcggcacccttttcacgaactttactttgcaaacagcaacacccaccacagctattagtcaggacttatacgcgatgggcactacggggataacttctgaaaacgttcttttccagatgaagtcgatgaatgatggtatttcgtctgccaacaacaacaacagtaacaataacaacgcccccacgattattacaactttacaggaggaggccaacgctgggaatgcaaccgctagcacgggtggcaattctgaagatgataattattcttcaagctctaccacaaaatgcttactgtcttccacttcctcattatcaataaatcaacgagaagctacttcaggctacggtccagatactgatgttcccagaggtaaactagaagttacaataatagaggctcgtgacctggttaccagatcaaagagttctcaaccttatgtcgtttgtacctttgaaagttcagagttcatttccaatggtcctgaatcattaggcactagtcataacagtatcaataacccaaacaagcataatccaaaccagcataataataacgataataatcagcatcataataataacagtgggtggaacggttctaagttaccgtcaataaaagagcatttaaagaaaaaacccctttatacacacagatcatcctcccagctggatcaactaaactcttcttccacggctgttgattccaacaagcgctcctctaattcctcctcgggttcctcaaacgacccaatgactgataattcacatccaatatggcatcacaaaacgacgttcgatgttctggggtctcactcggaactagacatatctgtttatgacgctgctcacgaccatatgtttttaggccaagttagactgtatccgaaaattcataatctggcacacgcttcgcaaaaccaatggcatattttaaagcctcgtgttatcgatgaaaacgtgtcaggagatatcttaattaaatggacctacaaacaaacaaacaaaagacattatggtccacaagattttgaagttcttcgactactgggtaaggggacgtttggccaagtctatcaggtcaaaaagaaagatactcaaaggatttacgcaatgaaagttctttcgaaaaaagttattgtaaaaaaaaatgaaattgcccatacgattggcgaaagaaatatcttggtcaccaccgcatccaaatcatctccatttattgttgggttgaaattctcgtttcaaactccagcggatttatacctggtcacggattatatgagtggtggagaattattttggcatttacaaaaagagggccgcttttcagaggatagagccaaattttatattgctgaattagtcttagccttggagcatttacacgataatgacattgtttacagagatttaaaacccgaaaatattctattggatgcgaacggttatatcgctctttgtgattttggtctttccaaggctgacttaaaagatagaactaatacgttttgtggtaccactgaatatttggcaccagaattattactggacgaaactggttacaccaagatggtcgatttctggtctctaggtgtattgatattcgaaatgtgttgtggctggtccccattttttgccgaaaataatcaaaaaatgtaccaaaaaattgccttcggtaaagtcaagttccccagagacgtgttgtcacaagaagggagatcctttgtcaagggcctattgaacagaaaccccaagcatagactgggcgccatcgatgatgggagagaactgcgcgcccatccgtacttcgcagatattgattgggagtcattgaagcagaagagaatcccaccaccttttaagccacatttggtttcggaaacagatacttcaaactttgacccggagttcacgacagcatccacctcgtatatgaacaaacaccagcccataatgacagctacgccactatcgccggccatgcaagccaagtttgccggattcacctttgtcgatgagtctgccatcgatgaacacgtcaataacaaccgcaaatttttgcaaaactcgtactttatggagccgggctccttcatcccaggaaatccaaacctacccgcagacgaagatgtcatcgatgatgatggggacgaagacatcaatgatggattcaaccaagagagaaatatgaacaacagcaattcacacatcgattttgatggcgaccaacacatggatgacgaatttgtcagtggcagatttgaaatatga

SEQ ID NO: 1196 - DNA, 1851 bp, Saccharomyces pastorianus
atgagtttttccaccataaatggtaacatcaataagaatgctggtgatagcaacaataacacgactgagaacagctcgacaacggacctcctaggaatggatctgttgcaacatgcgccccgtttgatgagtactatgcagccgaacaattcttctgacatgttgcccatggctaatggaaccaatcttgttcaagagtccgctgcaaacaataatagcagcagtgccaataccggcacaaaggctccggcaaacgagtttgtgagaaagcttttccggatattggaaaataacgagtatccagacatcgtgacctggactgaaaacggcaagagctttgtcgtattggacacagggaagtttacgacacacatacttcccaatcatttcaagcactccaatttcgcttcttttgtgaggcagctaaacaagtacgatttccataaggttaagagaagcccggaagaaagacagaaatgtaagtatggagaacaaagttgggagttccagcatccagaatttagagttcactacgggaagggactcgataacattaaaagaaaaattccggcccaaaggaaagtattgctagacgaatctcaaaaggctcttttacattttaatagtgaaggcgccaacccgaacagttcttccggggccctcttgaatgaatccaccacagaactgctattaagtaatactgtaagtaaggatgcatttggaaatttgagaaggcgggtagacaaactgcaaaaggaactggatatgtccaagatggaaagttatgctacaaaagtggaattacaaaaattgaactcgaagtacaatacggtcattgaaagcttaataacattcaagacaatcaacgaaaatctacttaacaacttcaacgctctgtgttccactttggcaaataatggaattgaagtcccaatattcggagacaacggaaaccaaaacccagccggcaacggtaacaacccaacacctaccaccgtcattcataatagtaacgccaacaatgcctccccaacgacatctacggtgtccttacaaatgcccaatttacccgatgagaatagcctgacccccaatgctcaaggaaatgctgtcacactacgaaaagggttccatgttctactagtggaagacgatgccgtgtctatacagttgtgctcaaaattcttacggaaatacggctgtactgttcaggttgtcaccgatggtctttcggctatttcaacgctggaaaaattcagatatgatttggtcctaatggacattgtgatgcccaacctagatggtgccacggctacatctatcgtaagaagtttcgacaacgaaacgcccatcattgccatgaccggtaacattatgaatcaagatttgattacctacttacagcatggtatgaatgatatcttggccaagccattcacgagagacgatttacattcgattctgatacgttatttgaaggatcgcattcctttatgtaagcagcagttaccaccgcgcaactcttcaccacaaacacattccaacaccaatactactaattccaatcctaacacaatcaacgaacactcattatctttgctaccacaagataatccgtctactacaacacctgttactccgggtgcttccatatcgtctgcgcagcacggtcaacaagaacaacagcatcaacaactgttccatgctcaacaacaacaacaccacaacaccgctagaccagacgtatccataccgagcttggaacacgaaatcaacactgtaccacattcttcaatgggctctactccacaattgccacaacctacgattcaggaaaatcaattatcataa

SEQ ID NO: 1197 - DNA, 1575 bp, Saccharomyces pastorianus
atgggtttaaccatcaagatagaaaccttgaacgatagcgatcaagctccggtgcaagaaggagtcgaggatggctccaatgctcaagacgtagcccccactgaggaagagatttgtgatgatgtagttctattgtggaaggaagagcctggaacagaagacgctacgatccagcacctttatgatagaattagagagagaaattcaacatggaaattgagcgcttcacgtttccggaatatccttaaccaacaccatctttacgatacggatttagagacagtgtcactatataaggaagatattcatttccccaaggctgtagattctaatgctaaggtcaaagtagaatttattgatgacgagcatggcaggggccttttcgccgaaaaggattttaccaagggccaaatcattttgaaggaaaataagcctatcgtattcgtcccaccattagacaagctattttttatttctaatgggaaggcctgtgctcgatgtggcaaggcgctgtacgatttgacccagcaaaaaatcatggtccattatctagattgtgaggtatgtaaggcaatttggtgcagtgataaatgtaaaaaggctcacgctcccttacatgaactcttgtatcattcatggagatcaaatagaattgatattttgcatgctggtaactggaaaaggtttgtaaactattgtgagaagtactgttttacagcggccttttccattggtcttatatacgggtcgatgctgttagattccacaggagaagtcaaagagcaatgggatgtattagcaagcgtctcacaaagagtcagaatcaaactgagggacgccagtggtattggcagtacgtttaacttgatgaatggtacaatagctcacaccgaagacggttctgataatggcgccaaaaaagacgatgacgaaaatgctgatgacgagattgtctgggaaaaatgctatgagttattctgtggtgctttccctaaagcttctgaagaaatagatttggagcaatttttaaccatgattgggacgttcaacattaaccaatataatggacaaatatatcattggcactcattcatgaaccacgattgtgaaccaaatgcttatattgagcaggcagaagaacatgaggaattgaagttacatgcaagaaaaccaatcaagaaaggggagcaagtttgcgtcacttacgtaaatcccttacatggggtcagattaagacgaagagaactaagagttaattgggggtttttatgtcagtgtgaccgttgccgaaatgagttgtctactttcgaaagagttccgaattcagacaaggaaagtgtgaccaccaatttggctaaggttgattctgatgacactagtgacgatactcctggtagatcaacagataatcgaaaatcgtctatgcgggaggctcagccggatttaaaagaaattttaaaaaatgggaaagaattcgaattggatattccagaaacggttgatacgcaaggtaacgtgaggaagacttcagttagatttgattcaaatgtttttgttgcagtagacgaaagataa

SEQ ID NO: 1198 - DNA, 1182 bp, Saccharomyces pastorianus
atgttacaaaggaattctttgaaatgggggaaattctccatcagaacgctagccactggtgctccattggatgcctctaaattgaaaattacaagaaacccaaatccttccaagccaagaccaaatgacgaattagtgtttggtcaaacattcacagaccacatgttgaccattccatggactgccaaagaagggtggggtgttcctcatatcaagccttatgctaatttatcgcttgacccatcatcttgtgtattccactatgcatttgaactgttcgaaggtttgaaagcctacagaacccctcaaaataccattaccatgttccgttctgacaagaacatggttcgtatgaacaaatccgcagctagaatctgtttacccaccttcgactctgaggaattgatcaagcttactgggaagttgatcgaacaagataaacatttagttcctgaagggaatggttactctttatacatcagaccaacaatgatcggtacctctaaaggtttaggtgtcggcactccttccgaagctcttctttacgtgatcacttctccagttggtccttattacaagaccggtttcaaggccgttcgtcttgaagcaacagactatgccactagagcttggccaggtggtgttggtgacaagaagttgggtgctaactatgctccatgtatcttacctcaattgcaagctgctaaaagaggataccaacaaaacctatggttgtttggtcctgaaaaaaacattactgaagtcggcaccatgaacgtgttcttcgtcttcctcaacaaagtcaccggtaagaaagagttggttactgccccattagacggtactatcttggaaggtgtcactagagattctgttttgagtttggctcgtgagaaactagatcctcaagaatgggacatcaacgaacgttattacactatcactgaagttgctactagagctcaacaaggtgaactattggaagcattcggttctggtactgctgctgttgtctcaccaatcaaggaaattggctggaaagatcaagatatcaatgttccattattgcctggtgagcaatctggtgctttgaccaagcaagtcgcccaatggattgctgatattcaatacggtagaactaagcacggtaactggtcgagaactgttgctgacttgaactaa

SEQ ID NO: 1199 - DNA, 879 bp, Saccharomyces pastorianus
atgcctaaaaccagttacttggagaaaaattttgaatcctcacactacaataaagtacgtccctcttatccacaatctttggttaatgaggtattagccttccataggggcccggacaggaatttagtggatgttggatgtggtacaggaaaggcgacatttctctttgagccttattttgaaaatatcactggcattgacccatcttccgccatgctctcaattgcagagaaagaaaaagctgaacgtaaattgggagacaatgttaaattcattaacgcccttggtgaagacttatccagtattgaatcaggaactgttgatatggttatcagcgcggaggcaattcattggtgtaatctagacaagctatttcaacaagttacgtctgtattacgcagagatggaacttttgcattttggttttatattcaaccggtatttgtggattttactccagaagcgtcaaatgtatactacaaatattgttggagtaaggattacatgggcaaatacttggatgaaaaccaaagggaagttttattgaattatggcggtgaaatgctacgttctttattaccagagatatttaaagatgtcgaggtctccatttataacccttcagacccagatacatcaacagttacggctgaagaaaataaatttctctggcgcacaactatcactttgacacaattaaagcagtttgtaaaaagctggagcatatacgcttcttggattagagatcatcctggtgaatcagatatagcggatatctttatagatgaaatgaaagaggcttgtcattgcgataacttggacttacctttgaatgtagagtggtctacattctattatctttgtaggaagaaggattaa

SEQ ID NO: 1200 - DNA, 1629 bp, Saccharomyces pastorianus
atgtccgaacagaaggaggaatacgttgttttaaaaaagactcaattgtctgtatccacacaaagtttaacttcggatccagaaagccagttgcaaaacccatttgaagattttgatgaggctaagcgctggagaaaagtttacgagtccagtggctatgaggggttgtctaaatttgatcccgagttttcttggagtaaggatgaagagagaagggtagtgagaaaaatagatttgaagattttcttgtgggtctttatcatgttttgttttctggatctgataagaaaaaacattgccagggctgtctcagataacatcattaccgatttaaagatgaatactaatgactacaaccttgggcagactgtttatcttgtgttatttctggtgagcgagctacctggtaacctgctgtctaaaagatttggtccagaaagagtcataccaattcaaattgtcctctggagtatcatctgtattacacaggcaggtttgaaaaataaagctcagtttattgccactagatgtttattaggaatcgtgcaaggtggattcatcccagataacatattatacttgtcttattattataccggagccgagcttacttttcgcttaagtttcttctggtgtgctatcccccttttccaaattctaggctcactctttgcttccggtgttttagagatgcgaggaattcatgacttggctggttggcagtatttgttcattattgaaggatttatatccctagccgttggtgtggcatccttttatttgatgcgcaggggccccactcaaactggtgagtctgcattccataaggggaaatcgcttttctctgagtatgaggagaagattatgattaatagaattttaagagatgatccatcaaagggcgatatgagcaataggcaacccgttacttttaaggaaattttgtataccttaacagaatttgatctctggccactattcatacaaggcattacaggatttatatctttacaaaccgttacaccttacatgtcgctgatcttgaaaagcatgaatttctccacctttctttcaaatattttggcaattccaggtcaagctttgctattaattaatctaccattagtggcattgctatcacgcaaattaaaagagaaatcactttgtgtaggaattgcgaacgtttgggtgcttccttttattgtttctttagtcgctttgccaacagatacaaatccatggataaagtacgtactactcactggtgtacttggtcttccctacacacattccattcttgcaggttgggtttccgaaatttcaaattcggtgagatcgcgtgcgatagggacagcattatacaatataagtgctcagattggaacaattattgcctctaacttgtacagaaatgacgataaaccttactatgtcaagggtaacaaggctcttctaggatttgcttgtttcaacatttgcatggcagttgccacaaagttctactatatcagcagaaatagatataaagaacgcaaatggaacttaatgacaaaagaagaacggaccaattacttggacactactactgatctaggaatgaagcgccttgactatagattcatccactaa

SEQ ID NO: 1201 - DNA, 1254 bp, Saccharomyces pastorianus
atgtcgcaaagattacaaagtattaaggatcatttggttgagagcgccatggggaaaagtggaacaaaaaagaaaaacttgttgttggaaaagagaccagacgatgtagttatagtagctgcaaataggtctgctattggcaagggcttcaaaggtgcttacaaggatgtgaacacggactacttgctatataatttccttaatgaattcattgggaggtttccggactccctaaggacggacttgaagttgatcgaagaggttgcctgtggtaacgttctcaacgtgggggcgggggctacggaacatagagctgcgtgcttggcgagtgggatcccatactccacgccgtttgtggctttgaacagacaatgttcttcagggttgacggcggtaaacgatattgccaacaaaatcaaggtcggacagatcgatattggtctagcactaggcgtggagtcaatgaccaataactataaaaatatcaacccattgggcatgatttcctctgaagagttgcagatgaatcgtgaagcgaagaaatgtctaataccaatgggtataacaaacgaaaacattgctagcaatttcaaaatctgcagaagggatcaggatgaatttgctgccaattcttatcaaaaggcttacaaggccaaagatgaaggacttttcgatgaagagattctacccataaaattaccagacggcacggttttccagaaagatgaagggccacgccctaacgtcacggcagaatcacttgggagcatcaagcctgcgtttatcaaggacagaggcactaccactgcaggtaatgcgtctcaggtctctgatggtgtcgccggtgtcctattggcccgcaggtctgtagccaaccagttggatttgcccgtgctaggccgctacatcgattttcaaacagtgggggttccacctgaaataatgggcgtgggccccgcatacgccataccaaaagttttgggagcaactggtttacaaatccaagatattgacgttttcgaaatcaacgaagcctttgccgctcaagctttatactgtatccataaactaggcattgatctgagtaaagtaaaccccagaggtggtgccatcgcactgggccacccgctgggctgtaccggcgcaagacaagtggctactatactaagagaattggaaaaggaccagatcggagttgttagtatgtgtattggtactggtatgggtgctgcagctatttttgttaaggagtaa

SEQ ID NO: 1202 - DNA, 4125 bp, Saccharomyces pastorianus
atgcactgttccccgagcaagaagatgtatcgctacccccgaaggtcactgtcactacacgcgcaagataggcctagtgaagctcgtgaattggaagatttgaatttgactgatggactggtttccgctggtttgcagttggtgggagtggcactacagaagcgagacacaggatcacacatctatatgaaacaaaagaacttctctactaacgatgtcgcgtcgtcatcagcggcttccgtagatatgacgccatcggatatggatttcaatccaaaatgcatgccccaagacagagttctcgtggaaagaatgtttgataaacttttgaaagataggacatttttttggggtgctgcgtacaagaatctacagggcatctcactgcgaaggaaatggcagctaatttgcaagattcgtacttccgaccactgcatgagaagtgatgtggctgctggtaccgctacgaaacattctgctcaattgcccaccaatgagctcgtggaaatctcgcatttcttggatggtttggtaagaaacctttccggtgagggcatgaacttgtccaagaccctttacaaattagagaagttcctgcggaagaaaaacttcttggagctttttctgaaggatgaaatatatttaacgactttgcttgagaagactttgtcactcatatccaaggaattgcagttcgtttatctgagatgttttaaaatattaatgaataacccattagcaaggataagagcactgcactctgagtctttagttcaatggtttgtggagcttttaaacgaacgggattctgacctaaaatgccaattactttccatggagttactcttattgttaacctacgtggaaggttccacgggctgtaatataatatggaatcagctttcaatatctttcaccaattggcgtgattggtttagcaaaatcctcaccgatgacgttgctgctcattcgtccttgtatttaaactgggatcaattgaagacagactattcaatgactttcctactactgataaactctattctgcaaggtttcagtaacaaaatcgcactggatatcctgaattttttgaaaaagaatggcattcataacactatatcgattttagagtcagtctatagggatagccctgaaaatgccgtcatcatggaacaaatatacttgtttagaaccaaagaatcaagtatttttgatccgatggctccacctaccgaaaatttggcctcttttcatccagtgaaaaatgcgattgaaaaaggaattcaacctgtttgtcttgaaaaatgcctattattgaaggcaaaagatagccccgtggaaacaccgataaatgaaattgttaatgctctgtggaaaattctggactctcagagaccttactcagaatccatgaaacttctgaggttgataaattctctattattttatcttattgactcttttcaagttccattaaatgcttcttttgacgaaaccttggatcaaccgcaaaatacgcgaaacgtaaattcggttttccaggattctattgataaattgctggactcattacaatcggatgacattgctagaagagcggtcattgaaattgataatttaaatggcaagatctctaccttgaatgaaagaataagccttgttgaaaaccatagtaaagaccaactattgacgaaactagatgaaagtgaaattctagtatctttgaaaacgaaggaaaacgaaaatttgaaacttcagttgaagaaaattaagaagaagctggatcaaattgctacacaccaaagactatatgaccaacccccttcattagccagcagcaacttaagtgttactggttctacaacacaaagcaatagcaatagtaatttgatttttcaaaatttagctgtcaaagaacatcaacagcaaaagatttctttacctaaacactcgacgagtatactaaagagtaaaagaattacgtccctttcatcatatcttgctgattcgaatgacgaaaatgaggaccagactggaatagaagatagatcgaaagatttgtttcaggcatctgcctctgccgttaattttaagattcgttctgtaaaaaatattacaaatttgcagaatgtttcattaaattcaatactctcagaactcgaattctcaaacgatctgaatattcaaccaaattatcaatcttctccggtattgtcttcgatatcttcatcgcccaaactattttcccaactttctgcgaaaagtcttaacaacaatattccactgttatctgaagttgataataaatttacggttcctcctccccctccccctccccctcctcctccactcccattctctctcttacctgattcggaagctactctcaaaccagagatatctgcgcctgctccaccacctctcccggatttgtttaaagttgatgatccctgctctattccacctcctccacccttgcctgggtcattatcgatgtctaatgagacttcagataatggcgtcgtgactccggcagctccacctttacccaatggtctactttcactatcttcaacgtcaatcaactcaacgactgtaaatttagtatcaagctcgtctaaaagtcgcttgaagcaaattcattgggacaaagtagaagaaatcaaagataccctttgggaagatacagcccaacgccaagaaacacttaaagagttgcaaaccggtggtatattttctcaaattgaagatattttcaagatgaaagatcccgctaaaattgcatgtaaaaaaaatggtggctcttcaactgcaatgtcttcgaataatggcaagtcttcaaatgaattaaaaaaggtttcgttcttatcaagagatttagctcaacaatttggtatcaatttacatatgttttctcaggtatctgatatggaatttgtaaagaaagttttaaactgtgataacaacattatcatgaatgtaaacattttgaaatttttctgtaaagaggagctcctaagtataccccaaagtctgcttagtaagtatgagccctattctcagggtaaaggaggaaaatcagtaagtgatttacagagggctgatagaatatttttggaattgtgtattaatttaagatcatattggaacgcaagatcaaaaagtcttttaacactatcgacctatgaaagagattattacgatttgattttcaagttacagaaaattgatgatggtattctgcaattaaatcgttcttttaaattcaagagtttaatgtttataattacggaaattggtaaccacatgaataaaaaaatggtcaagggtatcaaattgaaatcattaaccaaattagcctttgttagatccagcgcagatcaaaatctatcatttttacatttcattgaaaaaaccataagaacaaaataccctgatatttatggttttgtagatgatctaaagagaattgaagatttaggtaaggtttcattagagcatgttgaattggaatgccgtgaatttcagcataagattgaaaatgcggtcactcagtttcagacaggaaaactttcgaacgaggaaaatttggatccaagagatcagattatcaaaagagtcaaattcaagatcaatcgggctaaaacaaaaagtgacttattggtggatcaatgtaaattaacgttaattgatttaagcaaactaatgaagtattatggtgaagatcccaatgacaaagaaagtaagaacgaattttttcaaacattcattgaatttttggccatgtttaaaaaatgtgccaaagaaaatattgaaaaggaggaaatggaaagggtgtacgaacaaagaaaaaacctgctagaaatgagaacaaatagcaacaagaaaagcaacgaaaacgacgaaaacgaaggaggggaagtgaacacagatgctgttgatttattgatctctaaattgcgtgaagtaaagaaggactcggaaccattaagaagaagaaaaggtaccaaactcaacgaaatcactgtgaatgtagatgaagggaattcgaaagcgagaaagggtgaagaccacgtactgtttgagagaacgcatgctatgttgaatgagattcaaaagatataa

SEQ ID NO: 1203 - DNA, 615 bp, Saccharomyces pastorianus
atgggcgacatttctatggcagtaggtacgactgttggaattccaattggcgtgggcgtaacaatagctctgatattttggtgcattttgcaacatcgttataggaaagaagcagctcgagatggagacttggaaaagattatggcagcagaagtggctgtgtccgtatatgaaagcttcaaattagaaatgagcagttcaagcgagatatctacgataaatgaaaagaaaagcgaacaagatctcaagccctgcgaggctagacctgccaaaaatgggtatacaccggcgtataggcgacaattgaatgcaagtatggggagaatgtgtaaaaaaccacagggagccgcttatatcaatgtccctgtcattttcagcggtgagaagatgaatcatgggatggtcagagactcatcggatagattcatgtacccattgactttgacgcgcaagaacactcctagtcgtcgagctaagcccacaacaaactcaatttcaaacacgatcaataccagtctgcacgaagaggacaatttggacgacccatatgagaacaagtttacaaattatgttgcgaataaaagagaatttattgacagtttaaggccaaattga

SEQ ID NO: 1204 - DNA, 1047 bp, Saccharomyces pastorianus
atgcacaagagcatattgctgaccacgccggacggtgcgcaaacgaacctgcaccaaagcaagccggagacgcccaccaccgtggagttcgactcggaacagctcgaaaggggccacagggagagaggccgtagcaagaagaagagaggcgagcgaaacgacccatacgcaagcagcgtgtcgcggtccaggagtagggccagctcccgcagcagggtgcgggaggagcagttcctcaaatggacggtgttgaggcaggacccgtcgatgcggttgcggatcctggaccgggaccgggactctgaagacgaagaagaagaaggtgatgataacgacgactacggcgacggcgacctcgacgacgaggagtccgacgaggagcaggtcagcgacgtcgacaacgacctcgagatcgacgaggagttccactacgacctgggcatgaaagtgctccccaacttctgcacctgcatcaacgacgtgctggactccagcaagccgtggatagccaagtacgagatcagcatccgcggccacgaggacgacggcgtgtcgctggagcgactcgccggcgggtacgtcagggccatgcagctgctcaccaagggcgccggcgcagagcccggcgcccagcgctgcttcatcctctacacagacctcaccaccgagtccacctacgccctcacctacctcatgggcgccgtgctcaaccagggcgacaccctctacatcctccactgggaaccctccaccccgacagacgactcccaaatgctcgccaacgtcgccagaatccgcaaacacgtcatgcacctgttcgactgcgtcgcagccgtcctcgacgacctcgacgtcgtcatcctctccctgactcacccgtacccgaaacacctgctcaacgagatgattcacggcctcaaaccagtcgccctgtgttgctccctctccgtcatcctgggcaccttgcagaacttcgtctgctccgtccccaccctcgctgtcagaaagaaactcaagcgtgccaagcgcaagggcatcttcgagtga

SEQ ID NO: 1205 - DNA, 696 bp, Saccharomyces pastorianus
atgagccataaaagaagaggtctagtgatataccaggaccagaaacagccgcagcactcctccggccagtccataagttctctatcctggtccgcgacacaacggcaacagcaacagcaccaccaccaccctttgaaacagcaaggtaccaacagtttcacaaaaatattgtcgaaatcgtatttacaacaggatgcccagcaggataacagccacctccccatctcatcgctagttctgaagcagcagcagcagcgcaaaaatacgccatcacagagctcaggacctccgttgccaaagctagttcaagactcacagtggactagctccacaattcatcggccctcatggaagcaagagaagcaaccaaaattgttctactatacagactccagacttgtttcgcaactacatagctccgtcaaggacctggacactattatccaaacgcataagccaaggtttgacacaattattcacgacctatctcataccataatattgtcctcgaacgagctgctcataaagctcccgacgaaagacgcaataatactgcacagcagaacacccataataaatgcggaatggctgcggaataaactcagtaacgctggcgcctcactagtgatcgattcaaaatcctttttgatcctgtgtaacaatataaaatggtacctgcactggaagtttatatga

SEQ ID NO: 1206 - DNA, 3354 bp, Saccharomyces pastorianus
atggttgacataatggcgccggtgaatgatgatcctaataatgtgaccgattattcaagatccagtaacaatcctacttctgtagtgaacgacatgcgtccgacaaccacggcgcttctccaccaaaagcgacatagctcctcctcgcacaatgatacacccgagtcgtctttcgccaaaagaagagtacctggagtagtagagcctgtggggaagggatttatagatggaataagcactagccaagtactgatgcaaaacgtccccttcaaaacggatgatatttctagaagaccgagcatttctcgaaaggccatggaatcgaccccgcaacttcacgccagttctaactcggccatggacatacccaagtcaccctattacgtgagcagaacagcgattgctcgaaatatggaagtggtctctaaggacagtcatgacgaaaacgtcccgcaggcaaggactgatgattcattgactacttcaaatggtatttatgccaattcgcaaccgcagagtcagataacattgtccgacactagggcagcacccgtttctgctacttcacttccatcagtgacaagacagttaccttctgcgcaacccaatcagacattcattaagaaattacaagaaatctataaaattatagtggtacaggaaacagaattgcaacagagatgtctctttttaacaacctctcaaactacggaattgaaaagcttatgggcaatatacaaattaaacactgaactgatcaaaaactacatcaatttcatcatcactgcattattaaccacacagccgataaatgatttaattatgggccaagaaatcttggacatttacaggatagagaaaaggttatgggtatatggtataataactttcttggatgtcctgaagaatttttcaaattttatggaccctgaagtgtgttgtcaattcatcacatacgcatttatctgtatctcgaacatgcttgaagatataccgctgaaatattctattctatggagacagagactgggcgatttatcccgaatggcaatttcactgtatccatcagggtttatagattggaggctgagcgcagagtattggtacactcaatcaatgaaatacatatacgggtgtggtaagctttactatcatattgccacaattcaacagaacagtttagaggcatttgtaaacttgggcaaaagtgttttctgccaggatccctttactccgtctcaacaaacgttacaattattgattgaaaacatttatcagtccgcattcactgacagaagttctagtaataccaacaacaatgaaatcgctcataaaaattctcaattaattgattatttaaaacacactgaagtaatgttattacctagtttcctggagaatatggacttacaacatgttgtgctgctgtatttcaaagataaatttggtaaagactttaatgggaatgatgtttttagtacaaaagatatgttttgccaaaacccagagtcactacggtattattttagacatgcaccagcatttgctgaatctcaaattttacaattgattgggtttgggaatcctaaaaatccatttgcattactgtttcaattacccaaacatttgaaattgaaaaaggataaaagagagaagaagaaatccggcgcaacagaaataccgcattacaaagatccctttgatgaccaagcaagctcagaaagttattttcaaaatatcgatactttaaattccaattttgatgatcttcctaccaatatcgatatctggctggattccttaaactacataaacatgacgtcaatacaatgtagtatgcacgtattaactaaattccttcatgcacctttagcagttgctttaccgcattttttgacctggttacatttcataattgcggttcttaaaaagctggagaccattgattctaaacaagtaacttcattttggctgcattttctaagaagaacgatgccgtggaattccacggtaacttttgccaacgtcttggtgtgctacatgctagataatttacatccattcttagaaagggagttagaaaaattctattcattagaattagacgatctgattgaatattttaacgaaaatgaaaacctacccgaggtttggaaatgctgggggagcttatggtttgacgcagttaagaaatgcgatgtgatggaaattcctggcgttcgagatcaccttttttttgattctccccttgatggtatagtatttgataaaaaggatgaaattggcgagaaattctggatacgtagtgtaagaaccattttaaccttgaaagggattgccaagaagttccctgatttgggattgaaggtaaattttcaagcacctgtgttttgtcgtagaaatgacatttcaccagattatttcttgaaaaatttaacgtttaagttggatccatatgaagaggacgcttttaatgatgacaacgaactagacgagttatacgacgcaatcgaaataagcgagctgatcgaaacggataatatggacctgcgggccacaccgagattaagtgttgtttctggtgagagtatcttcgaatatactggttatacaagattgacaccagattatcattgctttgataaaaacggtggatttaatagcgcgtttatttatactcaatggtccaacgttggaaacggcataacgttagacgtaagcagcgagtcattatacgatgctagcactaacgatttgagtttacattgggcaaagattcttttcgataaagttttcacgattgggaaaaacagcgatgatgacggtaattgttcggtttactttgtcattgacgctacttcgtggttaagacatttcgcacatattttcaagttagccaagaacaatattcttaaatttgcaatttgtttaaccacgttccaagaattacgctatttgagaggctcaaaggatgataatgttgtagaagcagcaacaaggtctgtgattactattaggcaattgtatgatgaagggaaaatcattcctatgaggtttacagggaatatagccacgcatgtggaggaaaacttagaattcgaagagcaaattacttggaagacacacgttgacgaatttgtcattgatgctattgctaggctgaaccaaaatttccaaaccgaaagaacgatagatataaacaaaggccgtgccaaggaatttgcagttttagtaacggacgatgataatatgaaccaaaaggcgaaagataaaatgataaagacgtgcaatacaaaatatttattttcattgggcagcaaacttggcattaattctggattatgtaccaactga

SEQ ID NO: 1207 - DNA, 1710 bp, Saccharomyces pastorianus
atggacgatccacgtgaggttttagcggttgatccgtataacaatgtcacatcagatgaagaagacgaacaggccatcgctaaggaacttgaatttatggaacgaaagaagcaagccttaatggaacgattgaagaggaagcaagacttcaaaaaaccggaagatcctaactttgaggctgttgaagtaccgcaatctcccgctaagaaacgtacagttcagaattcccaagatgcctcaaaacaggccataaggcctgtagcttcaaacgtcaacgaattaatgctgtctcagcaatcactagaatcaccgagtaatacgaccacatattttatgcaaaaatttcagagtgcaaagagaaatgaggataagcagattgccagatatgaaggtatgatgaacgcaagggtacatacgtttggtactgataacaaagaatacaagccaataatcacaaacgagttggaaagtttttcaaatctttgggttaaaaaacgatacatgcccgaagaagatttaaagcatgctttacatgagattaagattcttcgactgaacaagctttttgctaaaattcgtccaccaaagttccaggaacctgactacaccaattgggccacagtcggcctgattagtcataaatcagaaatcaagtttacgtcttctgagaagccgattaaatttttcatgttcacaattacagatttccaacattcactagatgtttatatttttgggaaaaagggtgttgaaagatactataatctccgtctgggtgatgtgatagcaatattaaaccctgaagtactaccgtggagaccttcaagtcatgggaactttattaagtcttttaatctccgaattagtcatgacttcaagtgtatcttggaaataggctcaagcagggacttgggatggtgtcccatcgtgaataaaaagacacataagaactgtggatctcctataaatacaaatcttcacatgtgctgtgattatcatagagaagtgcaatttagagggactagtgcaaagagaattgaactaaacgggggttacgccttgggtgcgccgaccaaagtagattctcaacctagtttatacagagccaaaggagaaaatcaatttaatatagtcagaagtacccgtaaaggtctctctgaagaagaagaaagagtcaaaaagaactctcacaattttaccaatagtaattctgccaaggcattttttgatgaaaaatttcagaatccagatatgctcgcaaacttggatagcaaaagaagaaagattattgataccaagaaatccacagcattgagccgtgagctaggcaaaatcatgagaagaaaggagtcaagcggattagaggacaaaagcgaaggagagaaacaaaaaatgaagcaaaccacagagagtgctctccaaacgggactgattcaacgtctaggatttgatccgacccatgggaaaatttccaaagtgcttaagtcctctgttcccggcggagagtccaagaacaaccgcgttaatgggaagaaaactgtcattaatgatctcctacagtacaagaaggagaaagtcatcctggcaccttcaaagaacgaatggttcaaaaaacgaagtcatcgtgaagaagtttggcaaaggcactttggatcaaatgaaactgaaggagcttcggacgctagtggaagtgaccttgagattgtataa

SEQ ID NO: 1208 - DNA, 1620 bp, Saccharomyces pastorianus
atggttctggaccaccaacatagagaaaagaaaggatcatcttccaggaacatggcgccaaattcttcatcaatgaatatccgcccatgctctgaaggacaagcttgggaagacaaaggtttgctagaccctcatctatctgtgttagaactgttgggcaagaccgggagttcgccttccccgttgggacagagcttggtcacatctattgacatatcgaaccaccataacgtaatcgataatatatcaggatcatggcaaaccattcaacctttggacttaggcgcttcttttatcccagaaaggtgctcttcgcagaccacaaatgggagtatcttatcgtctagtgacacttctgaagaagaacaagacttgcttcaagcgcctgctgctgatataataaacatcatcaaacaaggccaagatggcgcaagtgttgcttcgccatcacacccctttaagcaactccatacggtaatatcgttacccatgcctcccagggagaggaccttctatggtgagcaagaagaagaagttgtttgcattgacaatgatgacgataatggagtgtatgaagaagacagcgtgacaataacaaagagtttaacctcttcgacaaattcctttgttatgcctaaattatcactttcacgaaagaatccagttttccgtcttctggtactggggagagcgggtacaaaattttatcaatcaacgcccaaagaatatcagtctctctttgaattacccaaatcgcatgactccacaatattcccgcaatatacaggtatcgtcgtagttttccaagagttgaaagaaatggtatccctactcaatagaatcgtcgaatacgcccaaggcaagcccataatacctatctgtcaaccaggtcaaaccattcaagtaaagaatgttctgaaatcattcttaaaaaatagcctaatcaaactgttgtatcctccagtggtagtgacaaatagaaaagatatgaaaaaaatgtttgagaggttacaagatctgtctttggaatacgtgcaagatgaaaataatgaaggccaggatgaagataatgatgatgaacccatacagacatattctaggtcatataatcgtaacaagagagctggaagttcaaaaaggaaatcttccaaatcaagtaaaaaatctaaaaaaaaaaagcaacgctcttcaacaaaatggtttacttggggcgtttcaatcactattgggataagttttggatgttgcgtaacatactttgtcaccgcagcatatgaccaccaaacgatcaggtccttcaattcgcaatcgtctttactagcttcttttctttctttggattcttctagagacacggttaactcggctaccactactcctgcctcttctagtgagcagtttttatggtttgataagggcacgcttcagataaacttcaattcggacggattcattatgaaaagtctcaatgtcataaaggaaacatggggtaaaatgaatgatttcttcctgaccgctctgtacaggcctttgaattttctagacaatcttaataaaaaccctgatttttccgttgatgaatctaatcggattttggcactcggttatattttattataa

SEQ ID NO: 1209 - DNA, 2535 bp, Saccharomyces pastorianus
atgacggacatcgaaagccgcgagaccaagagcaacggaaagatcttcccagatatggggggagcctttttctcgtcagatgaggattctccagctactgatgtagagaacgacgataactacgaagatggcaaggaaacgcttactgcagttggcgaggaacgggacactggtgccatggttacaggactgaagaaaatacggaagaagaccaaaagtagcaggcataccgccgcaacggattcttctatgaatcaaatggacgctaaggataaggcgctcttgcacgacaacaatagcgatataccagcagatttcgttccagattctgtttcagggatgttcagaagccatgattttagttatctgcggttaaggccggatcacgcttcaaggcccctttggatttccccaagtgacggtaggatcattttggaaagtttttctcctttggctgaacaagctcaagactttttggtcaccattgcagaacccataagtaggccctcccatattcacgaatacaagatcacagcatattccttgtacgcagccgtttctgtggggttggaaacggacgatatcctttccgtcctggataggctgtccaaagtacccgtggcagaatctatacttaacttcatcaagggggccactatctcgtatggtaaagtgaaactggtcattaagcataatagatatttcgtcgaaaccacccaagctgatattttacaaatgctattaaacgattccgttattgggcccctaagaatagatagtgaccatcaagcacaaccagcggacgataaagagcaacagatccaacaaccgggcggtaagcccgctgccaacgttaatccaaatgatgtggaggccgtgttcagtgcagttattggcggcgacaacgagcgtgacgatgacgacgacgaccttgatgcagttcattcttttgaaattgccaatgagtccgtggaagtcgttaagaaaagatgccaagagattgattatcccgttttggaagaatatgatttcagaaacgaccatagaaatccagatttagatatcgatttgaaaccctctactcagatcagaccttaccaagaaaagtcactaagtaaaatgtttggtaatggtcgtgctcgttcgggtatcattgttttgccttgtggtgcaggtaagactttggttggtattactgcagcgtgcactatcaaaaaatcggtaattgttttgtgtacttcgtcagtgtctgtcatgcaatggagacagcaatttttgcaatggtgtaccttacaacccgaaaattgtgcagttttcacctctgacaataaggaaatgtttcaaactgaagccggtttggttgtatccacttattcaatggtggcaaatacaagaaacagatcacatgattcccaaaaagtcatggatttcttaaccggtagagaatgggggttcattattcttgacgaggtccatgtcgtgccagccgcaatgttccgtagagtggtttccaccattgcggcacatgccaaattggggttgactgcgactttggttagagaagatgataaaatcggtgatttgaatttcttaattggtccaaaactttacgaagcaaattggatggaactgtctcagaaagggcatattgcaaacgttcaatgtgcagaagtttggtgtcccatgacagcagagttttatcaagaatatttaagagaaactgcaaggaaaagaatgctgttgtacatcatgaatccgaccaagtttcaagcatgtcaattcttaattcaatatcatgaaagaaggggcgataagatcattgtcttttccgacaatgtttatgctttacaggagtatgctctgaagatggggaaaccttttatttatggttccacgccacaacaagaacgtatgaatattctacaaaattttcaatataacgaccagatcaataccatttttctatcaaaagtgggtgatacgtccattgatttaccggaggctacatgtttaatccaaatctcttcgcactatgggtctcgtcgtcaagaagctcaaagattagggagaattctaagagccaaaagacgtaatgatcaagggttcaatgcattcttttactccttggtttccaaggatactcaagagatgtattattcaacgaagagacaagctttccttgtagatcaaggttacgcatttaaagttattacacatttacatgggatggaaaacattccaaacctggcatacgcctcgccaagggaacgtagagaacttttgcaagaagtcttgttgaaaaacgaagaagccgcgggtatcgaagccggtgatgatgctgacaattctgttgggagaggctcaaacggtcacaagagattcaaatcaaaagctgttagaggcgaaggttcgttggctggtcttgctggtggtgaagatatggcatacatggaatatatcacgaataaaaacaaagaattaaaggaacatcacccactgattagaaagatgtactataagaatttaaaaaaatga

SEQ ID NO: 1210 - DNA, 1584 bp, Saccharomyces pastorianus
atgagtgtacagatatttggagatcaagtgacagaagaaagagcggaaaatgctcgtttgtcggctttcgtgggagccattgccgtgggtgatttagtgaaaagcacgttgggccctaaggggatggacaagttgttgcagagtgcatcgagcaatacttgcatggtgacgaatgatggtgcaacgatcctgaagtcgattccgttggacaacccagctgctaaagtgctggtgaacatcagtaaagtgcaggacgacgaggttggtgacggtaccaccagtgtcactgtgttgagtgcagaattgcttagagaggcggagaaattgatcgatcagtccaagattcaccctcagaccatcattgaaggttacagattagcctcggcggctgcgttggacgcgttggcgaaagcagccgtggacaactcccaagataagaccaagttccgtgaggatttggttcatattgccaagactacactatcttccaagatcctgtctcaagacaaggaccattttgccgagttggccaccactgcgatcttgagattgaaagggtctaccaatctagaacacatccagatcatcaaaattcttggtgggaaactatcggactcgttccttgacgaaggttttattctcgccaagaagtttggtaacaatcaaccaaagagaattgagaacgccaagattctaattgctaatactactttggacacagacaaagtcaaaattttcgggacaaagttcaaagtcgactccactgccaaattggcagaactagaaaaggcggagcgtgaaaagatgaagagcaaaattgccaaaatctccaagtttggtatcaacactttcatcaacagacagctaatttatgactacccagagcaactctttacagatttgggtataaactccatcgaacatgcggatttcgaaggtgtcgaaagactagctttagtcacgggtggtgaagtggtgtccacgttcgacgagccaagcaaatgcaaattaggagaatgtgacgtgatcgaggagatcatacttggcgaacagccattcttgaagttcagtggctgcaaagctggcgaggcctgtaccatcgttttaagaggtgccaccgaacagatgctagacgaagctgagagatccttacacgacgcattgtccgtgctgtcccagaccactaaggaaacaagaacagtcttaggtggcggttgcgccgagatggtcatgtccaaagccgtggacactcaagcgcaaaacatcgacgggaagaagtcccttgctgtggacgcctttgcccgtgccttaagacagctgccaactattttggcagacaacgccggattcgacagcagcgagctcgtgtccaagctaagatcctccatatacaacggtatctctacttccggcctggacctcaacaacgggactatcgccgacatgagagagctaggtatcgtcgagagctacaagctgaagcgagcagtcgtgagctcagcatccgaagccgctgaggtgctattaagagtggacaacatcatccgtgccagaccaagaaccgccaatagacagcatatgtaa

SEQ ID NO: 1211 - DNA, 2460 bp, Saccharomyces pastorianus
atggtacagcttcaactttcgttattgttggtacctattatatcgctactccacctggtggtagccacgccctacgaggcatatcccattgggaagcagtaccctccggtggcaaggctcaatgagtcgttcacattccagatttccaacgatacctacaaatcttccgtggacaaaacagcccaaattacatacaattgcttcgacttgccggactggctctcgttcgatgccggttcaagaaccttctcaggcgagccttcctccaacttactatctgacgctaacactacactatactacaacgtggtacttgaaggtacggatcctactgatagcacgactttgaacaacacgtaccagttcgtagtcagcaaccgtccatccatctctttgtcgtcggatttcaacctgttggcgttgctgaaaaactacggttacactaacggtaaaaatgcattgaaacttgctcctaatgaggttttcaatgtgacttttgaccgttcgatgttcactaacgaggattccatcgtgtcatactacgggcgcactgaattgtataatgcacctttacccaattggttgttcttcgactccgatgagttgaaattcactgggactgcacccgtaatcaattcagaaattgccccagagacaagttacgattttgtcattattgccacagatatcgaaggattctccgccgttgaagtgacgtttgagttggttattggtgcgcatcaattgactacctccatccaaaacagcctaattataaacgtcacggataccggtaacgtctcatataatttacctttaagttatgtgtatctcgatgacgatccaatcgcttccgaaaaagtgggttctatagacctgctcaatgctccggattggatttcattagacaataccaccatttctggttctgttccagatgatatgctcggtaaaaactccaaccctgccaacttttctgtatccatttatgacacttacggtgatgtggtttattttaattttgaagtggtctctacaacagacttatttgctattagttctctgcccaatatcaatgccacaagaggagaatggttcagctatttttttctgccctctcagtttacagactattcaaatacaacagtctcgctggagttcactaattcaagccaaaatcacgattggctaaatttccactcttctaacttaaccttgatgggtcaagtacccaataatctcgaaaagctttcattggccttaatggcgaatcaaggctctcattctcaagagctagatttcaacattattggtatgaattcaaaaacaactcactcgaaccatagctcgaatgctacatctacaatgagctctcatcgctctacttcaacgagttcttacacaacctctacacagacccaaactatgttgacctctacagctacttcatcctcagcagtggtacccacagcaaacaagaagtcctctcacagcaaaaagacagtggccatcgtatgcggtgtagtcatccctctgagcatcattctcattgccgtcatattgttcttaatcttctggagacgtagaaaagaaaattctgacaatgaaaaatcaccaaatgttatcagcgggcctgatttagataatgctgcaaacaagcccaaccaaggaaatgccacgtctttagataacccattcgatgatgatgcctcttcatatgatgacacctcgatagcaaggagattggctgctttgaacactctaaagttggatgatcattccacgtctgaatcggaaatctccagcatcgatgaaaaaagagattcttcatcggttatggacatgtacgatgacgcatttcagtcccaaagcaaagaggaactgctcgaaaaatcaccagcacagcctgtagcaagccccttctttgaccctcagaatagatcttcttcagtttacatggacagtgagccggccgtaaataaatcctggagatatacgggcgacttaccagcagttcctgacggtgtcagagacagctatggctcacaacaaacagtggatacagagaaactatttgacttggatgtgccgccaaaacaaaaacagaacaacacattaagagacgttactttgtcttcattggacccatggaacgacaatattaatgattcctcgataaagaatacaagggcgccaacgccgaagaacaaaacaacaaatggtaaccttcccttgccagattctcgttctgtaacaaatggaagaacaccaacaacaatgtcaacctcgtcttctgatgattttgttccagtcaaagacggtaagactttctgctgggttcacagtacagaaccagacagacaaccaagcaagaaaagacttgtggatttttcaaacaagagtaatgtcaatattggtcaagttgaagacattcagggacgcatcccagaaacgctatga

SEQ ID NO: 1212 - DNA, 486 bp, Saccharomyces pastorianus
atggaaaagatcaaggagaaattgaacagtttgaaactagaatctgaatcatggcaggaaaaatatgaggggttaagagaacaagtcaaagaattagagcaatctaatactgagaaagaaaacgagatcaaagcattgtctgctaagaacgagcagttcgatcatgaagtagaaaaattagagcatcaattggctgaaactaaacaattggctgaagactcgaacaatttaaggtctcataatgaaaactacaccaagaagaatcaagacttagaacaacaactagaagacagtgaaaccaaattaaaagaagctatggataaactgaaagaagcagacttgaactctgagcaaatgggcagaaagatcgttgctttagaggaagagagagacgaatgggaaaagaaatgtgaagattttcaaagcaaatacgaagaagccaagaaggaattggatgagattgctaattctttggaaaatttatga

SEQ ID NO: 1213 - DNA, 2835 bp, Saccharomyces pastorianus
atgtccgataatctgctatctttgtcgaatcccgtagtgccatgccattacgaattgtgcctagacatcgacccgtcatcgcccaatttcaaaggtaaggccaagatcgagttgaaattcaatccgaattccacctctttagcctccatcgaggacagtttcacccagttcaaactgcattccagggacttggttgttttgtctgcgcatgccaccgttggctctgcaaaattcgatctgaaagtgtctcaagacacccaaaatcattggtcagttttccagtctgactcgccgattcaattgtccaacgaatcaccgttggtcttgtccgtccaatacgtgggtaaaatccgcagcataaagacccaccacgatgcgacttttggtattttcaagacaaacttcatggatcccaaaacaggaacttccaacaaccatgtggtggctacgcactgccaaccgttttccgctagtaacattttcccctgtgttgatgaaccttcggccaaatccactattcaattaaacattactatgaactcacagtataaagccgtttccaattcgcccatcgaggctattgagactttggataatccgcaaaaacatttggtaaaattcgccacgacgcccttgatgaccacttccgtgtttggttttgccctgggtgacttggagtttttgaaaactgaagtcaaattgcagaataacataaccatgcctgtctccatctatgcgccttgggatattgctaatgccactttcaccttagacacaatccaaaagtatctgcctgttttggaatcctatttccagtgcccatatcctctgcccaagttggacttcgtcttattgccatatttgacagacatggcaatggaaaattttggtatgatcaccattcaactaaatcacttactccttccaccaagtgccctggctagcgatatcatcagagagcaagcccagcagctcattgttcatgagctggttcatcagtggatgggtaactacattacttttgactcatgggagcatctttggttcaatgagtcctttgccacttggttggcatgccacgtcctagaacagaaaggtgatttgccccaatattggacttcagagccctatttgctacaacaagtagaacccatcatgtgcaaagacgcatctgatttcaatagcaaaagtatctcccagattgcacagcggaagactagtatgaactcacatacatccgacatctttgatcctgaggcatatgcaaaaggtatcgttatgctgaggtctttgcaattggctataggtgatactcatttacagaagggtctccagagtgtttttgaagataccaaaacattccatgaaagaagcgtcaagcccatggatatctggaatcatatcgggaagactttgaaatctcaaaatataactaattttgtttcatcttggacaagaactccaggcttacctgtcgttaaagtagaattagaacaacaagatggaaagactcaaacaaaattaacccaacatagatttatcaatcaattgtctagcgatgagaaagcccaattagaagatgtcccataccaaattcccctatttggtgtcttgccagactgtacattggataccgagaatgttttattgactgatagaacattaacgttaaattatcctgtcctggtgctcaaccattttgcacaaggttattatcgtgtctcatacgaatccaaagaatgctatacccaaatcagcgataaaataatcgaaggtacgctatccgagattgacctttggaagattttcttagacttatcgcagtttatcggtgacgaaagtttccagggttctattcatttagttggtctttgtgagatattgaacaacattgcttcatcctcttcaaaaattccatcaaaatattggggcccattatccaaggggttagaaattctacaaacaactgaccgtgccattttatcaagctctagattacagtcctttttgagaaagaagataattattccacttttcgataagattgaatggccccagggcgaatttggtgagagcacagatccctacgaactgaaggtcatgtcgcaagttttgtttttgaacaaaaactctcagaaatgtgatgaattgtgccaaatttacttcaggcatttattgcaaggtccacgttcaagcgtcccattagaactagtgaattccatccttgttgtagtgtctcaacattgttcaaacattaagcagtggaaaaagatatttgatttggtcaaacacagctcttgtgccggtatcacgaaccacattgttaacctatacaaccaaagtaatgatgaaactatcagctcaatccaaaacagtgcaattgaatctcttggattctgtctagatttagacatagtgaaaaagattctgaattttgtcacttctaacattgaatccgaggggatggaactggcgttattcgggttcaactacaactttagaaagaggttaaacaagaaggggaaaccccaagacgaagtcgttcgggaattgatctggaaatggttcacggacaatttcgaccaatgggcacggaaggctacaaggaagggcactactacaggcgaccgtctgcacaaggtgttgagaagcatttccttggtaatctttcaaatgtttgttccagatgagccagaaaggatcgaaaaattcatcaatttgaaaaaagaaaagttgagtcaacacttattatcattggatgacatctggacttctgttcaacaagatgaagtgtccagaaagactataagtaagatgctgactcccatcgtgtga

SEQ ID NO: 1214 - DNA, 1182 bp, Saccharomyces pastorianus
atgtcttcaagaatcatcgtcggtagtgcagcgctagccgctgccatcacagccagcatcatggtcagggagcagagggccaagggccagggaagagattgcagggccagcgtctgctacaacaaccaggactacggcagctcggtgcctccgcagtggggaaagctgcacaacatcaagcaaggactgaaggaggacgcattgtcgttgaaggacgccctgctaggcgtttcacagcaggccagggaggaggctcctggtgcagtcagacgtgtgatctccgcagaggaggactctcggacacgcaagaacttaagtcagaagtccaaggactcttcctcgcagagcatctttaactgggggttcagcgaggctgagagaagaaaggccatagccatcggagagttcgatgttgcgaagaaacggttcgaagaggctgtagaccgcggcgagaaggaactcttgtccactgtgatgagagagaagaaagccgccttggacagggcatccttggagtacgagaagtacgggaaggctggggacttcaacgagctgtcggacaagctggaccagcaggagagggacagcaaccctttgaatcgtttgctgaagaagaacgtgaacagcggtagtaccgaagaagctgctgcaagaagtgtgcgaggctggggtgaaactgcccaggagtttggtagagaggagatggaagaggccaagaggaacgcgtcttcgcagcctagtgaggcccaaaggcgtctcaacgaactgaagaagatcaaggagaagggctggttcggttacaacaagggcgaacaaagcgagcagcagattgctgaaagagtggccaggggcctggaaggctggggtgaaactgcggcccaactttctaaggatgaaatggatgatttgagatggaattacgaaaactcgaagaagcaactggacaaaaacgtgtcggacgcgatgacttcattgtccaaagccaaggaggacttgaagcagtacggtagccattggtggtctggatggacggccaaggtcgacaacgacaaggaagctttgaaagatgaagctcagaaaaagtacgacgaagcattaaagaagtacgacgacgccaaggacaaatttaaggagtggaccgataacggcgatggcaaattttggagctcaaagaaaaactag

SEQ ID NO: 1215 - DNA, 1293 bp, Saccharomyces pastorianus
atggatactagcaacagtaacggggaccacgactcccacgtggcagtacagacggaggacgatgatacttatatgccaccttccccctccatgagcgagagctctatgatttttgaacgaaacgtggaggacccgtcatatctctataagacggtgtcaaacaatactgcgaaccctctttccaggcaaagcagtaggaccagtttgtttaatcataataccagcaataggaatatccataatctgagccagaaatcgtctgcagtaaacctgcacctacaaccttccaggacaaatgagtccatagcatcttaccaaacgtataatcctgatttcgttgtgcagactcccctagatcaccgtcgtactttagagaatttcgtccctcctgcattagacgctggttgttctattgtcactgacgagacgactgggcttgatgacgtcgatatggtctactcaagaaggccatctacaattgggctggatagagccctgggcagaactaggagtctctcatctcaatcttttgaaaacgaaatgtcacctgcgcacccaagatctcccaacgaacacggttcaagattgctaaggttttattcctacgctgacatgctatctgatgacaacaacatcaacaacaatagcaactccacagtaacaccgtcttcagcaaaccccctgagaagaccgcctatgcaaaatcactactcgttttcgtcatcaattatgaatacgccttctcacttgccttcacccccatcagcttcggcgtcacccccacaacacatgggctttaccaaccctttcatcatatccagacgctactctaacacaacgaccaataatgccagtggggttagcagcggcggcaacagcgctggcgccgtgctatcaagatcgccatcaaaccagcaatacctgctgaaacaacagaggtcaccctcaggcaccgtccattcgagaagaaacagcaacatgccaagcagtgctacaaacatcatgactgggaagcccaaatccaagttccatatcgagtccagtggcagtgaaggcttttcgtctgaagaggaggacaacgatgcaattgtaagaggcaaacttcatctgaagcaaaaactagaatcgcagctggctccgtcaccatcaattgctgtcaacacaactaatcataataataacaacaataataataaccacaaaaacaaccctgcgttttcaaactcaaatccaagctcgaaatcaaattcgaactctacaataaccgccatgaacccaagcgcagccaaatag

SEQ ID NO: 1216 - DNA, 942 bp, Saccharomyces pastorianus
atggtagaccaatggacaccattgcaaaaggagatcatctcaggcttgaccgcggggtccataaccaccctggtagtgcatccattagatttacttaaggttcgtttgcagttatctgccacgaatgcgcaaaaggcccattatggtccacccacggtggtcaaggagatcgtacgttcatcggccaataatagatatcgtacactaaaggtgatcaatgaactataccgtggactaaccataaatctgttcgggaatgccattgcatggggggtttatttcggattatatggcatcagcaaagaactgatatacaagtcagtggcagggcccgagcaaatccagcataaaggcgctaacaatgaccacaagatgaattcgcttatctacttatctgctggcgctgccagtggactgttgacggctatcttgacgaaccctatctgggtcataaagacaagaatcatgtccactagcaaaactgcccggggctcttacacttccatatacaatggtgtccagcgattgctacgaaccgagggcccacagggactgtggaagggtattgttcctgcactatttggtgtttcgcaaggcgctttatattttgcagtttatgatactttgaagcaaagaaaattgcgacaaaagggcggcgttggcgagaataaccatttaacaaactttcaaaccattgaaatcacctcctttggcaaaatggtatctgtcactttggtctaccctttccaattactaaaatcaaatttgcagagttttagggcgaatgaacaaaacttcaagttcattcctctaataaaactgatcgtttccaatgacggcttcctgggactttataaaggtctgtctgcaaacctagtacgagccattccatccacctgcattacgttttgcgtgtatgaaaatcttaaacataggctctag

SEQ ID NO: 1217 - DNA, 2871 bp, Saccharomyces pastorianus
  modified_base (2478)..(2536): a, c, g, t, unknown, or other
  modified_base (2590)..(2637): a, c, g, t, unknown, or other
atgccggaacaagcgcaacaaggagaacagtctgtcaagagaaggagggtcactcgagcttgtgacgaatgtagaaagaaaaaagttaagtgtgatggtcagcaaccgtgtattcattgcactgtatactcttatgagtgtacatacaaaaagcctacgaagaggacgcagaactccggaaactccggaatgctggcactaggcgatgctgctggtccatcatcaagtgttgtcgtggctaccgctgctttgaatccgaataaactactttcgagtgtcaaacctgagaaacctccgttaccaggttcttcaacaatacccgcaagcagcaacatgtccaagccaagaaggtataagaccaagagtactagactacaatcgacgatcgacaagtataagcaagtccttgatgaggtattcccgcagttgcctgatatagataatctggatgtccctgtatttttgcaaattttccacaattttaaaagggagtcgcaatcattcttagacgacactgtaaaagagtacattttgattgccaacgacagttcgtctccaatccagccaatgctctcttcaaattcaaaacattcaactccagacgagtttctacccaacttgaaaagcgactcgaatagtgcctctagtataaacaaggaacctgacaatatagacacgtactccaatattccagtaggtagggaaataaaaatcatcttacctccaaaaccgatcgccctacaattcgtaaaaagtacctgggagcactgttgtgttcttcttagattctatcacagaccatcgtttattacacaactagacgaattgtatgaaacagatccgaacaattacacttccaagcaaatgcaatttttgccgctatgttacgccgcaattgctgtgggagcattattttccaaatctatagtctccaacgactcttcgagggaaaaatttttacaagatgaaggttacaagtatttcatagcggcaagaaaactaattgacataacaaatgcccgtgacttgaactccatacaggccattttgatgctgtttatatttttacagtgttctgcacgtttgtcaacatgttacacttatatcggcgtggctatgagaagcgccttaagagcagggtttcataggaaattgagtgcaaattctggttttaccccaatagaagttgaaatgagaaaacgtcttttttacaccatctataaactagacgtttacatcaacgcaatgctaggtttacctagatccatatctccggacgattttgatcaaactctacctctggatttatcggacgagaatattacggaagttgcatacttacctgaaaaccaaaatgccgtgttgtcaagcacagggatttccaatgagcatacaaaactcttcttgatcttgaatgagatcatttctgagctgtatccaataaaaaaaaccaataatatcatatctcatgaaacagtcaccagtttggagttaaagttaagaaactggttagattcattgcccagagaactaatgcctaatgccaagaatattgatcctgaatacgaaagggctaatcgtttattacacttatcctttttgcatgtccagatcatattgtataggccttttattcattatttatcgcgtaatatgagtactcagaatttagatcccttatcttaccaaagagcaagaaactctattgctgtggctagaacagtcatcaaattagcaaaagagatggtcagtaataatttgttaacaggttcctactggtacgcctgttatacaattttttattccgtcgcgggccttttgttctacattcatgaggcacaacttcctgataaggacagtgctagagaatattacgatattttgaaggacgcagaaactggtagaagcgttctcattcaattaaaggattctagtatggctgctagtagaacttataatctgttaaatcagatcttcgaaaaattgaactcaaaaactatccagctgactgcattgcaatcatctctctctagcgaaagtggttctttggcaactaatagcacctcggcccttggatgtggtccaggggaatctttacaaccgcccgtgttcttctcttctcaagacacgaagcacggtctttcgacagggaataatgatgaaagcacgaacgattacacaatggcgaattatttaaacaatacgccactctccgaaattcctctaaacgaagcgcagcagcaagatcaaatgcctcaaggattgactaatacatctaatgaaagaggttctaacagctttctttcaaccgatattgcacttgatgataaccaccaacgaaatatgcttgatgctacagatgacgttttaatcagaaacgatgacgacataacaggcaacagtgcatttgattttgacagtaataaaaacgatgtatcaaatagctccaatccagttatcacaaacgacgacgatgannnnnnnnnnnnnnnnnnnnnnnnnnnnnnnnnnnnnnnnnnnnnnnnnnnnnnnnnnnccaacaacaacaacaacaacaacaacaacaacaacaacaacaacaacaacaacnnnnnnnnnnnnnnnnnnnnnnnnnnnnnnnnnnnnnnnnnnnnnnnnaacttccgcatgagtattgacaacaattcaccatcatttgaaggctttgctcaatggcagaggccaccttcacgagataatatgagcatagaagacaaagcagatacctcacctgataccgaaattaagagtgagcaaaacggaaccgaatcaaataatattcttggcgtatttgatcagctagatgctcaactttttgggaagtatatacctttaaactatccctctgaatga

SEQ ID NO: 1218 - DNA, 3093 bp, Saccharomyces pastorianus
atgacaccagatgagctaaattccgccatcgttacctttatggccaatctgaatatcgatgattctaaagcaaacgacacggctactgtggtcacagagtccatagttcacagatcaacaaaactgttggaagttgtcgttgcgctgaaggagtattttctttcagaaaatgaattagaaagaaagaatgctttgacgtgtttatccactattttggtcaagatccctaacgaccacttgtcaaagaatgaatgttcagtgattttccagttttatcaatctaaattcgatgaccaagcacttgtaaaagaggtattagaagggtttgctgcgttagccctaatgaagtttgtctccattaacgagataacccaacttttaaggctattgctagacaattaccaacaaggccagcatctggcatccgttagactcttgccttttgaggttctaaaaaacatatttgatagattcttcgtcaacgcgtcgtcgattggacaagttaaacggatcaacgatttatttatcgaaacgtttcttcatatcgccaacggtgagaaagatcctaagaacttattactatcatttgcattgaaccagtctatcacttccaacttacagaacgtggcgaatttcaaagaagacctttttgatgttttgttttgctatttcccaatcactttcaaaccaccaaagcatgatccttataaaatttccaatcaagatttgaaagccgcgttgagatccgccattgttgcaacaccattatttgccgaggatgcatatagcaacctacttgacaagcttactgcttcttcaccattggtgaaaaatgatacacttttaacactattggaatgcattagaaaatttggtggttcttctatattagaaaactggaagctactttggaatgctttgaaatttgaaattatgcagaacagcgaaggaggcgaaaacactctactaaatccacataatcaggagaaatcgaatgacatgggcgaatatactaattacgaagcttgtttgaaaattgttagtttgatgggactgcaactatacgattttgacaaagtatcgtttgagaagttcttcaatcatatcttagacgaactaaaaccgaactttagatatgaaaaagacttaaagcaaacctgtcagattttgtctgccattggtagcgggaaattagaaatattcaatcaggtaatttcctccaccttcccgttatttttgaataacacatcagaaactgccaagttaaaactgttaattatgaacttgtcattcttttttgactcatatattgagctatttggaaaaatatctacagatctccccgaaaagtcagtaccaaataataaactggctgaatacaaggatgagataattatgattttaagcatggcattgaccggtagctccaagtcggaggtaactgtgagaacactttctgtaatccagtttacaaaaatgattaagatgaggggatttttgacaaaagaggaggtttcgttaataattcaatatttcacagaaacagtattaactgatagtaataaaaacatatattatgcctgcttggaagggttgaaaacgatcagcgagatttatgagagtttagtttttgaaatatcattgaaaagactattagatttattacctgattattttggcgaaaatattcgtgtaaatgatgaagaaaatattcagattgaaacaattttaaaaatcatactcgatttcaccacctcgaggcatattttggttaaagaaagtattagctccctagcaaccaatttgaatactgtggctaaaatttccaaatccaaagaatactgctttttgttaatttcaactatctattctctttttaataataatcaaaatggcaatgttatcaaggaggaagatgctctctcgctcaaaagagccattgagcccaagttatttgagataatcacccaaaactctgccgttagggatgacaattacaatttgaccttgttatcgaatgtcttattctttattaatctgaaattgccacaaggaatacatcaagaagaactggacaagtacaacagcattttcatttccgaaggaaatataaaaatattaaatgcaccaactttgctgattattccatatgtcaaaatcttgtctgccatgaacaagtcctgtatatttcctcaaaagttaaatattcttactgaaaccatccaactattgagaacacatggctcaataatgacagaaaccgagaaattaggatatttggaactgctattagtcttatcgaataaatatgttcccgaaaagaacgtaatagaattattagattggaatgatctatcactgatcaatctagaaataatgatatggttgagcaaaggcctagtaatgcaaaactcttcaaaatcctccgaaacggctaataactttatcggtttattgtctaatgaagaaattggttcatttgtggcaagactatttgaaatatttgttgttaacattagttccctacagaaattcaaaggaatcaattggaataataatgttaaaatattgtacaaacagaaatttttcggtgatattttccagactctagtcaataactacaaaactactgtggatatgaacgttaaatgcaattacctgactgcgttatcgctagtattgaaacacactccaagccagttagtgggtccgttcattagcgatttgtttccacttttattgcaagctttggatatgcctgattctgaagtaagagtatccgctttagaaaccttaaaagacactacggataagcatcataaactaattacagagcacataagtacaatagttccattatcgttatcccttgttcttccgcaaaaatataataatgttaatgtcaggttgatagccttgcaactgttgcaaatgattaccattgtggtcccattaaattattgcctaacttatcaggatgaagtgataagcgggctagtgccggttttatctgataagaaaagaattgtaagaaagcaatgcattgatacaagacaagtttattttgaattgggtcaagttccattcgaatga

SEQ ID NO: 1219 - DNA, 621 bp, Saccharomyces pastorianus
atgtcattctcccttagtgaagcgtcagaattccaagcaacttctgctgttaatgggctgctgttgagtcttttgcccggcgttcctaaagtcagagctaatggtggtaagaaaagggtgaataatggatctaaagctcagttgatcgatagaaacttgaagaaaagagtggagttacaaaatcgagatgttcataaaatcaagaaaagatccaaactagccaaaaagaaacaggtcaaggtacataagcacgataaagagcgactagagcaactggcgaagtatcaggtgttgaaaaagcatcaagaagaaggtactttgactgagcatgaaaggaagtatttgaataaactaatcagaaggaactcacaaaatttaaggtcgtgggatttagaagatgaagtacgagatgagcttgatgatatccagcaatacatcttaaaacaaacagtctcgaccatgaaggcggacagaagtcaaagaagaaggtctaagaagaagcagtttaaagaagacattaaacagagcgattctgctagagaccataggtacccaggtttgacaccgggattggcccctgtaggattaagtgacgaggaggactccagcgaagaagactaa

SEQ ID NO: 1220 - DNA, 3045 bp, Saccharomyces pastorianus
atgctaagattagtgtcttcaccatcatgccggtacacttctagaagactgttaaaaacctccatcctgaaaaatgcatcaactgtgaggaccgctagaagaagattggctactactggtacagataattttctatcgacttcaaatgcgacttatatcgatgaaatgtaccaagcttggcaaaaggacccatcttcggtccatgtctcttggaacgcatatttcaagaacatgtcaaatccgaagataccagctgcaagcgctttccaggcccctcctagtatcaccaactttactcaaggtactgaggccgctcctttagggaccgcaatgagtggttctctggatgaaaacgtttcgatacatttaaaggtgcaattgttatgtagagcttatcaagtaagaggtcatttgaaagctcatatagatcctctagggatctcattcggtagtaataaaagtaatcctgttccaccagagttaaccctagactactacggtttcagcaaacaagatctcgaaaaagaaattaatttggggcctggtatcttaccaagatttgccaccggcgggagacccaaaatgactttgaaagaaatcgttgatcacttggaaaagctatactgctcttcttatggtgtacaatatacccacattccatctaaacaaaagtgtgaatggttaagagagagaattgaaatccctgacccgtatcactatactgtagaccaaaagagacaaatcttggacagattaacttggtccacttcatttgaatcattcttatctacaaaatttccaaatgataagagattcggtttagaaggtctagaaagtgttgttccaggtattaaaactctgattgatcgttctgttgaattaggagtggaggatattgttttaggtatggctcaccgtggtagactaaacgtcttatccaacgtggtacgtaaaccaaacgaatctatattctctgaattcaaaggttccagcgctcgtgatgatattgaaggatcaggtgatgttaagtaccacttgggtatgaactatcaaagacccaccacctcaggtaagtacgttaacttatccttggtggctaatccatcccatttagaatctgaagatccggttgttcttggtagaacaagagctttattacacgcaaagaatgatttgaaagaaaagacaaaggccctaggtgttttgctacacggtgatgctgcgtttgcgggtcaaggtgttgtttatgaaactatgggatttttgactttaccagaatactctacaggtggtaccattcatattatcacaaacaaccaaatcgggtttactacagatccaagattcgcaagatctactccatatccgtcagatttagccaaggccatagatgctccaattttccatgttaacgccaatgacgtggaagccgtgacatttattttcaatttagccgcagaatggaggcacaaattccacactgacgccatcattgatattgttggctggaggaaacatggtcacaacgaaaccgatcaaccttcattcactcaaccattaatgtatcaaaaaattgctaagcaaaaatccgtcattgatgtttacactgacaaactaatcaacgaaggctcgttttccagtaaagatattgacgaacataagaaatgggtatggaatcttttcgaagacgccttcgaaaaggctaaggactacgttccatcccaaagagaatggttaactgctgcttgggaaggatttaaatcaccaaaggaattagccactgaaatattaccacatgaaccaaccaatatttctgaaaaaaccttgaaagaattaggtaaagttctttcctcatggcctgaaaacttcgaagttcacaaaaatttgaaaagaattttgaaaaatagaggcaagtctattgaaactggtgagggtattgattgggctactggtgaagctttagcatttggatctttggtcttggaaggccaaaacgtcagggtatctggtgaagatgtagaaagaggtacattctcacaacgtcatgctgtcttacatgaccaaaagtctgaagccgtctacacgccgttaagtactttgagtaatgaaaaggccgatttcacaattgccaattcatcgttatctgaatatggtgtcatggggttcgagtatgggtactcgttaacttctccagattacctggtcatgtgggaagctcaattcggtgattttgctaatactgcgcaagtcatcatcgatcaatttattgccggtggtgaacaaaaatggaagcaacgttctgggttagtcttgtcattacctcatggttacgatggtcaaggtcccgaacattcatctggtagattagagagatttttgcaattagccaatgaagatccaagatatttcccatcggaagaaaagttacaaagacaacatcaagactgtaatttccaagtcgtgtatccaactacgccagccaacttatttcatattttaagaagacaacaacatcgtcagttccgtaagcctttggcgctattcttctctaagcaattgttacgtcatccactagccagatcctcgctatctgagttttctgatggtggattccaatggataattgaagatgttgaacatggtaagagcattggcacaaaagaagaaaccaagagattggttttgttgagtggacaagtttacacagcattgcataaaaggcgtgaaaccttaggcgataaaaccactgctttcttaaagattgaagaactacatcctttcccattcgctcaactacgtgactctttgaactcttatccaaacttgaaagaaatcgtttggtgccaggaagagccattgaacatgggttcatgggcatatacagaaccaaggttacataccacactgaaggaaacagataactataaaagtttcaaggttagatattgtggtagaaacccaagtggtgctgttgccgcaggtagcaaggcattgcatgtggtcgaagaggataatttcttgaaagatgttttccaacaaagctga

SEQ ID NO: 1221 - DNA, 897 bp, Saccharomyces pastorianus
atgtcacagttagaatcacaacctaagaagattgccgtcgttacgggtgcctcaggtggtatcggatacgaggtaacgaaggaactagccaggaatggatatatggtctatgcttgtgcaagaagattagagccaatggagcaattgtccttgcaatttggaagcgatatcgtcaaaccttacaagctagatatttctcagccggaagagattgtaacctttgctgggtttctaagaaatacattacctgagggtaaactggatttgctgtacaacaatgccggtcagagttgtacttttgccgcagtggatgccactgatgctgtagttgaacaatgtttcaaagttaatgtgtttggccatattaatatgtgtcgtgaactgacaaagttccttgttaacggtaaaggaactatcgttttcactggttctcttgctggggtgctaacattccccttcggtagtatctattccgcttccaaagctgcaatccaccaatatgcccgtgggttacatctagaactgaagccgtttggtgtaagagtcatcaacgccattactggcggtgtggccaccgacattcatgacaaaagacccttacctgaaacttccatatacaattttcccgaaggtagggcagcctttgattcaagaaaaactatggccagagacaacaagcccatgtcggctgaagcttacgccaagcagctagtcggggacattttgagtcgcaaggacccagtggatgtttacaggggtgcgtgggccaacctcatgcgtttagtagtgctatttgttccctactgggtattggaaaggggactctctaagaagttcaaactagacaaagtcaacgatgctctgaagttaaaacaaaggaaaagtaaggacgattag

SEQ ID NO: 1222 - DNA, 1395 bp, Saccharomyces pastorianus
atgaaattttcaactgccgttactacgttgattagttctggtgccatcgtgtctgctctcccacacgtggacgtgcaccaagaagatgcacaccaacacaagagagccgttgcttacaagtatgtttacgaaaccgtcattattgactctgacggcaacacagtgacccctagcgttgctgaaactgcttccgctactgcttctgctgccgccaccgccatcaccaccacctctgttttggctccaaccagctcagccaccgccatcgctgtttcgtctgttattgtagccaaggacgaaaaggtctctactgctgcctcatctaccgcttctcctcaagctactccatctacaactacccctcacactgtttcatcttcatccgctgctgcatcttcctctgccgcttctgctagtgcttcatcttctgctgcttcttcatcatcctctgctgcggtcaaatccagtgcttccgtcacttcttcatccgcggcccactccagtgcctcttcgtcgtcttctgctccacagtccacctcctcttcctcttcctcttcctcttctggaagtggtagtgtctatggtgacttggctgacttctcaggtccaagcgaaaaattcaaagatggtaccatttcctgtgacaaattcccatctggtcaaggtgtcatttccattgattggataggcgaaggcggatggtccggtgtagaaaacaccgacacttccactggcggttcgtgtaaggagggttcttactgttcctactcctgtcaaccaggtatgtcgaagacgcaatggccatccaaccaaccatccgatggtagatccgtcggtggtttgttgtgtaagaatggctatttgtaccgttcaaacactgacaccgattacttgtgtgaatggggtgttgaagccgcctacgtcgtttctgaattgagcgaaggtgttgccatttgcagaaccgattacccaggtactgaaaacatggttatcccaacctttgttgaaggtggtagctcgctgccattgactgttgtcgaccaagactcctacttcacctgggaaggtaagaagacatctgcccaatactacgttaacaacgcgggcgtctccgtggaagatggctgtatctggggtacttcaggttcagggatcggtaactgggctccattgaactttggtgccgggtcgactgacggtatcacatacttatcgttgatccctaacccaaacaatggcgacgcattgaactacaacgtcaaaattgttgccgccgatgattcatctaaagtcattggtgaatgtgtttacgaaaatggtagttactctggcggttctgatggttgtaccgtttctgttacttccggtaaggctcactttgtcttgtacaattaa

SEQ ID NO: 1223 - DNA, 1059 bp, Saccharomyces pastorianus
atggaacgagagccacataaccaatccgaagaagaaaagaaaccgacagggccaatggctgctgagggaggacaccactcctcatcgtcttctggcactacaatggtagccggtgtggccgaggagagcgttagcaggagaacgacagggccatcacaaactaagaggtctttactactacgaataaagctcttgaaacagcttgggattaacgatatccaggagatagatgtatgtgatgcgaacctggtggaccggttcctaagcatacgattggtcaatgacacgaaagagctggagaagatacgtgattcaaatctcaccaaactaaaccagattattgataaatgtgtggagagcgacaacatcagcgatcctacactgaacaagattcttgacatgaccataagcagagagatcaacaatgacaacagtaaccacctcacggtaccgtcgccgacaatgacgaagaaacggaaggcgggggcatccgaactggccagtccccgaggccacagaaggtatagatcggacatacccactgtatcagaagtggatgcgggtgtcggttacccacaaatgcatcagcaaccgggcgcatacacgctgccggtgcctgcaaaccagtggatggggaacccatatatgcaacccccacaacaattgcaggcgctccctccacagtacctatatccgccgggtatgggaccgcaacccccgctgcccacgatgaattcaaaccccgagtcccagacacccgtgatgagctcgcaatatctctctttaaaccagcatggcctttaccaacaaaatatgagggcgcaccccctcatgaatatgggcccccaagcaaatatatatggccagcagcagccacaacagccgcagcctgcacatgaacgcgacccttcaagaaaaagttccactcatagaagatcacaaagcgccaacatttccatggcgaacttccggtcacccatgcggaattctcaacacggttcctctcaaagacccgttaattttttaattcacaccccgaaacatcctccccccacgtga

SEQ ID NO: 1224 - DNA, 1182 bp, Saccharomyces pastorianus
  modified_base (681)..(760): a, c, g, t, unknown, or other
atgtatttggaataccttcaaccaaaatttaacgtaatggatgaatcgaacaccagaaagaaaagtttccccggttactcaccgaacctaaccactcccattacttcaaacttcaatgaagaaacgggttccgattactctttgattacctcaaggagaatttccggctcgaattcaaattcaaactcgaactcgaactcgggatccattgatgaaaacgagccaactcattctaattcatcttcctcttcagcaagacagattagaaaaaaatggaaagaacctgaagacatagcgttcattactacaataatgaataactctcagctattgacattcgtagagtattttaagccaatgaaaaacttttggaaaaagatctcaaagatcttatttcaacaatatggatatgaaagaaactcccgccagtgtcatgacaggtttaaggtcttatactcaaaatctttaaaagtacatccttcaaagaaaataaaacagaagaagaagaaatcaaaacaagagacagactcgaacttcaacatcgacgcgccgaaattatcaagaatgcagtttttactactacagttacaaaacacctttagctttgtgaatggaaacatcatcctcaaatcgcaaaaaactttgaggccagccaaaaatactacccacgacacaataacnnnnnnnnnnnnnnnnnnnnnnnnnnnnnnnnnnnnnnnnnnnnnnnnnnnnnnnnnnnnnnnnnnnnnnnnnnnnnnnnctaatgttttaagtacgccagagcacattcggtccagcatgaatattgataagctagaatctgtaccagatttagatgctaaagtagaaccctcattcatcagtcctattcaattttcgttattgtcatcagcaccaactgacaatttgattctgcaaactcctccatcgcctttctttcagcaaacaatgcctttacaactaccgcgggatccacaacagcaagaacaaatatcttcagtgctcactacggatatgatctacatgtggcagacgatgttcaatactattgaaaatttaaaagaacaagttaacgatttgaaaaacgaagtaaagcaactaaaccgtaagttttatcaacaaaataaaccgctacaaaatttttcaacgtcgaattcagactcctttatgcaacaacactaa

SEQ ID NO: 1225 - DNA, 699 bp, Saccharomyces pastorianus
atgacatttttatgtgggtcagcttcaacatcaaataaaccaatcgaaagaaaaatcgtcattctaggtgatggtgcctgtggtaagacctcgttactgaacgtcttcaccagaggttatttcccggaagtgtacgaacccactgtttttgaaaactatattcatgatatctttgtcgacagtaaacacatcacgctatctttgtgggatactgccggccaagaagaatttgacaggttacgatccttgtcatattcagatacccaatgcataatgctatgtttcagtatcgattcacgcgattccttggagaacgtccagaacaaatgggtgggtgaaattactgaccactgtgaaggcgttaaattggtcttggttgcgctgaaatgcgatttgagaaacaatgaaaacgaatcgaacgctatcacaccgaacaatatccaacaacaggacatcaacgtttccagtggcaacaacaacaacataaacagtaactctaatgctaagaatctaataagctatgaagaaggccttgccatggctaagaaaattggtgcattgcgttatttggagtgtagtgcaaaattaaataaaggtgttaatgaagcattcacggaagcagcaagagttgctttaacctcagggccagtagcaactgaagcgaagagcgacgatggatccggctgtaccattatgtag

SEQ ID NO: 1226 - DNA, 615 bp, Saccharomyces pastorianus
atgaacatatacacatcgcccacacgggcatcgagcaccgcgaggccctatctgcctgcactggccaccgagagcaggagcacggataacagcagcatagacgataactgtgaggctgtaccgtgcctaagcatggaagtgtgcaaagtgtacccgaagggcccgctgcttgtgctcccggagcgcatctatctgttctcggagcccacggtgggggaaattctgccctttgatgtagttattaacgttgccgaggagacacaagacttgcagacgcaggtgccctccatcgagtactatcactaccggtgggagcacgattccgacatcgggacggatctggccttgctaaccagcatcatgcgcacggccgcagcggagcggaagaagatactgatacactgccagtgtggactgtcgaggtccgcgacgttggtaatcgcgtacatcatgaagttccaccacttgagcctaaggcgcgcttatgacctgctgaagtccagggcagacaagataagccccgccatggggctggtgttccagctgatggagtgggaggccgctctcaaggctacacccagcgcgcaggctagcgattatagaaaactaccttaa

SEQ ID NO: 1227 - DNA, 3240 bp, Saccharomyces pastorianus
atgagcgaccccaatacaaaacagccgataaagaaaaggtcgctgagcagctacctttcaaacgtcagcacgaggcgggaggagctggaaaagatatccaaacatgaagtcccggaagatgaagaacccgctagcaaccagaaatcagaagagccggtgccagaagaatcagtttcgggggttcaagataccaacaggccgctcgacacagaggctgtatccgttagtggctccattgaagatgactcaaaagaaagtacagctctgacccaacaggataatgaaggggatggaaaggcaaacccatatgatcaagaagatagtcttttggagacggaaggagaaaccaatcactcaacgcgaacggccgccatattgccgtccaatgcaggaaatctggatattcaaaaccaccaacctttttcaagagatcaactgcgagcgatgttgaaagaaccgaagaggaaaaccgttgacgatttcatacaggaagagggcttgggggccattgaagaagatgatataagcgacgaagtgctagaaaataatgtaatggccccaagcgaaggggaaatggatatagagtatagtggatcggatagagatacggatgatgtggaaagtgatgaccccacagcacccaactctccaatcaaattaagtcgccgcaaattagtaagggccgaccaatatgatactaccacaggctccatgttcaataacgaatctgactctgaactatcagatattgatgataccaaaaatattgctttgtcgagtagtttgttcagaggtgcttcgtctcccattaaagaagcaaataataatcttcatagtatgaattcctcacctgcgcagattgtaaagagaaactctatttccaagactaatactaataagaatcctcatatagccgtttctaaacgtcctaaacagaaaaagggtatttatagagattctggtggtagaacgagattgcagattgcttgtgataaggggaagttcgatgtagtccagaaaatgattgaagatggaggctatgatattaacgaccaggataacgctggtaatacagctttgcatgaagcagctttgcaaggccatattgaaatcgtggaactgctgatagaaaatggtgcagatgtaaacattaagtctatcgagatgtttggtgatacccccttgatcgatgcctccgctaacggtcatttggacgttgtcaagtaccttcttaaaaaaggtgccgatccaactatacgtaactccaagggcttaaccgccttcgagtcggtcgatgatgaatctgaatttgatgccgaggaagaccaaaacattttgcgtgaaataaagaaaaggctgagtgttgccaccaaaagatggactcacggtacaggatatcataacgacaaacccaaaaatgtcactagtacttacacaacggaccgaccacatttggatattactaacctttctgaagacagaaacgcccatgagtcctctcctatgctctctaatgttgacgataagcctccagaagaagagttttattggactgatgtcacttctagggcaggtaaggaaaaattgttcaaagcttcaaaggaagggcacttgccatacgttggtacatatgtcgaaaatggtggtaagatagatttaaaatcgttttttgaaagtgtcaaatgtgggcatgaggatattacaagtatttttttggcatttgggtttccagtcaaccaaacgtcaagagataacaaaacgtctgccctaatggtggctgttggacgtggtcatatcggcacagttaaattgctattagaagcaggagcagacccaactaagaaggacaaaaagggacacactgctttgtattatgctaaaaatagcgtaatggggataacaaataacgaagaaattcagttgattgaaaaagccttgaacgaacacctaagaaaacgttcgaacgatgacgatgatgacgatgacgaagatgatggtgacaatgaaaaagataccagtgaactacacgaaaccaggagagagaaaacacaatcacctgtactaacaagtcgaaaaagtacaatctccaaaatagaagatgaagaggacgaagtagtaatacgtaattctgcacacgatggcattaataacgaccacaacatcaagaatatcccaccttctgattttcgtaaaacgcatggacttgatgaaagtgatggcattcagtatccacttgattggaagaagcgtaagacgattgtttctcaggatgaagacaagttaagaagtgtttcaccactttctatggaatctcattctcctaagaaattcaaatctacagaagtcaatcccattcacgaagaaactgctgccgagagagaggctagactcaaagaggaagaggagtacaggaagaaaagattagagaaaaagagaaagaaggaacaggaattgttgcaaaaattagccgatgatgagaagaaaagaatcgaagaacaagagaagctgaaaatcctagaaatagaaagattgaagaaggaaacgatagaaaaagccaaacaaatggaaagagagaaaaaattggaggaactttcttatagacgtgctgtaagggacttgtatccgttaggtttgaaaatcatcaacttcaatgataaacatgactacaaaagattcttaccgctgtactattacgtggatgaaaagagcaataaattagtgcttgatttacaagtggcaattttgttaaaaaatatggatttgctctcaaaggatggacattcaatatcggagaaatttcctgttgatccaacccacttggcctccctttggaatatgttgaaattcattttcttgtatggaggtagttacgatgatgataaaaatgacttaaaggacaataaaaggttcgtagtaaatttcgacggcgttgatttggatactaagattggatacgagcttttagaatacaggaaatttattaatttgcccatggcatggatcaactgggatgaagttgtaattgacaatcctgcgaaaaaaaaggaaattgaacaaagcatgattcaaatatcaataattgaagccagacattcccataacaatataagcaaagatttgcaagtagcctcacggaaaagacgcttcatgaaaatgcccccagaattgccggttaaatttcaacatcgtatgagcatatccactattcttcaacaaaccgctaaagagccgttttggtag

SEQ ID NO: 1228 - DNA, 2787 bp, Saccharomyces pastorianus
atgtcccaccacaagaaacgtgtttacccacaggcccaggtcccgtacgggcagagcgccacccctctgcaacagccagcgccattagtagctccccaggacccggcagctgcagggatgaactatgcgcagatggggatgccaccgcaggctgcggtggcccccatgggccagccgcaattcctgacccctgctcaagaacagctccaccagcagatcgatcaagccgccacttctatgaacgacatgcatttgcacaacgtgcctctagtcgaccccaatgcctacatgcagcagcaggcccctggacaggtcggcatgccgtttcagcaacagcaacagcaacagccgctaccagcacaagcttacggacagcctagtgctgccatgggccagaacatgagacccatgaaccagctgtatcctatcgacctgttgacggaattgccacctccaatcaccgacttgaacttgcctcccccaccgctggttgtcccaccagagaaaatgctggttccatcggaggtgtccaatgcgtcgccagattacatcagatcgactttgaacgctgtccccaaaaacagctccctgctgaagaaatccaagctgccattcggactggtcatcagaccataccagcacctttacgacgatattgacccgccaccactgaatgaagacgggctgatcgttcgttgtcgtcgttgccgttcctatatgaaccccttcatcacctttatcgagcaaggcaggagatggagatgtaacttctgtcgtctggccaatgacgtccccatgcaaatggaccaaaccgacccgaacgacccaaaaagcaggtacgacagaaacgaaatcaaatgcgccgtcatggaatacatggcccctaaggagtacactctaagacaacccccaccagccacttactgtttccttgtcgacgtctcccaggcttccatcaaaagcgggttgttggccaccaccatcaacactcttttacaaaatctggattccatccctaaccatgacgaaagaaccagaatctccattttgtgtgtggataacgccatccactacttcaagatcccattggattcggataataatgaagaatcgactgaccaaatcaacatgatggacattgccgacttagaggaacctttcttgcccagaccaaactccatggttgtttcattgaaggcttgcagaaaaaatatcgaaagcttattgaccaagatccctctaattttccagtctaatttgatcacaagttttgcattgggccccgctttgaagtcagcttatcatttgattggtggcgttggtggtaagatcatcgttgtctcagggactttacccaacttgggaatagggaaacttcaaagaagaaacgaaagcggtgtcgtcaatacatcaaaggaaaccacccaattactgtcatgccaagactcattctacaagaacttcactatcgactgttctaaagtgcaaattacagtggatttattcttagcttctgaggattacatggatgttgcatcattgtccaatttgagtcgtttcaccgcaggtcaaactcacttctatcctggattttccggtaaaaatccaaatgatattgtcaaattttctaccgaatttgccaaacacatttccatggacctttgtatggaaaccgttatgagagctcgtggttccacaggtttaagaatgagcagattttatggtcattttttcaacagatcctcggatttatgtgccttttctaccatgccaagagatcaatcatatctgttcgaagtcaatgttgatgaatctatcatgaccgagtattgttacatccaagtagcggtactactgtccttgaataacagccagcgtagaattagaatcatcactttagccatgcccaccacagaatccctggccgaggtttacgcatcagctgatcaattggctatagcgtcattctataattcaaaggcagtggaaaaggcattgaactccagtttggatgaggcaagagtattgattaacaaatctgtacaagacatcttagccacgtacaagaaggaaattgtcgtatccaacaccgcaggtggtgctccattgagattgtgtgccaacttgagaatgttcccattattaatgcattctttgaccaagcatatggcatttagatcgggtattgttccaagtgatcatcgtgcctccgctttgaacattttagaatcattaccattgaaatacctaatcaagaacatttaccccgatgtctactcattgcatgatatggctgatgaagctgggttaccactacaaactgaagatggtgaaaccaccgccacagtcgttttgcctcaacctctcaatgctacctcctcattgtttgaaagatacgggttatacttgatagataatggtaatgaattgttcttatggatgggtggtgatgctgttccggctttagtatttgatgtgtttggcactcaggatattttcgacattccaattggcaaacaggaaataccaattgtcgaaaattcagaattcaatcaaagagtgagaaacattattaaccagctaagaaaccatgacgatattatcacttaccaatcattgtatattgttaggggtgcttctttaagtgaacctgttaaccatgcatctgctagggaagtcgcaaccctaagactatgggcttcgagcactttggtagaggataagatcttgaataacgaaagttacagagaattcttacaaatcatgaaagctagaattagtaaataa

SEQ ID NO: 1229 - DNA, 2499 bp, Saccharomyces pastorianus
atgttcaagacagttgatttctcagaaacatctcctgtcccgcctggctctgataccgatcttgcccctacacaatcgccacaccatgtggggtcaagccaggactctaattatgaacttttaccccggggttctgatgataaaattgacgctgaaaaaggtccacacgatgaactttctaagcacttgccattatttcagaaaagacctctgagcgatactcccatatcaagcaattggacctctcctcgaatcactgaagagaataccccttcagattctcctgaaaatagcgctacaaatttgaagtcgcttcatcgactacatattaacgacgaaaccaagttgaaaaaaggcaatattcccatagatgacgtcgccgattacattcctccatctaatgaaacaaatgagatcactcgtattgacttaaaggatatcaaatcgccctccagacatcataaaaggagacccacaacgatcgacgttcctggattaacaaaatctaaaacttctccggatggcctcatatccaaggaagacagcggatccaaattagtcattgttatggtcgggttgcccgctacagggaagtcatttatcacaaataagttatcaaggtttttaaattattctttatactattgtaaagtgtttaatgtcggtaacactagaaggagatttgctagagatcatggtttgaaagatcaagattccaattttttcgacccaaaaaattcggattctaccaggttaagagacaaatgggccatggataccctcgatgaactgctagactatttgttggaaggtgcagggtccgtgggaatatttgatgcgacaaacacttccagagagagaagaaaaaatgtactggccaagatcaggaaaagaagcccccatttaaaggttttgtttttagaatctgtctgctccgatcatgcgttagtacagaaaaacattagactaaagctctttggtccagactataaaggaaaagatcctgaaagctctctaagagattttaaaagtcgcttggcaaattacctgaaagcttatgaacctattgaagatgacgaaaacttgcaatacattaaaatgatagatgtgggaaaaaaagtcatcgcatataatattcaagggtttttggcttcacagacagtttattacttgttgaatttcaatttagctgataggcaaatttggataacaagaagtggtgaaagtgaggataatgttagtggtcgtattggtggaaattctcatttaacacctcgaggtttgagatttgccagaagtttacccaaattcattgccagacaaagggaaatattttatcaaaatcttatattacagaagaaaaatattgaaaatccaggcaagaatctttatagcgacttttttgtctggaccagtatgcgtgcaagaaccatcgagactgcccaatatttcaacgaagatgattatccgattaaacaaatgaaaatgctggacgaattaagcgcaggtgattatgatggtatgacatatccggagatacaaaacaatttctcggaagaatttgaaaagcggcaaaaggacaaattaagatatagataccctggtattggcggtgaatcatatatggatgttatcaatagacttagaccagtgatcactgaactagagagaattgaggacaatgttcttattatcacacatcgtgtggtagcaagagctttattagggtatttcatgaatttgagtatggacattattgctaatttggatgtgccattgcactgtgtttattgtttggaaccaaagccttatggaatcacttggtcattatgggaatatgatgaaacatcggattccttttctaaggttcctcaaacggacttgaataccacaagagtgaaagaagttggtcttgtttataatgaaagaagatattctgttataccaacagctccaccaagcgcaagaagcagttttgcaagtgactttctatcgaggaaaaaatccaacgtagcttcttcgtcatcttcccagaatgatttgtcagatgggcccaaaaatactgttagtgctcaaatcggtagcaataataccaccatcaatgagagtaacagcaacagtaacagcaacaataataataatagcacttctaaaataccattgtctgcaccattaatgactactaatgcttccaataacatcttagatggtggcggtacctccatttcaatccatcgtccaaggattgttccaaacctaaataacgtgaatccactattggctaacaatagtaacgcaatttctaacacagtcaatttgaaaaaatcacaacccacagcaagacaaatgtttgaaatagacaaagttgacgagaaattatccatgttgaagaataaaaactttcagttacatggcaaaaactactctacggagaatgatgatgatgacaacgatgatatcagggaaaaaacaatgactcgcagccaaagtcacgtttga

SEQ ID NO: 1230 - DNA, 2037 bp, Saccharomyces pastorianus
atgtcgaaaaacaatacaatgacgtctgcagtgtctgacctgctgtcacaacagcagctgaatcttcaacacttgcacaatttgcaacaacacacgaggagtatgacttcggcagaccacgccaacgttttgcaacaacaacaacaacagcagcaggcacagagtgcgagctttcgtaatggtagtttgacgtctgctgacataaaccagcagaactatttgaatggccagccagttaattctactagcaactctacgttccaaaataatagaactttaacaatgaattctggagggttgcaaggtacagtaaccaacggtgctcccaacgtcgactcaagtactaatgttaccattgccgctacagaggggaacaataatagctctaagccattacagggtagaaactccttaacaaatacttcactgctttcaagagctagatcctccttgcaacgtcaaagactcaaccagcaacaacaacaacaacaggatcccagatcgccattggtcatattagtgcctactgcggctcagcctactgatattcttgcggcaagattttctgcttggagaaatgttatcaagtcagtgattgtttacttgacagaaattgcttctattcaagacgaaattgtcagacaacaattgagactatcacatgcggtacaatttccatttttttctatcgaaaatcaatatcaaccaagctcacaggaagacaaatcggtgcaaaagtttttcctacctttgggcaatggctcggtacaggacctaccaacaattttgaaccaatatcacgaatctctggcatccagtgcgtctaaggcatcgagagaattgaccaatgatgttatcccccgtttagaagatttaagaagggacttattggtcaagataaaggaaataaaatcgctgcaatccgatttcaaaaattcttgttctaaagaattgcaacaaaccaaacaggcaatgaaacaatttcaagaatcattaaaagaagcacgctattcagtacccaaacaggatccctttttgaccaagttagccttggataaacaaatcaaaaggcaactccaagaagagaattttctgcatgaagcctttgataatttggaaacttcaggtgccgaattagagaaaattgttgttatggaaatccaaaactctctaacaatatatgcaagattactgggacaagaagcgcagttggttttcgatatattaatatccaaattggactctggatttttcaatattgattcacaatttgaatgggataatttcatttcaagagatcccaactttctattacctaacctgccaatgagaacgttcaaagaaattgtttacaagtatcaatttgatccattaacctatgaaatcaaatctgggtttttggaaagaagatcgaaatttttaaagtcctactcaaagggttattacgttctaacaccgaatttcttacatgaattcaagacggcagataggaaaaaggatttagtcccagtgatgtcattagcattaagtgaatgtaccgtgacagaacattccagaaaaaacactacatcatcaccaaattcggctggttcggatgctaaatttgtgttacacgccaagcaaaatggtataattcgtcgtggtcataattgggttttcaaggccgactcttatgaaactatgatgtcttggtttgataatttgaagatcttgacatctactgcaagcttacaagacaaatataaattcatcactcaaaagttgaacttaaattcagatgggaaacctaaagcaaatgataataaccccggtaacgtcaagtaccaacaaaataacactaataacacaacgatggaaaatgacgaaaacgatgatatgaacagtaattatgtggagtccacaatcacacccaaattggacaatcaaacaaacacaaacacatccatgtcgtcattacctaacaccaacgattctgaattacaggatcaagttcccaatatttatattcaaaccccaataagcgattttaaatcataa

SEQ ID NO: 1231 - DNA, 1524 bp, Saccharomyces pastorianus
atgataacaccgagattcagtataacacaggatggagagtttttattccttaaaatattcataagtaatattaggtttaatgcaacagggttagaaatcgtcatccaggaaaacatggtcgtcttccatttatcgccatactatttgagattgagatttcctcacgaattggttgatgatgagaggtctacagcacaatacgattccaaggacgagtgtattaacgtgaagataggtaaattgaataaagatgaatattttgaagatctagatttaccaacaaagttattggccaggcaaggcgaccttgtgggtgctgatgcattggctgaagcccctgatgaaaacaaaaaccacaaaccacttattcaagagatcggtggcgatgatacgaatattaagcccacggaagatgtgaaaactattggccaaatgggggaaggtttcaactgggagatagaacaaaaaatagattccactttggatgatggactattgaaaacgaaatacgggttcgataacttgtatgacaccgtaatatccatatcaataagtaacggaaacgatatcaatgagctagacgatcctgaacatgctaaagccaacgatagggtcattgaaaggctgagaaaggagagcttaaaatttgaccctgagtattacgtttctgaacacatgactaacaaatacgggaatgaagaagattcagaaattaacggtatcaaagaattactaaaatatacgccctccattgtcaagcaatacttgaaatggtacaaggactgtccgaacccaaatcttgtcatgccagtagagtttactgacaaggaacaaaagcagatgcaggacaacttacccaagaaaacttacctcgtggaagatgtcaaaccactttacgtcaccatactcaatattctttttagttacatgtttgaactgattgaaaacgaaggcacgcatactactgaaagcgcttggaccatggggaagttatgcccgcaaatatcgtttctagatcaacaactgaagcagacaaatgaactgcaggatggattgaaggagatatccgatgaaagcaaagacgtttctatcatcaagcttgccatcataacgggtatcaggagagctctaagctacccgctacatagaaattacgacttggcaatgaaagcgtggacgtttgtgtactatattctacgtggtggtaagagactggtcatacgagcattattagacattcatgaaacatttcgtttccacgacgtgtattacgtctacgaaaaagtacttctgggtgatctcacctcgtggttcatctctcagggtagtgaaaacgtcataagaagtctggccctggagatgagaaaagaacaagactcgattaacaggcaggatatcgaattcgaatgcattgcttcgttcaacgaacaaactggcgaaccagagtgggagacactgagcatcagggaaatggaaatccttgctgagtctgaatatcagcaacaacagcagccccagcaatga

SEQ ID NO: 1232 - DNA, 1011 bp, Saccharomyces pastorianus
atggctagaaaactcaaaggaaagatcggcagtaaaggcctgaaaggtgcattactaagacatcaagcaaagattaaaatggtaaaaaaaatagaaagcaagcaaaagcatgaattgaagaaaaaaacccctaatactaataacaaaaaagtcaaaaaaaaccaagaattacaaaaactcagtcaggaaaaagttataccttttgagaaaactgaaactttaatgctatgtggtgagggagatttttcttttgcaaagtcgattgtggagcaaggctatatagaaagtgggaatttgatcataacaagctacgacaattctgtgaatgagctgaaactgaaatacccacacacttttgaggaaaattatcaatttttaaaagatttgaatattccaatgttcttccaaattgatgttaccaaattagtcaagagcttcaaaatctccagaaataatacttggtttcggacaatcaacagactcagtgatcataaatggggaaataaacctttacaaaatatagtttttaacttccctcataatggtaagggtatcaaagatcaagatagaaatataagagagcaccaagacttggtttttgcatttttcaaaaactctttacaactattcaatctcataaacacaaaagttcaagatgatgcttttcgttatacacagggttatgatcttaatgagaacaccccgcagtccaaaaaactaaccaatgaaggctatggcaatatcatcttgtctgtttttgatggggaaccttacgattcatggcaaatcaagctattagctaggaaaaatgggttaactttaagtagatcaatcaaactccaatgggaaaactttccagggtatcatcatagaagaacaaatagtgaacaagataccacaaaacctgcgaaggaacgtgatgctagattttatatatttagtaaatatatatcaaacagttcaaaacgtaaccacaaaagtgagaacggttccgattctgattctgattga

SEQ ID NO: 1233 - DNA, 2430 bp, Saccharomyces pastorianus
atgaataccccacagatcagtttgtatgaaccagggacagtattgaccgttgggtcgcatcacgccaagattattaagtacctcacgagtggtggatttgctcaggtttattctgctgaaatttcgcctcctgatgcgtatagcagtgctaataaagcatgtttaaaacgagttattgttccagataagcagggtttgaataccttgagagctgaagtggacgctatgaagctcttgaaaaataataaacatgtggtttcttacatagactcacatgctgcgaagtccgtaaatggtgtagcatatgaagtatttgtattaatggaatattgtgaacgtggtggtcttatagactttatgaacaccagattaaagaatagattacaagagtcagaagtgttggaaatcatgagccagaccgtccagggaattgttgccatgcatgctctacaacctcctttaattcatagagatatcaagatcgagaatgtacttatttctcacgaaggcctttataaagtttgtgattttggttccgtttctggagtaataaggccacccaaaaatccacaggagtttaactatgttcagcatgatatcttaacaaatactacagctcaatacagatcgcctgaaatgatcgatttatacagaggtttacccattgatgaaaagtctgatatttgggctctaggtgtcttcctttataaaatatgctactatactacgccatttgagaaaagtggtgaaactgctatactacatgctagataccaatatccatcttttccccaatatagtgacaggttgaaaaatttgatacgtttaatgttgatggaagctccatctcagaggccaaacatttgtcaagttttagaggaagtttccagactacagaataggtcttgcccgatcagaaatttctatttgttaagagctatgaatcaaaatgcacatttggcgtctgaatcaacttctatggcatatataccagcacagcaacatatctctcagcatagttttcaaaatattaagggaatgactaatattgtccctttaactaatattaagactgccccgaatttagactcggtatcaaaattcatgaataacaacgacagaatagagcctatgtcacaacttcacactcaaaaactccaaactgatccgaatattttaaatccgttaacgaaaaccaaatccgttccactctctgatgattttacatcgctatactacaaagaattgcatccttttcaaaagtcacacactttcaaatcagtagagagcttccaatccccacaaagaaaatacattccatcatctccacccccaatcaatagcaacaattatgatagagtttctacaataaatcgtccaaataactatgtcgactcagagacgcaaactttagatagtatggctactcccaacttgaaaccatcccctattactactaataaaacaacaagcttctcgaaagagtctactgttgcagaaaatgtaactggaggaagtattgtacgttcgctaagttctaaactaaaaagggttatcacaggagaatcccgcagtagctctccgaccaaatcgaggcagaatactggcgacagtattagatcggcatttggcatacttcgtcatggctttactggaagttcaataaataacaataggtcaacctcctttgacaataataacggcaacaacaacggcaatagtgtgagtagacgactaacttcgtcgtcgtcaaatccgccctcttccaattttagctcagacactaaaagacaagaggagttggataagaaacggaagttggaacatcgtcgcagcatgccgccttcgatattatcagattttgatcaacacgaaagaaataactcaagaaccggatcaagagattattacagatcccattccccagtgaaaaaatcacaaacgatgcctaccacaacagcgagacccactctaaaatcgagtaatagcgatattaacgtaaaccaagataaaaaggaatcaattcaaagaagagttcataacttactaaataattctgaagattccttggggtataagtctgcctcagggtatggtaaatatactgataccgaggcagaaaagtctaatcgacagtccagcgtaagaataacaccaatcagtgaggaaagatttaataactatcatactagtaatgcaatgagcgatcatactagtagcaatgacaagcctaaatcaagaccaccacgcccgccaccaaaaccgttgcatttaagaacaaaaattcctaatacaagatgttccagtcatttgcaatcaaggagacccccagaggaaagaatttctagtgaagccaccgaaacgattgttgatgttaatgtggacgacttggaagctgatttcagaaagcggtttcccagcaaagtgtaa

SEQ ID NO: 1234 - DNA, 1116 bp, Saccharomyces pastorianus
atgtttagatccgtcgctactagaatatctgcttgccgtgggttggcaagcaacgctgctcgtaaatcgcttaccattggtcttatccctggtgatgggataggtaaggaagtcattcctgccggtaagcaggttttggaaaacctgaactctaagcacggcttaagtttcaattttattgatctttatgctggtttccaaactttccaagagaccggtaaagcgttgcctgacgaaaccatcaaagtattgaaagaccaatgtcagggtgctcttttcggtgcagttcagtctcctactaccaaagtggaaggttactcttcacccattgtcgctctaaggagggaaatgggactatatgctaatgtccgtcctgttaaatctgtggaaggaagtaagggtaaaccaattgatatggtcattgtgagagaaaacaccgaggatttgtatatcaagatcgaaaagacatacattgacaaagccacagggacaagagttgctgacgctattaaaagaatatccgaagttgcaacaagaagaatcgcaactattgcattggacattgctttgcaaagactacagacaaggggcgaagccactttaacggtgacacacaaatcaaacgtcttgtcccaaaccgatggtctatttagagagatctgtaaggatgtctacgaatctaacaaagataaatacggcaaaatcaactacaacgaacaaattgtggattccatggtctacagattgttcagagaaccacaatgttttgatgtgatagtcgcacctaacctatacggtgatatattatccgatggtgctgctgcattagtgggttctctgggtgttgttccaagtgccaacgtcggccccgaaatagtcattggtgaaccatgccatggctctgcaccagatattgctggtaagggtatcgccaacccaatcgccactataaggtcaacagccttgatgttggaattcttgggccataacgaggctgcccaagacatttataaagccgttgatgccaacttgagagaaggcgctatcacgactcctgatttaggcggtaaggcttctacccaacaagtggtcgatgacgttttgtcaagattgtga

SEQ ID NO: 1235 - DNA, 795 bp, Saccharomyces pastorianus
atgaagatacagacaaacgccgtaaatgttcttcaacggacatctgcctacctgaaatcagggttgttgaaagaaactcctgcatggtacaatgtcgtggcatccatcccaccatccactaagtttacccgtgaacctcgatttaagaacccctccaacgggcgcatcatagggaagcttgttgacgtagcagaaaggcagcaagctaacgctaatggactttacaagacaagacccaaccacaacgacaggagggtaggcgtgaaaaaactgtacaagcctccaaagctaacctacgtggaggacaggcttagagttcttttttacaagcaacacccttgggagctgtcaagacccaagattttagtggagaatgaagtcggtgatgaaaattacgattggagccatatgcctcaactaggaaaatcattggatggagaaagcgtcattcagcggaccatgcacttactcaaaacacaacagtacaaggacatggtcgaggcatacgaccacgcaagatacgaattctatgcgttgaggatgcaagaagaaacgcaacagcaagtagcgttggaagaggcagagatgttcggatccatcttcggagtttcatccatcgagcatggtatacaaaaggaacaagaggtcctcgacgtgtgggaaaagaaggtcattgaagaaaccgaactaatggcagcaaggtcgagcaatcctgctgggtcttggaaggacgacgctacattggacacggcgcaagacgaagagcccgccacgacagagaacctccacttctag

SEQ ID NO: 1236 - DNA, 2166 bp, Saccharomyces pastorianus
atgagcggcaattctgcaagggagaacgatgaccatttccgtggacatcggaagagaggaagacaggaaatgaggaagattaaaagaactactgccagaagaactgaggatgtggatacgaatgaagtagaccacgtggtggaagaattagtcgagagaaaagatgaaggtacagtttctgacgctggaagcgaatctgatcttgacatcggggatgaagaagagaagcaggaaaaggtttatgacgccttgctgactattttaaagtctgaacaccctgagccaaagagaaaaaagacaaaggctggcgagaataacgaaactactgaccagtccggcgggaatgagaatacaggctctgaaccagtcgacgaccagctagagatagagaatggccttttaagtgatcaagaagatgaaagcgacgataacgggaacgaaaacgagctggatgaagtggatagtgaggacgagcaagatccctttgagtcacatttcaatcaagtttcagagaagtacgttgacgacgtgtctaatgcttttaaggccaaaaacataaagtacaaatccgtcaaatctcctctaggtgatgatgaatcgtacatatattccaagccagtagtaaatggtgacgagacccctgttgaacgcctatacaagtcgtcttccatatattcgtattttttgaaacaaagactgaaaatccaaaatgggctactggacaagaaaatcgacccattgacttctttacagaaaaaattagtagaccctatgtttcagtacaaagacatactatacgaatacgattcctacgaaaaggatgaagacgagtatagagatctgtacaccttacatgcattgaaccatatttacaagacaagagatagaatcttgaaaaataatcaaagattgcaagataacccagacactgagcatttagaccaaggtttcacgaggccaaaggtgttgattgtggttcccactagagatgcagcatatcgtgtcgtggataagattattaaaaaatccggtatagatcaagtcgataagaaggggaagttttacgatcaatttcgtgatgattctttaccgccaaactctaaaccaaaatcttttcaacatatcttcagagggaataccagtgatttttttgttgttggtcttaagttcacaagaaaggctataaagctttatagtaacttctatcaatctgatatcatcgtatgctcgccattgggtattcaaatgatcttggaaaatacggataaaaagaaaagacaggatgatttcttgtcctccatagaattaatggtcattgatcaattgcattctatagaataccagaacatatctcacattttcaccatattcgatcatataaacaaaattcctgatcaacaacacgaagctgactttagtagaattcggatgtggtatatcaatgaacaagctaaactattaagacaaacaatggtgtttaccaaatacatttcaccagcggcaaattcattgattaatgggagatgccgtaacttggctggtaggtggaaaaaccacaaagtaatagaaccagaaacctccagtatcggacaattgggtttgaagattagacaaatcttccaaagatttgacattatcggaaactcaattattgaagaacccgattatagattcaagttcttcacaagtgttattattcccagtattgtcaaatctacgggctatgaagatggtatactgatttatattcctgattatacagactttatccgtattagaaactacatgaaggaaaagacgacgattctgtttggcgatataaatgagtattctagtcaaaaacaactcaatgctaacagatcactatttcaacaaggccgcgtgaaagttctgttatatacagagagactgcaccattatagacgttatgaaatcaaaggtgtgaaaaacgttatattttataagccaccaaataatccagagttttacaatgaaactgtcagatatattggtaagaatgcctttttgggtaacactgatttgaatatatccactgttaggtgtgtttacagtaaattagacggtctttcactggaaagaattgtgggtactaaaagagcaggtgtattatcacatgctcaaaaggaagtatatgaattcaagtaa

SEQ ID NO: 1237 - DNA, 1476 bp, Saccharomyces pastorianus
atgaccagcttgtccaaaagcttcatgcagagtggaagaatctgtgcagcatgtttttacctgttgtttacgctgctttcaattcccatttcattcaaagttggtggtttggagtgcggtctttcctttacagtgacacttttcaccttgtatttcataacgacaacgctcaatgtgctagcaaggcgaaacggagcaagactgtatatttttttgaccagctgtctatattattcccaacactttgttattgcttctctgttgtatctatttttatccgggttttctaacgatgagttaggaaacgttttgaaaaatagatctaacgagtcggagtcgttcttagaggttttaaaaaatagcttgaattccaaccaaatcaattacgtgctatactattactactatcgattcgttgttcaaccatggcagttcatacttaccaagtctacacctttctttactctatcagaaggatttttcactattttggccattcaggccgtgggagagactaatagatggttgtcgaatgacttgaactcaaatacatggattatttcgtcattgctggcttcggggggtgtaatcaccgcttcactttactatttgtatcggatttatgtgactcctatatggccactatctattcaaacagcatctttattaggatttgttttgtccatggtatgcgggcttggactatacggtattgtaagtcaaagggggtccgtgatagaaagttcattatttttcgcatacattgttagttgtgtctatgaaatttctcccaaattagctactacggcaacggatgagatcctagatttgttcaaagatgtatggcagaaacatcaaagaaatttgcctacggcggataatctactgtgctatttccataacgttattttgaaaaatgcagaaatgttgtgggggtcctttatccccagaagaaggaagacagctagcgatctccatgaaaaaatcataagtatcttgtcatttgaaaaagtttctttgatatctaaaccgttttggagatttttcaaaaatttcaccttcagtgttccgttatccatcaacgaattttgccaagtcacgattaaaatggcaagtgaatcagtatcaccagccatagtgatcaatttatgctttagagttctcatgttctactcggcaacaaggattatccccgctttacaaagaaagaatgacaagcagttgcgcaagagtcgtagaatcatgaaaggattgtattggtacagtccctgtatactgattgctatgtacactcatttgattttgcagtattccggtgagttaaagaaagatttgtgtatatggggctgtaatgagaaatggtttggaccagatcagccagaaattatagtggattcatgggggttctggaactggtgcaatattttctgtactatcttggtatatgctactgagttagtcggttctggcagttga

SEQ ID NO: 1238 - DNA, 1467 bp, Saccharomyces pastorianus
atggagcctacagcgagtgctctttcatctatagcaaatttagtgaaaacgatagtaggagctggcactttagccattccgtacagtttcaaaagtgatggggttctgatcgggattcttttgatattattagctgcagtaacgtctggattgggcctattcgtgttgtccaaatgttccaaaacgctgattaatccgagaaactcttcttttttcaccttatgcatgctcacctaccccaccttagctccgatcttcgatctagcaatgatcgtccaatgttttggtgttgggctaagttatttggttcttatcggcgatctcttcccagggctatttggcggtgaaagaaactattggataattgcatctacagcggtcattatacccttatgtttagtgaagaaattagatcaattgaaatattctagtattctgggtctttttgccttggcttacatatcacttttcatcttcagtcactttgtgtttgacctgggcaaaggcaagctaacagatgtgttagaaaacgacatatgctggtggaaaatccacgatatcaaaggattattgtcaactttcagtatcataatctttgcgtataccggatcaatgaatctattccctatgataaatgagctaaaggacaacagcatggaaaacatcaccttggtaattaataattcgataactttgtcaactatactatttttgactgttggtttatgtggctatttaacctttggcaataagacttcgggtaatttgatgttaaattacgaccctaactcaatttggatagtaattggtaaattttgtctaggatccatgctaatcctatcatttccacttttattccagccattacgcgtagcagttaacaacgttataatctggctcgaaatcacttttggcaatgctgatccaaatgaggacacgcaagtttccgaatacacccgagcttctaacctaagaccgattagtatgactgtcgacgatccaacccaatctaatgcgttggctaccgatgcaacttcgtatgatgaacaggatcgtttactcccaaatggaaacctcgacaatggctcaatagaaatccaaggacatgatggaggcactatggcagtccctgtagataatgaacatcacgcaccattcgttaagtctagattctactggatcacagcagtgttgttgataagtatgtacactctagcattatccgtccagtcgtttgcattggttctttcattagtaggagccacaggttcaacgtcgatttcattcactctacctggtttatttggatacaagttaattggttctgactcgttagctgtcgggaaaatgatcccaccaagagatagattttacaaaagatgtagcttgttgttggtattttacgggttatctgtcatgtttttatccttatacgtaactttattctatgctccagacaatgcctaa

SEQ ID NO: 1239 - DNA, 477 bp, Saccharomyces pastorianus
atgtctaccagtcccactactgatgaagctaaggatgagctactttcaccatttcgctggttatacgctttgacaaagacgccctaccctgcactcgccaatgcagcactcctagcatcaacgccagtgctgtccccatctttgaaggtgcctccagtcaaaaagtccccggctttctcgataccaatgtccagggtattttccagatcatctacacctcgagttggtataagtgctaagaccgccctttttttttctacaatgcaagccataggggcatacatgatctatgacaacgatctggagaatggggctgggtttattgctacatggtctaccttgtatttgattgttggtggtaaaaagtctttcagtgcattgagatatgggagaacttggccgttagtgctatcgtccttatcattggccaacgccgtcctttacggccaaaggtttcttgccactgggtttcaatga

SEQ ID NO: 1240 - DNA, 1551 bp, Saccharomyces pastorianus
atggctataaggttaaagccaaaagtgagaaacttcttacttgacatgtgtcaacgaaggcgatatgttttccttttcatagcctctgtcctcgccatactgtattataatggcaactggccatttccctcaaaaataatgctcgatccgaacaatctaccttactccttccaggactattccactgataaagacgagccgttttttcggggttgtaccgataccagcctgtatctacaagacccagattataccaaaatgaacgcgtcatttgttatgcttacaagaaacgaagaagtagacgatgtattgaaaacaatgaaaagtatagagggccattttaaccaatggttcgagtacccgtacgtgtttttgaacgatgaaccattcacagatttctttaaggaccaagttcgagcgataaccaatgccagtattgagttcggtgttgtcaatgaaatagaatgggaatttccagccgaagtacgtgattcattacttttcaaaactgcattagaagaccaaaatgatagaggcataatgtacggtaatatggaatcgtaccatcagatgtgccgattttattccggattgttttacaagcatccactagtctcaaaatacgagtggtattggaggatagaaccggatgtagacttcttttgtgatatctcatacgatccattttttgaaatggccaaaaacaataaaaaatacgggttcaccgtattgataaccgaactgtattggactgttcctaacttgttcagaacaaccaagagttttataaaaaagacagcgggtttaagaggcaacctgggcacactatggaaactattcacattcaatcataatattctagacactgaagatgaagaaatttctagatgggtgaatcaaccctgggaagcgaaaccaaaattgactgagaagctgatggtagactttctagtagagaaccacagccaagatgattatgaggatgatatagaaggtatacaatatctggtagaaagggcgcgctctaagataccattgctggaagatgcttttgaaaaggaagaatacaacttgtgccatttttggagcaattttgaaattgcccgtgttgatttattcgataatgagatttataacgcctatttcaaacatttagaggaaacgggtggtttctggaccgaaagatggggagatgcgcccatccattcgattggtttaggaatgattctggacctagaagacgttcattattttagggacattggttatagacattcgtcgttacaacattgcccgaagaatgccttacaagagcaaaaaaatcctcttaagtttgataaaggatatggcttcggatctggatgccgatgcgtctgtcccaagaatgaggaagatatcgaggataattctagcccctgcatggacattttctttgaattacttcacggcaaggagtacgagcaagattttccaggctgctacaagccttccataaaagacgaggacgtggttgaagaaatcaggaaagagaatttcaaaatccttgattag

SEQ ID NO: 1241 - DNA, 984 bp, Saccharomyces pastorianus
atggctattcaaaaagttagtaacaaagatttgtcccgcaaggacaagagaagatttaatatcgagtccaaagtaaacaagatttaccaaaatttttattcggagagagataaccagtataaagatagactgacagcactgcaaacagatttaacctcgctgcaccaaggtgataacggtcaatatgctcgccaggtacgagacttggaggaagaaagggacttagagctggtcagattacgactatttgaagagtaccgtgtgtcccgttctggtattgaatttcaagaagatatcgagaaagctaagggtgaacacgagaaacttgtcaagttgtgtaaagaaagactctattcatctatagaacaaaaaataaagaagctacaagaagaaagactactgatggacgtagccaacgtccattcctatgccatgaattatagtaggccgcaatatcagaaaaacactagaagccatacagtaagtggttgggactcttcatccaatgagtacggtaaagacacggccaacgaaagtgccaccgacacaggtgcgggaaatgatcgaagaacattaagaagaagaaatgcttccaaggaggtaagaggtaacaacaacaaccaagaggaatcggatttccaaacaggtaatggttctggaagtaacgggcaaggttccagacaaggatctcagttcccacactttaacaacccagcttacaagtcaggtatggcgtctgattcggatttcttacagggtataaatgaaggcaccgacctttacgcattcttatttggagagaagaatccaaaggagaacgcaaatggtaacgaaaagaagaaaagccgcggtgctcaacgatactctaccaagaccgcgccgcctctacagtcactgaaaccagacgaggtcactgaggatatttctttgatcagagaactgacaggccaaccgccggcccctttcaaactaaggtcagactga

SEQ ID NO: 1242 - DNA, 1098 bp, Saccharomyces pastorianus
atgccacctctacctataattaacagaccccaaatccatacctcagtcaccgaaataactcatgccattgatcgtacgatcaaggaagagctgtttccggttgcctataccactgaggaagaacagtacttcagtaccaatcctagaccagcctacattgatgaattgattaaggacgctaaggaattcattgatttgcaatattcattgaaccgtgacaagatagttcttatcacctctggtggtactaccgttccattggaaaacaacacggtgcgttttattgacaatttttctgccggcactcgtggtgcatccagtgcggaacaatttttggccaatggttacagtgttattttccttcatagggagttttcattgactccatacaacagatccttttcccatagcattgacactttgttcttggattatattgattctgagggcaagatcaaaccagagtttgctgaaaatgttttaaaaaacaagaaactgtatgaaaagtacatggagcaagaggaaaagctacttttattaccattcaccacggttaaccaatatctatggtcattgaaaagtatagccaaactactaaataatagcggttgtctattctacttggctgcagccgtcagtgattttttcgttccatactcaagattacctcaacacaagattcaatcaggagataatgtcaaaatgggagcaaccgaagacactgagggtacgaccaaaactacccccgatggtaagttgatagttaacctggatcctgttcctaagttcctaagaagactggtggaatcatgggcaactcaagccatgatcgtttcctttaagctagaaaccgatgaatccatgctgttatacaagtctacacaggctctggacagatacaaccatcaactggttatcggaaacctgcttcagacaagaaacaagcaagtcattttcgtatcccctgaaaacagaaagggcgactgggtacgtttagacgagaatcaccatagcatcgaagaaatgataatcccagaagtcattacacgccatgatcaatgggtagcacactctaaaaccaagtcagccacaaaatag

SEQ ID NO: 1243 - DNA, 1101 bp, Saccharomyces pastorianus
atgtcgtcgttgttgtctgaggtggaaagtatggacactttgccgtacgtgaaagatacaacgccgcaagcgagcgatccgtcatctagtaaattgctggctccatccatagaggatgtggatgcaaaccccgaggaactaagaacgctgcggggccaaggacggtactttggagtaatggactacgatgccgatggtgcgataatggaagcggaaccaaaatgtaataactgttctcaaaggggccatttgaaaaggaactgccctcacgtcatatgtacgtactgtgggtctatggatgatcattattcacaacattgtcccaaggctattagctgttctaattgtaatgcaaatggccattacaaatcacagtgtccccagaaatggaaaaaagtgttctgcacactatgcaatagcaaaagacattcaagggagagatgtcccagtatttggaggtcttacttgttgaaaactaaggacatcagcaatgataagcttgattttgaaactatcttttgttataattgtgggattaacggccattttggagacgactgtgcagaaagaagatcgtctagagtgccgaacacagacggaagtgcgttttgcggcgataatctagctatggagctcaaacagcactatttcgacgaagtgaagaaccatcagagagaagtctccaaaagacagatggtggaaaacgaggacaacgaccagcaattcaacttctatgactatgagtacaacgacgatgcatatgactacccaggttctaggaattatagagataaaatgaaatggaaaaacagggctcaatcatccagaaatagtaacaataacaaaaacaatagctataacgataacaacaacaacaacaacaggaggaagaagacaccatttagcccacacaactacaatgtaaccaaaaagaaaaatgtgcatgcgcatcccttagatttccccagaaaccctcaaaacaacaggatgaatgagtacccaagccattccaactataacagacaagattttccgagaggacccaagaataaaaagaacgggccctcgtttaataagggacaaagaagcggacgttattga

SEQ ID NO: 1244 - DNA, 2205 bp, Saccharomyces pastorianus
atgagcgctaacgaagcaggtgtcgctgagcaagtcaagaacttgtccgttaaggataacggtgatgcagcagcagcaaaggcaggcaagaaggataacaaaaagtccaagcaacaatctctatacttggaccctcaaccagtctttattgaaaaaagaatggagatgtttgacagattgcaaaaggaatacaacgacaaggttgccagtatgcctcgcgttccattgaagatcgttttaaaggacggtgctattaaggaagccacttcttgggaaactactcctatggatattgctaagggaatttccaaatctttggctgatagattatgtatctcaaaggtcaatggccaattatgggatttagacagaccttttgaaggcgaagccgatgaagaaatcaaattagaactattagattttgaatctgaggaaggtaaaaaagtcttctggcattcatctgcccacgttctgggtgaatcttgtgagtgccatctaggtgcccacatctgtttgggccctccaactgatgacgggtttttttacgaaatggcagtcagagatagtatgaaagatatctctgaatctccagaacaaaccgtctctcaagcggatttcccaggtttggaaggtgttgctaagaacgtcatcaagcaaaagcaaaaattcgaaagattggttatgaccaaggaagaccttttgaaaatgttccactactctaaatataaaacttatttggttcaaaccaaaattccggatggtggtgccaccactgtttaccgttgtggtacattgatcgatttatgtgtcggtcctcacatccctcatactggtcgtatcaaggcttttaaattactaaagaattcttcttgttacttcttgggtgatgccacaaatgactctttgcaaagagtttacggtatttccttcccagacaaaaaactgatggacgctcatttgaagttcttggctgaggcatctatgagagatcacagaaagattggtagggaacaagaattattcttattcaatgaaatgtctccaggttcttgtttctggttacctcatggtaccagaatttacaatactttggttgatttgatgagatctgaataccgtaagagaggttatgaggaagttatcacacctaacatgtacaattccaaattgtgggaaacttcaggtcactggggtaattacaaagaaaacatgtttacttttgatgtagaaaaggaatctttcggtttgaagccaatgaactgtccaggtcattgtttgatgtttaagtctagagaacgttcctacagagaattgccatggagggttgctgatttcggtgttattcacagaaacgaattctcaggtgccttgtctggtttgactcgtgtgagaagattccaacaagatgatgctcatatcttctgtactgaaagtcaaatcgaaaccgaaatcgaaaacatattcaatttcttggaatatgtctacggtgtctttggatttgaattcaagatggaattatctaccagaccagagaagtatgttggtaaaatcgaaacttgggacgctgccgaaagtaaattagagtctgccttgagaaaatggggtggtaactgggaaatcaacgccggtgatggtgctttctacggtccaaagattgacattatgatttctgatgctttaagaagatggcatcaatgtgccactgtccaattagatttccaattgccaaacagattcgaattggaattcaaatctaaggatcaagatgagagttacgaaagaccagttatgattcatcgtgccattttgggttccgttgaaagaatgactgccattttgatcgaacattttgctggtaagtggccattctggttatctccacgtcaagtcttggttgtcccagttggtgtgaagtaccaggaatacgccgaagatgtccgcaaccaattacacgacgcaggcttctatgctgatgtcgacttgactggtaacactctacaaaagaaggtcagaaacgggcaaatgctgaaatacaatttcattttcattgttggtgaacaagagatgaacgaaaagtctgtcaacattagaaacagagatgttatggaacaacaaggtaagaatgccaccgtttctgtcgaagaggttttgacacagttgaagagcttgaaagacgaaaagagaggagacaacgtcttagcttaa

SEQ ID NO: 1245 - DNA, 2832 bp, Saccharomyces pastorianus
atgtccttaactactgctgctccacttttggcgctactaagggagaatgaagattctgtcaagacatatgccctagaatctataaataatgttgtcgaccaattatggtctgaaatttcgaatgaattgccagacattgaagcattgtacgatgatgacactttttccgatcgtgaaatggctgctttgattgcatccaaggtgtactacaaccttggtgaatatgaatctgccgttagatatgctcttgccgcagagagtcgtttcaacatagatgaacaatctcagttcgttgaaaccatagtctcaaagagtatcgaaatgtacgtccgcagagcttccaggcaatacactaaggacgaactgttttacactaaggatactattgacccaaaattaacgtctatttttgaacgcatgatagaaaaatgtttacaagcctccgaacttaaacttgctttaggtattgccttagaaggctatagattggatataattgagaatactttaaaaaacaagctggatcacgattcagcttctgagaatgttaaaattattaactacttattatcacttgccataagcaccgtgacaaactcgaaattcagatcctcgatattgagaaaatcttttgacttcctaatgagcatgcctaatcgcgattatttaacgctcaacaaagtggttgtgaatttgaatgatgccgaattggcacttcaattatttaaaaaattgaaggaagaaaacgatgaagggttatccgcgcaaattgcatttgatttagtctcttctgcatctcagcaattacttgagatattggttactgaattaactagtcaaggttgcgattctggcttattgaatattctgtccggtctaccgacttgtgattactacaacaccttccttttgaataataaaaatattgatattggcctgttaaataaatccaaatcagctttggatgggaagttttctttattccataccgctgtcagtgttgctaacgggttcatgcacgctggtaccaccgacaactcgttcatcaaggcaaacttaccttggttaggaaaagctcaaaactgggcaaaatttacggccacagcctcgctaggtgtcatccataaaggtaacctgttagaaggtaaaaaggttatggctccttatttaccgggtagtcgagcttcttctagattcattaaaggtggttcattgtatggtttaggtttgatctatgctggtttcggtcgtgatactactgactacttaaagaacattatagtcgaaaatagcggaactgcaggtgatgaagatgtagatgtcttattacatggtgcttccctaggtattggtcttgctgctatgggatcagccaatattgaagtgtatgaagccttaaaggaagttctttataacgactctgcaacatccggagaggctgctgcgctaggtatgggtttgtgtatgctaggaacaggtaggcccgaagctattcatgatatgttcacgtactctcaagaaacccaacacggtaacattactcgtggtttagcagttggattagctttaataaattacggccgtcaagagctagctgatgatttaatcgccaagatgttagcaagtgatgaatctctattacgttacggtggtgctttcacaattgcattggcctatgcgggcacgggtaataactctgctgtcaagaggctactacatgtggctgtttcagactccaacgatgacgttaggagagctgcagtcattgcattgggctttgttcttttacgtgattacaccacagttccaagaattgttcaacttctatcgaagtctcataatgcccacgttagatgtggtactgcattcgcacttggaattgcatgcgctggtaaaggtttacaatcagccattgacgtgttggaaccgttaacaaaggatccggttgattttgttcgccaagcggcaatgattgccttatctatgattctaattcaacaaaccgaaaagttgaacccacaagttgctgagattaacaaaacattcttgagtgtaatcacgaataagcaccaagagggattagctaaattcggtgcatgtgtagcacaaggtataatgaatgctggtggacgtaatgtcacaattcagctcgaaaatgccgacacgggtactctggacgccaaatctgtggttggtttggtcatgttctcacaattctggtactggttcccattgtctcactttttatccctatcttttactccaacaacagttatcggtatccgcggtaatgaccaaactataccaaaattccaaatgaactgttatgccaaagaagatgtattcagctatccaaagatgtacgaggaagccagtggtaaagaagtagaaaaggtagctactgctgttctttccaccactgcaagagcaaaggccagagcaaaaaagacaaagaaggagaagggtcccaatgaagaagaaaagaaaaaagaacgtgaggaaaaagagaaggaagcagacaaaaaagacataaaggaaacaaaagaaaatgacgaagaattttacaagaacaaatactcttcgaagccttataaagttgataatatgactcgtatactgccccagcaatcaagatatatttctttcatcaaggacgacagatttgttcctgtacgtaaatttaaaggaaacaacggtgtggtagttttaagagacaaagaacctaaagaaccaatagagatgattgaaaccgtcaaacaaatgaaggatgttaatgctccacttccaacaccatttaaggttgaagataacgttgatttcccaaatgcttaa

SEQ ID NO: 1246 - DNA, 1410 bp, Saccharomyces pastorianus
atgtctaatcaagctaccgataatttgcaagattccttccaacgtgctatgaacttttctggttctccaggcgcggtttcgacctcaccaactcaatcattcatgaatacattacctcgtcgtgtaagcattacaaaacagccaaaggctctaaaacctttttctacaggtgacatgaagattttattgttagaaaacgtcaatccaactgcaatcaaaattttcaaagagcaaggttaccaagtggaatttcataaatcctctttacctgaggaggaactgattgaaaaaatcaaagatgttcatgccattggtatcagatctaaaacaagattaactgaaaaaatattacaacatgccagaaatctagtctgcatcggttgcttttgcataggtaccaaccaagtggatttgaaatatgctgctagtaaaggtattgctgtttttaattctcctttctcgaattcgaggtctgtagcagaattagtcattgctgaaatcatcagtttggcaagacaattaggtgacagatccattgagttgcatacaggcacgtggaataaagttgccgctagatgttgggaggtgagaggaaagacacttggtattgtcgggtatggacacattggttcccaattatctgtccttgcagaagctatggggttgcatgtcctatattacgatattgtaacaattatggccttaggtactgctaagcaggtttctactttagatgagttattgaacaagtctgatttcatatcattacatgtaccagctactcctgagactgaaaatatgctatctgctccacaatttgcagctatgaaagacggcgcatatgtgatcaacgcttcgagaggtactgtggtagatatcccggctttggttcaagctaagaaggcaaacaaaataggcggagcagctctggatgtttacccacatgaacctgccaaaaatggagagggttcatttagtgatcaactaaatgattggacttccgaactggtttccttgccaaatattatcctgaccccacacattggtggttctacagaagaagcccaaagcgccattggtattgaagtggcaacggccttaaccaaatatattaacgaaggtaacaccgtgggctctgtgaatttcccagaagttagtttgaagtccttagattatgatcaagaaaacacagtacgtgtcttatatattcatcgcaacgttcctggtgtcttgaagacagttaacaatattttatccgatcataacatcgagaaacaattctcagattctcatggtgaaatcgcctatttgatggccgatatctcttctgttaatcaaagcgaaatcaaggatatatatgagcagctaaaccaaacatttgctaaagtttctatcagactgttgtactga

SEQ ID NO: 1247 - DNA, 1818 bp, Saccharomyces pastorianus
atgtctaacaaacaactggtaaagccaaaaacggagacaaagacggatatcaccaccgaacagtctcaaaaattgcttcaaacaatgctaacaatgtcttttggctgcttggcatttctcagaggtttgttcccagacgatatatttgttgatcaacgattcgtcccagagaaagttgagaaaaattacaataaacaagccacatctcaaaataattccatcaaaatcaaaactttaattagaggcaaatccagtcaagtggatctgttgttagactggttggagaagggcgtcttcaaatcaatccgtttaaaatgtctgaaggcgctttcgctgggcattttcttggaagatcccaccgatcttttggagaattatatttttagctttgactatgatgaagcaaataacgttaatataagtgttgatttgggggatgataaaaacaaaaataagaaagcgagtgaggacaacgaaactatttctctattagattcaagaaaaatggttcaacagctaatgagacggtttatcattatcacccagtctttggaacctttgcctcagaagaaattccttacaatgaggctgatgtttaatgataatgtcgaccaagattaccaaccagaactatttaaggacgctacctttgagaaaagagcaaccttgagggtcccgacaagcttagacaatgatgcgtttaacgtcggtactctgaatacaaaacatcataaagtggctctttccgttttatcggcggcaacatctaccatggagggagccgaaagtacaaatttcattagagtcgatccctttgaaatgattttagaggagcaagagcaaaagcaacaggagaaatcaatttctgcaaaaccccagaactttgttacaagtcaaacaacaaatctgcttggaaatcttctaaactcttctcaagcaagtatacaaccgactcaatttgtttcaaataacacgctcacttctctttgtaattgcgaatgtggattgcaggttcctaaagaagctacggtcttgaaaacttgtaaaagctgccgaaagacattacatggtatctgttatgggaatttcctacattcatcaattgaaaaatgtttttcttgtattttcggtccttcattagatattaaatggtccaaatttcaagatcttatgatgattagaaaggtttttaggtttctggtgagaagaaagagaggcttcccagcttccataacggagctgattgatagctttattcacctcgaggatcaaaataacgaaataaaagaaagagttgctttcgccctatttgtcttctttttggatgaaacactctgcctggataatgggggtaaacccagccaaactattaggtatgtcacgaattctgttcttgttgatttaaaaggaattgtcacaccaaataacaaaaaagaactgaaaacaaatcaagaatatatattgcatttcactaccagttcacccaaagccggaagcttttatcaagaagttctaccaaactcaagaaaacaaatcgagtcatggttggaagatatcactaacttgagaagaatgtatgttgagactctttctccctcttcaactttgcaagagcttgacctcaattcaagccttccaactcaagacccgataataattggtcaaaagagaaagcattataatcttgaggagtacttacaagatgaaaaaagctcagttatgaatgatacgataaaagcaaaggattttgatgaaaatgtaccaacaaaggttcgtaaaattagtgtctctaaaaaaactctgaaaagtaactggtag

SEQ ID NO: 1248 - DNA, 801 bp, Saccharomyces pastorianus
atgtttctaagaagtctaaaccgagttgttgctaaaagcgtactagctgcccctaagtctaccgtggcaaagtcatcatggaaagttttaactgttgccaactccaagagatgtttcacccctgccactatcatgagaaaccaagaaacccaaagagtaggtgatattttgcaatccgaactaaaaattgaaaatgaaacgttgccagaatcaacttcgttggattcatttaacgattttttgaataagtacaaattttcattagtagagactccaggtaagaatgaagctgaaattatcagaagaactgaatccggggaaaccgttcatgtgttctttgacgttgcccaaattgctaatttaccatacaacaatgcaatggatgaaaacactgaagcaaatgaagacggaatcaatgaggatgatatcgacgccttatcagacaactttgctaacgtcaacgtcgttatttcaaaggaaaatgcaactgaaccagctgtctcatttgagttgttaatgaatctacaagaaggctcattctatgtcgatagtgctaccccgtatccctctgttgatgctgctttgaatcaatctgccgaggctgagatttcaagagagctagtataccacggtccaccattttctaacttggatgaagaactacaagaatctctagaagcttacttggaaagcagaggcgtcaatgaagaactagcatctttcattagtgcatattccgaattcaaagaaaataccgaatatatttcttggttggaaaagatgaagaagtttttccattaa

SEQ ID NO: 1249 - DNA, 2034 bp, Saccharomyces pastorianus
atgggtgtacatttcgatgataatgctaatacaacttgggatgccgcagatcccaaccttttgagtggatcagaaggacagcatcagagaactgagtccataccattgcgggacctttcaaacgctgacgtggaaaacgtgcctaacgaagaggaaggcgaaggcagcaagcccaaatggttattactaaagaggaaaaaccccatacaaaagttttttgaaagagtttggaatggccctgttgaacctagcgatgaaccgcctagctttccccaacgatgggggtggttgaagaggatagaggaatttccacagactacttttaaagctataattccgaataaattcatacggttgttactgctgattgcgtactgctgcttttggattcgtattttttacttcctcatatacccatatctcatcaaaccaccgtatttccatccgagcgatggctccgaaaagatacccatattgtctttaagttgcaactcctatttgaactgggaaggtaccaataacgcttgtggtttgaatgccaaaaactgtggcccatttgatgataaagaatacatggtcagatgcccagctttgtgcgatagaggcggttggacttactcagctattgccgttggaaaaagacgagtcaaatatacaggatatgaaattggcggaggtgctttatttagtgaagaagacccaatggccctttcttacccttatagaagcgactcctatccatgtggagccgcagtgcatgcaggtgttatttctccattttttggtggttgtaccaaagtttccatgcagggaccccaaaattcctttccatcaagaaaggggatatataacacagggttttccatagcttttgattcatttttccccggttcttattcatttagagatattcaaggtggtattttgtccggttgttatgatccacgagccgctgtggtggcattaaatattgtttttggattaccagtattttacttgtatgatagtatctatgggtactggataaacacaatagtgggctattggacactcgtattatcgttagaccctcctttattaacggacgctcatgatccaacgagcgtgtatgagctattcagtgtaggtttccaacgactcctgcctttgtgttttgttctctatgtggtttggaaaagcgccgtaaagagaaccctagaggccggctctcctatagccaaagtaattctttggtacccgacattttggctgggcatttcgaacaatgtcacttttgatagattgcctgtagacaggcttactaccaaggatttgaaagaacaagctggagcattgaccgctgttgattccattgccgcaacaattcttacatgtgcaattatacaagcttactcactttggaaatcaggaagattcagaaagtactttaaaatatacatatgtttcattggtggattagtagcgttaggatccttgccaggactgaatttaagagtgcatcactacattttgggttcagtgctcgttccagggtgtgcgacaagaggctcctcagcatatttgtttcaaggtgttttggtagggctgatcctatctggggtagcaaggtgggattttgcaagtatagtcgagacagatgtggctctgttaagaggggaagcaggagcgtctttgaagccaccaattttggaattcgacgatcagaatcactccttgtcatggcatctgaatgcaaccgattcagcaattgatgagacaggtagtatagatggattttcattacttttgaatgacgtagaggtgtacgtaggtaataacgacacagtcagcatcgataatcttcgaatgaagaatccacaacttacaagaatgatggacgatgctctcgacgcctctaacggaacaatagacttgtgtttaagagtggctcgtgcttctgtacggtccccaacaaaaagaggcgattatacaaacgcaggaatattacaatggccagaggggatgtggcaaaatcctgagcctggtgtatcttaa

SEQ ID NO: 1250 - DNA, 468 bp, Saccharomyces pastorianus
atgacgaagatcgatttctggcccacgctgaaggacgcatacgaaccgctgtacccccagcaactggaaatactgcgccagcaggtggtctccgagggggggcccacggcgactatccagtcaaggttcaactactcatggggcctgatcaagtccacagacgtgaatgacgaacggctcggcgtgaaggtcctcacggatatctacaaggaggccgagtcccgcagacgggagtgcttgtactacctgacgatcggctgctacaagctgggcgagtactctatggccaagcgatatgtagacactctcttcgaacacgagcgtaacaacaagcaggtggctgcgttgaaaagcatggttgaggacaagattcagaaggaaaccctcaagggcgtcgtcgtcgcaggaggcgtgctggcaggtgctgtggccgtagccagcttcttcctgaggaataaaagaaggtaa

SEQ ID NO: 1251 - DNA, 996 bp, Saccharomyces pastorianus
atgagcgagtccaagattgatagtgcagtggatgaaaagactaaggtgcagcaacctgcggttaaagaaaccattgatgaactagataaaactcccaagagaccaagggaagaagcacaggatgaagagagggaagaaacgagtgagaaaccagaaccatccaacgctgatgaggaaaagaagaaggatgatgacgacgagcaagaggcgtcttcgcacaaaaaaacaaagaccgacgatgcaaaagttgttgacaagcaatcatctaaagatgctagtaaggttgaagatgaagaaagaaaggataaattcgtgtttggtgcggcatccaatttcggaactgggtttggtgtcgctaagggggacaccaagaacgagaaaacaaccaacgccaactcttcatcggcgtccaatacaactacaaagaagccatttgcatttggttcaggtttgtcgtttggcagcggcttcagcatattgaaaagcaagaacgacaatgacagcgaaaacggaaagaaagttgctgacgataagggaaaagtcaacagcgactctgagcagcgggcaaagacgtcagaagccccaagcgacgcagcaagacctctcaaactgcaaaagcaagatatcaaatccggcgaagagtcagaggagtgcatataccaagtcaacgctaaactgtaccagctctccaagatagaagaaggctggaaggaaagaggcgttggtgtaattaaagttaacaaaagtaaaaaggatgaagaaaagacccgtatagtcatgagatcccgtggtatcttgaaagtcattttgaacattcaattggtcaaagggttcaccgtgcaaaagggattcaccggttcgttgcaaagcgagaaattcataagattgttggccgtggacgacaacggcgaccctgcacaatatgccatcaagactggtaaaaaggagaccacagacgaattgtacaacactatagtcaagtctgttcctaaataa

SEQ ID NO: 1252 - DNA, 465 bp, Saccharomyces pastorianus
atggaagctgactggaggagaattgatatcgatgcatttgacccggaaagcggtaggttgactgctgctgatctggtgccaccatacccaaccatcgttacactacaagaattacagcctcgaatgaatcaattgcgttcgctggccacgagcggtgactctacgggggccgtccaattactcacaaccgaccctccatacagtgcggacgctgcgacaaaggaacagtatttcgtgagcgtgcttgaagcattgacacaggtcagacaggccgatattggtaacgtagtcaaggctttgaacgactcccagaaggacgtgttggtgaagtacctttataaggggatgtccgtacctcagggccagaaacagggtggtgtcttgcttgcttggttggaaaaaattacccaagtcagcggtgtcacgcccatcgttcattatatatcggatagaagaaccgtatga

SEQ ID NO: 1253 - DNA, 909 bp, Saccharomyces pastorianus
atgagttacaatttatccaagtatcccgacgacgtgtcgagacttttcagacctaagccgcccttgccctacaagaggctaacggattacccatacgccaagaggcaaacaaacccaaatatcactggcgttgccaatttgttgtccacccctttgagaaactatatggaagagtttccacaaggcacccccaacaaccacctacaagagtacgaagaagtcaaactcgccaagaccaaaaactcccaactgataaatcagagattgcaaggttgggacccgaacgcagaccctcatatcaaggacacggatccctacaaaacgatattcattggaagattgccgtacgacctcaacgaaatcgaactgcaaaagcatttcgccaagtttggagaaattgagaaaatcagaatagtcaaggacaagatcactcagcaaaacaaaggctatgccttcatagtattcaaggaccccatcagcagcaagatggctttcaaggaaatcggcgtgcacaggggcatccaaatcaaagacagggtctgcatagtcgatatagaaagaggtagaaccgtcaagtacttcaagccaagaaggttgggcggtggcctcggtgggagaggctactctcacagagagaacagaatcccaggaagatttgcgaccgcaaccgcccccacttccatggagagaatccacgctcccaggccgccacgcagggagccttcttcctccacgtacactccggatagatacaccagtgtcaccgcagacacaagatatcacgcccaccggcccctgcttgccgcaacagccccaacccccattcccgcggtcacctcggtatacaagtccagaaactcaagaacaagagagtcccagccagctgccaaagaagtaccagactattga

SEQ ID NO: 1254 - DNA, 1908 bp, Saccharomyces pastorianus
atgaacggtcctcctacttttacccagtatagaataaacaagtcttctgggaatggggctacccacaagatcagggagctactgaacttcaacgatgaaaaaaaatggaaactgttttcgagcagaagactggagttgatagacaaattccagctaagccaatacaaggcaagcgaacaagaccagaacatcaagcagatcgccaccatattaaggaccgagttcggataccctgtgagttgctccaaggaatttgagaagttggtaaccgccgcagtgcaatccgtgaggagaaacagaaagcggtcaaagaagcgttacgccttgagtatagccaacggtaacggcggcaacggtaacatctcttcgtcgaattctacttccgacgatgagatttctccgtccatttaccaccacaccaattctgagtttttaccttcttccaaccaaactacagatttccagtatccaggaaagtttcaacctctaatgagtcatcagaacaatagcgggcgcattctgccaaacgtgtatccgcaaatggacccttcgtcgccggtcacttcgactcagcagaaatacaacgatatagtcactatgctagtgcatgacctcgttacgaatgctgtgccactgtcggaacaagctctcaaggacccgtacattgggccgaacttgtctcatttcgctatgtcttcgctcagccagcagcccaatgttgccgacagcatccccatagattccaccgtgcccttcttcctgagggaaaaactactgctacagatacaaagatcaagaacttgccaagacatttcgcaagccgcagggtccatcgacctttacgcaaatctcgagatcctggacgaaatgtcaattcgaatgtccatcgcattcgtcatcgagcgtttcttttccaacctggtatcttcatcaatgaaatacatcacttccaagacctgctctcctgaaaacttggccctattgtcccaaagactgtttggctccgctacaagacataatttatctcacttccccgcggcccaggttcagctgagactgctgtatttggttattggtggcattgtcaaggatttcgggttcgaccccactctttatcccttgagtgaaatcattcaccacatagtaatggtccaataccctttggctaactcatgcgcgacagctcctccaccttcttcatctaataaaagagtcaagaggagtcctcccaccgtccccagtgacataatgatgaacaataacacattgtcgaatagagccacgctcttaaccacgctgcccatgaagcctcaatctgccaataaagatgtcaaccgtcgggtgatcataagattcaatgatcgcgagcaagccttcacgttccaccagttgagtaatggcccacccactgtgtctgaaatactggaaaactgtaagaatttatttaatataataaacaaaaacaagaatttcggtattttccataacgacaacctactaaacgatgaaactttagcgagattattcgattcattttccacaaatgagattggtttggagattagagacatttcttccatccccttacaagataatagcatgccgctacccatccaactacccaaaatggcatgcttaggggaaaacccccccattccgttggtatcacctgagaacgacgatccgaaaaaatcaagcttaactgcctttgataacatcattaacagaatctctaaatcaccattgaatgaagataaccctattcctactgcaaacattagcatcactgccactgcaaataataataataatcataatgaacctgtacctgtaccatccgtcaccaaaaataaaaactcttttcaaaatggcaatctgccccagccggttttccagccattactgtga

SEQ ID NO: 1255 - DNA, 819 bp, Saccharomyces pastorianus
atgaaacgttttaatatattaaagtcttttattagaataccaaaagcaaatctacatacaacgaaaatgcctttgaccacaaaaccattgtctttgaaaattaacgccgctctatttgatgttgacggtaccatcatcatctcccaaccagccattgctgctttctggagagacttcggtaaggacaagccatacttcgacgccgaacacgttatccacatctctcacggttggagaacctacgacgccatcgccaagtttgctccagacttcgccgatgaagaatacgtcaacaagctagaaggtgaaatcccagaaaagtacggtgaacactccattgaagttccaggtgctgtgaagttgtgtaacgctttgaacgctttgccaaaggaaaaatgggctgtcgccacctctggtacccgtgacatggccaagaagtggttcgacatcttgaacatcaagagaccagaatacttcatcaccgccaacgatgtcaagcaaggtaagcctcatccagaaccatacttgaagggtagaaacggtttgggtttcccaatcaacgaaaaagacccatccaagtccaaggtcgtcgtctttgaagacgctccagctggtattgccgccggtaaggccgctggttgtaagatcgtcggtatcgctaccactttcgatttggacttcttgaaggaaaagggttgtgacatcattgtcaagaaccacgactccatcagagtcggtgaatacaacgccgaaaccgatgaagtcgaattgatctttgatgactacttatacgctaaggatgacttgttgaagtggtaa

SEQ ID NO: 1256 - DNA, 438 bp, Saccharomyces pastorianus
atgtttctaagaaattccgttttgagaaccaccccaatcttgaaaaggggtttgacaacattgaccccggtcagcaccaaactggcaccacctgctgccgcctcttattcccaggccatgaaggcgaacaacttcgtctacgtgtctggtcaaatcccatataccgcagaaaacaagcctgttcaaggttctatctctgacaaggcggaacaagttttccaaaacgtcaagaacatcttggctgaaagcaactcgtctttgaacagcgttgtcaaagtcaacgttttcttagctgatatgaaaaactttgctgaattcaattcagtgtatgccaaacacttccacacccacaagcctgcaagatcatgcgtcggtgttgcttctttgccattgaacgttgatttggaaatggaagtcattgctgttgaaaagaattga

SEQ ID NO: 1257 - DNA, 858 bp, Saccharomyces pastorianus
atgggattgagtccactaccaagaaaagcgaccacgtcgcctatcgacataccaggtggcgatagacacggccacataatcgagccgcattcacacagtcttaagaccgacccgttatcaagtaacaatagtagtctcgtatccaaaacttccaccaatctgagcttagaaagccctttctcttcgaagtctttactagactgcccccctgcgcaaccgataaaggactctcgagatttacaaggtggtaaccgtaatatggaagaggaaactattacaggagatagcgaaagtgtcttaaacatagtagatttccccacggatgagctcatactaatggtaagtgcgttgttgaacaaaattgtgaaggccaacgatgaaactacagatccctcacaacaactagtagaagacgatgaagacgaactcttggctcccgttttggcattttatgggaaaaacgtccctgagatcgccgtggtccagtacttggagagaattcaaaaatactgtcccaccacaaatgacatctttctttccttactagtgtatttcgatagaatatccaaaaattatgggtccagtcctgaccgaaatgaccatgtaaagcaaatgttcgttatggactccggaaatatccacagattgctcattacgggtataacgatatgcacgaaattcatgagcgactttttttatagcaactctcggtacgccaaggtcggaggaatttccttgcaagaattgaatcacttggaattgcaattcctagtcctgtgcgacttcaaattactagtctcgagggaagaaatgcagaaatatgcagacttgttatataaattcgggaacgaccagtag

SEQ ID NO: 1258 - DNA, 762 bp, Saccharomyces pastorianus
atgtatcctgatgaagaacaattgatactgtatatagtatatgcctatagactatcctttttcattggtatttgttcccttttcatagccaaagtttgtctaccagaatttttgcaatatggtaaaacttaccagcccaagagtacttcaaagtgcttgagtatactagacaagataaaaaagtttacagttccaaaggcgtactttgcccacttctattatctggcctctttcctgtcgtcaatcaccctatacttctaccccaagtaccctattgtttggatcattttcggccactcattgcgccggctctacgaaacccttcatgtattgcgttatacgagcaattccaggatgaattggtcccattatctagtcgggatatggttctattccgtactcttgctgattttaaatatatcattatacaagaataccgttccgagtaagctaaacaccaaggctttcatcatattctgcatagcatcttgggaccaatatagaaaccattgtgtcttggcgcaactggtcaaatactcactgcccagcggggggatgttcggccttgtatgttgcccccattatctagacgaaattattatttattccactctgttgccctacgaacaagaattctatttaacactaatttgggtcatcgcaagcttaagtatatcggcattggaaacacggaactattacagacacaaattcaaagacgatcacgtaacccgctacgccatcataccttacgtactttaa

SEQ ID NO: 1259 - DNA, 3447 bp, Saccharomyces pastorianus
atgcctaaccctccttcatttaagtcacataagcaaaatatattcaactccaacaacaatcagcacagaaatagtgtagattcattcgacttacatctcgacgattcatttgacgctgccttagacaatttacaaatcgacaataatccagatccactaagtaagcacaatactgttggagacagagaaagttttgaaatgagaacggtagacgacttttcgaatctgtctacagattcacatcgtaagtcttcaaatacagatacccgtcctttaatgtacgacaatcgcctctcgcaggacgatagtttcaaatttactaatattgcttcatcaccatcaccatcttcgaataattttttttcaaaagctctctcatttttaaagatgtcgaactctaaaaactggtccaagtttggatctcccattgaacttggcgatcaacacgtagaaagagaaatacacccagatacaacgcctgtatatgatagaaatagatatgcgtccaacgaagtatccaatgcgaaatataatgctgtgacatttgtgccaactctattgtatgagcagtttaaatttttttataacttatactttttggtggtcgcattatcgcaagccgttcctgcgttaagaatagggtatctatcatcatatatagtaccactagcgtttgtgctgacggttacaatggtaaaggaagctatagatgatatacaaagaagaagacgtgatagagaatccaacaatgaactataccatgtaataacaagaaaccgttctattccaagtaaagatctaaaagttggagatctcataaaagttcataaaggtgatcgtattcctgctgacttaatccttctgcaatctagcgaaccatccggggaatcattcataaagaccgatcaattagatggtgaaactgactggaagttacgtgttgcgtgccctctaacccaaaatctgtccgaaaatgatttgatcaacagaattagtataacggcttctgcacctgagaaatccattcacgaattcttgggtaaagtcacgtacaaggactccacttcaaaccctttatctgttgacaacactctctgggcaaacactgttttagcttctagcggattttgtattggctgcgttatctatacgggtagagatactagacaagctatgaatacaacttcagccaaagttaaaactggcttgctagagctggaaatcaatagtatttccaagattctttgtgtgtgtgttttcgccctgtccattcttttggtcgcatttgctggtttccacaatgacgattggtatgtcgacattatgagatatctgatcttgttttccaccattattcccgtgtccttaagagttaacctggatttagccaagactgtttatgctcaccaaatcgaacacgataaaactattcctgaaacgatcgtaagaacaagtacaattcctgaggatttaggtcgtattgaataccttttaagtgacaaaacaggtacgcttactcagaatgatatggaactgaaaaaaattcacctaggaactgtatcatacacatcagaaacattagacattgtgtccgactatgttcagtctttggtagattctaaaactgactctttgaataattctaaaattcctctatcaacagcaagaaaagacatgccctcacgtgtacgtgatatggttattgcattagcaatctgtcacaatgtcacacccacttttgaagatgatgaactaacctatcaagcagcatcaccggatgaaatcgctatcgttaaatttaccgaatctgtcggattgtctcttttcaaaagagatcgtcattcgatctctctgttacatgaacattctgggaaaactttaaattatgaaattttacaagttttccctttcaattcggattccaaacgtatgggtataattgttcgtgatgaacaacagggtgaatactggtttatgcaaaagggtgccgatacagtaatggcaaaaattgtagaaagtaatgactggctagaggaagaaacagggaacatggctcgtgaaggtttacgtactctggttatcggccgtaaaaaattaaacaagaaaatttatgaacaattccaaaaagaatacaaggacgcttctttatcaatgctaaaccgtgatcagcaaatgggtcaagttattggtaaatatctggaacatgaccttgagttattgggtctaaccggtgtggaggataaattacagaaggatgtgaaatcttccatcgaattacttagaaacgctggtataaaaatttggatgttgacaggagataaagtagaaacagcccgttgtgtttccataagcgcaaaattgatttctcgtggtcagtacgttcataccataaccaaagtaacgagaccggaaggtgcattcaatcagttggaatatctaaagattaataaaaatgcttgtcttctaatagatggtgaatcattggcaatgtttttaaagcattatgagcaagagttctttgacgttgtggtacatctgccaactgtgattgcctgtcgttgtacacctcaacaaaaggcggatgttgctttggtaattcgtagaataacgggtaaaagagtgtgttgtattggcgatggtggtaatgatgttagtatgattcaatgcgcagatgttggtgttggtattgtgggtaaagaaggtaaacaggcttcgttagccgctgatttttctataacacaattttgtcaccttactgaattgctattgtggcacggcagaaactcgtataaaagatcggccaaattggctcagtttgttatgcatagaggtttaattattgccatttgccaagcagtctattccgtttgttcattgttcgaacctattgcactttatcaaggttggttaatggttggttatgctacttgttatacaatggctccagtcttttcattaactcttgaccatgatattgaggaatcgctaacaaagatatacccagaactgtacaaagaattgacagaaggcaagagtttatcgtacaaaacgttttttgtttgggttttactttcattattccagggttctgtaattcaattgttttcacagacttttacaagtctatatgagaatgatttcgttaaaatggttgctatcagtttcaccgccttaattttgaatgaactgatcatggttgctttagaaatttacacgtggaataaaaccatgttttttactgaaattgccactttgttgttttacgtagcatctgttccattcctaggtgattattttgatttaagttttatgaccaccgtaaaattttatgctgaactcttggtgatcctactaatttcagtcttccctgtctggacggcaaaggcaatttatagaagactacatcctccaagttatgcaaaagtgcaagaattcgccacgccgtga

SEQ ID NO: 1260 - DNA, 2652 bp, Saccharomyces pastorianus
atgaaattcgctgaccatctgaccgaatcttccatcccggagtggagggacaagtacattgactacaaggtcggcaagaagaagctcaagcgctacaaggataagctgaccgcggaggaacagcggtccagctccggtcggagctggacccctcccgtgtcgctgtaccagacggaggcccagcggaggattccgtctgccgactaccgtaccgggcaagtgagcaagaaggaatactctgggctgcagcgggagttcgtatccgagttcatcgaggactggctgatcgcgttccagctgagaaagtgcaacgagttttacctctggctgttgaaggagtgtgacaagaagtttgaggttttggagtcgcagctgcactactacttgctgcaaaaaaactatgagcgcgacgtgttgaacaggtccacctccagcgtcgacatttcctcgagcctgtaccaggcaggatccggcaacgttgatggcgggtacggctcgatggcgggtgcccaggacacgactccgccacggctatcgccacttgcgtattgccgcaaggtcctgaaggacaaccggttgctaccctcgtggcccaagcgaggattctcgttgctgcacgacgtgacgcaggactcgtcgtccaggggccgtgagacgtttgccttcggagcgtcgttcttggacaccatgaccatgacgcaggcccggaacctgttgagcaacgccatcatcgagtactacctgtacttgcagttggttaagtcgttccgtgatatcaacgtgaccgggttccgtaagatggtcaagaagttcgacaaggcgtgctacactaaggagttgccctcgttcatgtcgtacgcgagggccaactacaccctcttcaagcacgcggacgccaacgtgcaactggttgcgcaacagatgcaacagataaccagctcccagccggcaacgaccgcggagctgtcctctgcccaaagagacaaggagcccatcacttggctggaaactcagatcagcgagtggtacaccaccgcattgaccaacaccccgaaggacaagaagcataacacccacaagttgaagaagctgaccatccagtactccatatccgagcaaatggtccacagaaacaacaggtccatcgtgcagatgttcgttgttggcctgggtatcggtatttcgatggctctgatcactttcaccttgtatcgggccattagctccgatcaggcttccttcacgcacaagatcttgttcccgctgtggggcggttggtacatggtcatgttgatcgcgttcctgttccttgtgaattgttacatctggcataaaaccggaattaattatagatttattatgctgggtgagattcaatccaagaacggtacacaattctttaacaatgattttgccacgagcaaaatccctctcaaaatgtatttcttgacttttttcattttgtcctgtgcggtttgttccatgttgagttttgcattggaaagacttactcccatggggtttatatacattggtatcgtgtttttcctgtttgtttgcccctctggtctcatcccatactgggataaagtcgtacatacgagaaaatggctagtagtgactcttatcagactgatgatgtctggtttcttccccgtcgagtttggtgatttcttcctgggtgatatcatctgttcgctaacctactccatttccgatatcgccatgtttttctgtgtttactcgcaaacccccaacaatctatgcggctcttcccattccatagcaatgggtgccttgtcttgcctacccagttattggagattcatgcagtgtttgcgaagattcgccgactctggtgactggttcccacatcttttaaatgccgctaaatacactttaggtatcgcgtacaacgccactctttgtgcttacagattgtctgatcattcagacaaaagaagaacacccttcattgtgtttgccacgttgaattcgctcctcacttccgcttgggatcttgtcatggattggtccgttgctcataacaccacatcttacaattggttgctaagagacgacttatatttagccggtaagaaaaactgggaagacgggagctattcattcagaaggaaactggtttattattttgctatggtctgggatatcctcattagattcgaatggattgtgtatgcaattgcccctcaaacgattcaacaaagtgccgtgacgtcatttattttggctactttggaagttattagaagatttgtttggatcatctttagagtcgaaaatgaacatgtcgctaacgtccatctattcagagtcaccggtgatgctcccttaccttatccaatctcgcaagttggtgatgatactgaaagtagtgaactgggttccaaatatttgtcatcgataaatgatatacctattacgccctcacgtgataacgatccgcacaacgtcgaagaacccgcacccgcataccgtgggaccttcaggagaaggtcttctgtatttgaaaacatttcaagaacaattccctgggctcatgcaactgactttcaaaggccaacagttaatactgtggatgacagatcacctgaaacggacagtgaaagtgagatggatagtgtgatgtga

SEQ ID NO: 1261 - DNA, 1884 bp, Saccharomyces pastorianus
atgaggagacagctgcaatggatggccgggtccgagaacgagggccaggacggtctggataacgaaaacaatagcaatacaagcgaaatgaccgacacggcgatgatgccacctttgaagagagtgctgcaggcagatggtagcgatgacgggtctgggaagaagcagatgacaacgtcggcgacgatgtcgccgacgttgtcgccgacgctgtcgacgaatgacagcggcaccagggtgcagccgctgccggagtacaacttcaccaagttctgttaccggcacaacccggagattcagttctcacccacgcacacggcttgctacaagcaggatctcaagtgcacgcaggagatcaacgccaacatcgcgaagctgccgctgcaggagcagtcggacatccatcacattatctcgaagtacaacaactccaacgacaagattcgcaagctgatcctggatgggatcctatccacgagctgcttcccgcagctctcgtacatttcttcacacgtcacacacatgatcaagatcgacttcatcagcattctgccgcaggagctgtcgttgaagatcctgagctacctggactgccagtcgctgtgcaacgctacgcgggtgtgccgcaaatggcagacgctggccgacgatgaccgggtgtggtaccacatgtgtgagcaacacatcgacaggaagtgccccaactgtggttgggggctgcctctgctgcacatgaaacgtgcgcgcatacaacagggcagctcgggctccagcgagggcacacggccttggaaggtcatctacagagagcgcttcaaggtcgagtccaactggcggaagggccactgccgaatccaggagttcaagggccacatggacggcgtactcacgctccagttcaacttccgcctgctgttcacgggctcgtacgactccacaatcggcatatgggacctgttcacggggaagctcataagaagattgagcggccacaccgacggcgtcaagaccctgtacttcgacgaccggaagctgatcacgggctcgctcgacaagactatacgcgtgtggaactacataacgggcgagtgcatctccacgtacaggggccactcggatagcgtgttgagcgtggactcgtaccagaaggtaatcgtgtcgggcagcgctgacaagaccgtcaaagtctggcacgtagagtcaagaacatgctacaccttgaggggccacacggaatgggtcaactgcgtcaaattgcatccaaagagtttctcgtgtttcagttgcagcgacgacaccacaatacgcatgtgggacatccgaaccaattcgtgcctgaaagtgttccggggccatgtgggacaggtccagaagatcataccgctgaccattaaggatgcggagaacctggccaccgacaacacctcttcgcaaaacgaccaggcaatggccagcgaccccaacgcgtcagaaacgccgtcgagtgagcaagaggcggccacccttgacgagaccataccctaccccacacacttgctgtcgtgcggactggacaacaccatcaaactctgggaggtccgaacgggcaaatgcataagaacacagttcggccacgtggaaggtgtttgggacatcgcggctgacaacttcaggataatcagcgggtcccacgacggaagtatcaagatctgggacttgcaaagcgggaagtgcatgcacacgttccagggacgcaggctacaaagagacactcaaccaacgcagacgcaatctctgggcgacaaagtcgcccccatcgcgtgtgtgtgtattggtggctcggagtgtttcagcggtgacgagttcggatgcgtcaagatgtacaaattcgatctcaacgactag

SEQ ID NO: 1262 - DNA, 1605 bp, Saccharomyces pastorianus
atggctaccactactcaaccacaaaatattttgatggatgaatctttgaacatccctagtggcagcaacagcagtcattatgggaacacaaatgcaaatgtaagaactccctcggggacacacacgcatcatcctaggctgaactctctggactttttgcacatgcccagaagactttccaatgtcaagctgcaccgactaccacaagacgagctgcggagaaatacaaatctgaacaagagcatgtccatcaacggtaatcaggttcatgctcaccatccgttcataaacccgggtgcagaagtcggtgctcatcagaacgtggaaagagaagaggaggaggaagatgagatttctcctctgtctcatgataacttccagtatgattcagaagagaatgctaataatccctcaccccccatctataagaaatctggcgaactggtgaagagctcgctaaagagaaggtccaagtccttacccatcacccccaaatctatcttccacaaggcgggcgccaggggcaagcatgtcaatctggaccacgtggattcaaggctgttgcaaagaagtaaaagtgtccatttcgatcgtgtcttacctataaagctgtttaatgggaacgaaaaacctatagacgttagcaaacaaatgatccagcaggatgtcttaaattttaagcacaagcctttgacaagactcgatgattttaacggtagtaacgactgtgtacccatcgaggacttgttatctgaagacagccaaaacacatttcaagacacgtggctacgaaaccccaagggcgtcttcctctttgggacgaatgccaacagtcaccacaagaacaagaagaagttctcgctggaggacgaggatagtgatgacgatgaggctataaaccgcttagtgaagaagcaaggcaaagacgaaactttcctcacaaacggactaaagaatttgttgataaacaacgaagaccaatattcagacgcaaagaaggactctgacaaatcagagatctcactggacgccaacaacttattttacgggaactcgaaaagaaccgttggtctttataataagaacttccccatcttaagtgataggaaccacaagagcttgaaattaaatgtatttttgaatttatctcgcggcaggcctgtttttctacaagagcttactttactatcaggtttccacaacatgactatagtggggaaagtctttgtaaaaaacatatactttgataagaagatcattgtaaggtacacatgggatgcatggaaaacggtccatgaatcagaatgcgtctatttctctaatgcaaacggcatcttaccggggaacaatatggatatcttcaaattctccatcgatgatatacacaatccaaacgataaagatagtaatatatcgccattagagttttgtattcaatacttgacctggagcgttgatcgttccagaaaggagtattgggacaataacgattcatcgaactataagatcgatgtggtgacccatgaagcgaggttagggcctacaacggacgtcaatgacaactatgaaatgagacacagtcttttcagaaatccattccactaa

SEQ ID NO: 1263 - DNA, 894 bp, Saccharomyces pastorianus
atgtcgacatcggtccctgtcaagaaggcactgagtgctcttttacgcgatcctggaaatacccactgtgcggattgtaaggcacaactgcatccacgctgggcctcctggtcacttggtgtttttatctgcatcaagtgtgcaggtatacatagatccttggggacacatatctcaaaagtgaagtctgtggatctggatacatggaaggaggagcatttgacgaaactgattcaattcaaaaataattcaagggcgaactcgtactatgaagccaatttggcagacgacttgaagcgaagaaagatcactgacacgagcagtttacagaatttcatcaagaataaatacgagtataagaagtggattggcgacttgtcaagcatcgtcaacgggtcgggcgatgctactctgcataaatcatccactaatcaatcttctgtctcgaacgcgagcttgaattcaagttcaaactcactacaaaggacgcagacacaaccgtccccttctttgttgaaaacttcgcagagtaataccagtttactgaacttgcaggtttcatctctttccaagaccacttctaatacgagtgacgctagtgacactacaagcatagctgccactagtaacaaagcctgtcacagggctaatgaaattgggcaaaggagcgacttgaagaaatctatcttatcattatactctaaaccttcgactcagactcaaagccagagctcgttcttcaataccacgatacctcagccatctccaactccaactccgtcgccattagttagtcctggaattattggtaccggtaacaataacgccaactcgaactccaattctaatgtttcgttggacgataacgaattgttccagaacgtttggacctga

SEQ ID NO: 1264 - DNA, 1188 bp, Saccharomyces pastorianus
atgtggaaggttatgcgtgtgtggagatgtggaggggtgcgctgggcacatcgccagcggccctcaaatgagttgttgtcggaactgtcgttcgaccagcactacaagatcaggtccaacatcgggctgctaatacaggactacgccagcaagcccattgcgccgctagactacgagtacttcctgcagtaccggccaccgctgacgaggaaggaggaatacatgctgacgatcaagacgatcaacttgttgctatcgctaacgtgcaagcggctgaacgccatccagaggctaccgtacaatgcggtgataaatccgcacctcgagaggaccaactcgctgtacctgaagagcctgcagacgctgcttccggtggcgtacccgtatgagctgcacaacccgcccaagatccaggccaagttcacggagctgctggacgaccacgaggacgccatcgtggtgctggcaaagggattgcaggagatccggacatgctacccacagttcaagatctcacagtttttaaactttcatttaaaagagcgaataaccatgaagctactggtgacgcactatctgtcgctgacggcgcaaaacaacgacgagtctgacgggaatacgatcgggatcctgcagcgcgacctacccatagtgcagttggtcaagcacgtctcggactacgtcaacgatatctgctttgtgaagtttaacactcagcgaaccccggtcctcgtctatccgccggcgcaggacatcgcattcacatgcatcccgccaatcctggagtacatcatgacagaggtgttcaagaacgccttcgaggcgcagatagcacacggcaaggagcacgtccccatagaggtcaatctcttgaagccggacgacgatgagctgtatatacggattagggaccacggcggtggaatcacgccggaggtggaggcgctcatgttcgactactcgtactccacacgttcccaacagccgtccgacgacgaggactctacagacctccccggcgagcaaatcaataacgtttccggcatgggctttggcctgcccatgtgtaaaacgtatctagagctatttgggggcaagatggacatccagagcctgcccggttgggggacagacgtctatatcaagcacaagggcccttccaaggctgcactgctcgccaaacgctag

SEQ ID NO: 1265 - DNA, 978 bp, Saccharomyces pastorianus
atgtcattcaatgcctttgccagctctttgagcaagaaactacaggaactctccacgagtgtgtccgaaagaacccaggatttgcccaacttggcgcaatccacccaaagaatggtccaggagcgtctgggtcaggtgacagacatctcacagttaccacgggagtacacggagctcgaggacaaggtcgacaccataaaactgatctacagtcacttcttgggcgtgactgcgatctacgaaaacgggtcgtacgactaccctaaatacatcaacgagtctgtcaacgaattttccagcagcttggcctccaagttgaccgagttgacccatgccacgtctgcttccgaggcgcagaacatcttggtcgctccaggccctataaaggagcccaagacattgaactatgctttgagcaaagtggctttgaactctagcgagtgtttgaacaagatgttccccagcgaggaacagcccctggcctcttcgctcttgcagttcagtgatgtccaggctaagattgctcaggctagaatccaacaagacactttgattcaaaccaagttcaataagaaattgagggaaagagtctctttcgaaatcggtaaagccgataaatgtcgcaaggaagtccactccatgagattgagatacgacgtggcaagaacaaacttggccaacaataagaagccagaaaaggaagcttccctaagagtccaaatggaaactctggaggaccagttcggccaagtcaccgaagacgctactgtgtgcttgcaggaggttatttctcacgccaacttcaccgaagacttgaaggaattggccaaggctcaagctgagtatttcgaaacctcttccgccctaatgaaggaattcttgtccgattcattcgctcaagagcctgaatcaaagcctcaagcagaagatggaaagccacaggccgctatttctatgaacgacgaagatgatgcttaa

SEQ ID NO: 1266 - DNA, 417 bp, Saccharomyces pastorianus
atgaacgccatccaaccccaatacgagctgtctgtggtcacccaatgtttgaaatatgcaattgatatcatccaatggttgatcccggcaatcaccaagttcagccagtctcaccctttggtctttcaactctcgttcatttcctttactttgtacgtcttttacaatttgctaatgaacctgatcaccctggttaagagattcctgtatgtggcgttagtcgtatcctgcatcggaatttacttacgtggttcccagcagtttttgactgttgacttgatgaatttctataacttcgccatgtccaacaggtactacgcattcaagatctatacactatttattaatgccttggaaaaggaagccaacgctgtctatcacctggctcaaacgaaagtacaacaattgttcaaatag

SEQ ID NO: 1267 - DNA, 1416 bp, Saccharomyces pastorianus
atgctaaggtgtgtagtcaagaagtttgcgtatttcgccactttgctcaccatcgtggctaacatctatatttatacctacccatctttccatccggaacagtgttcatggaattgttctgacaagaataccacgttacgagaagattcgactcttctggagaaagttaaggggtacttcaatgacgttcaagaacaatggtattccagccatgcttctgatagtgacgatattcacatcatggcctttggtgatcctcaaataaagggtaattggcccaagacaccctacgtgtcccgattggacacttatggcaacgactactatctaggccacatctacgatatgatgcaacaaagactgaaaccgcaagtggttactgtcatgggtgatcttttctctagtcaatggatcggggattcggaattccacaatagaacgcaaagatacattagtagaatatttaaaagagatcctgcttttattgaaagggttaaaacagaaaatctcgacgaagatggccagtataaggcaaactggtccaaatggggggatcgtttcaacgagatcctaagcactgctcaacaaaatgatactgcaaacgaagatttaacattcggatttggatacgaaaatatccaatcatggaacccagatttagaagattttctgtttattaacattactggcaaccatgacgtgggatactcaggtgatgccacgtaccaacatatgacaaggttctatgatcttttcggtaaggacaattattggattgaatacgagactaacacgacacatccttggagaatcgtagtgctaaacgatcttcttttggaaggccctgctttacaaccagaattcgttgatgcaacttggatgtttttgaagcaactaagtgagcgtaaattcgccggtagtactgttttattgacccatgttccattttacaagcgcgaaggtttgtgctacgatggcccagacactaggtattatccagatgttgatgcccctgaatcatataaaactgggcttctaagatctcaaaaccatttgggagaatccgtttcaaacgaagttttgaatatgatcttcgaaaacggaaagccaggtatcatattaacaggacatgaccatgaaggctgtgaaacggtttacaataagaagtcttccgccacttgggaagctacaaaagatatcgaaagtgacattttcgtcaaggaaattacagtcaaatccatgatgggcgaattcaacgggaacacgggtttagttacgggacacttcaacaccgatacaatgacttgggattggacattcagtttatgcccattcgccattcagcatgtttggtggttcgctaaagtatccctacttgttgctatattcacttggtcctcgctactcttcgtctaa

SEQ ID NO: 1268 - DNA, 2544 bp, Saccharomyces pastorianus
atggctcataggaaactacaacaggaggtcgatagggtctttaaaaagatcaatgagggtctagaaatcttcaatagctattatgaaagacatgaatcttgtacgaataacccctcccaaaaggacaagctagagtctgatttgaaaagagaggtcaagaaactgcaaaggctcagggaacagatcaaatcgtggcaaagctcaccagatattaaggacaaagattctcttctggattatagaagatccgtggagatagcgatggagaagtataaggccgtggagaaagcatctaaagagaaagcatattccaacataagtctgaaaaagtcagaaactctggatccacaagaaagagaaagaagagatatatcggagtatttatctcaaatgatcgatgaattagaaaggcaatacgatttactacaagtagaaattgacaagttattgcttctcaataaaaagaagaaaactttctctgcgtcaaatgacgagaaaaaggaacaatttaagcatttccaatcgaggcataggtggcatcagcaacagatggaactcgccttgaggcttctagccaatgaagaattagatcctcaggatgttaaaaatgtgcaggatgatataaattattttgtggagtccaatcaagatgctgatttcgtagaggatgaaactatttatgatgctttggacttacaaagtaatgaggccattgcccatgaggtagctcaatattttgcctcacaaaaggcagaagacaacaatacgtctgatgctaatgactctctacaggatgcatcgagactttctaaaaaggaacaacgaaaattggaaagggaagctaaaaaagctgccaaactagcgtcaaagagtacaacagacacaacagccactataggctcgacaataagcgtacctgatctttcctctacaccatcacccgtcacacctgtcacaaatatatctagggaaaccgaaaggagcccttctgcttcacctattcaaagtgtgtcaaaacctgagaaaccaatgaaaaccttttctataaagagccccaaggctagcactgaaaatatacttcagtcgctgcaaaaatcaccaagctcgacgacgcctgaaaccccgacaaatgtacatacacatatccatcaaactccaaatggtattactggtgccactactttaaaacccgccactcttccagtaaaacctgttggtgaactaaaatgggccgtcgctgcgtcgcaagcgatagaaaaggatagaaaggtcacatctgcatcgtccaccatttccaatacttcgatgaagactccgacaacggccgttgccaccacaacgccatccaatgccaacagtagaataagcagtgctttaaatacacccaaactaaacactccatcattatctttacagcctgagaataacggcgcatcgtcatcatcagctgctaatgcggccgccgtcttggctgcaggagccgctgctgtgaatcacaataaccaagccttttacagaaatatgaactcccctcatcatcctctagtttctttggctacaactacaaagacggagcatgtctccaccgtttcaggaacgccattcaatgaaggtgcgtttgaaagtgatactaaaccagttgcagaacaacaggaggaaaccgaatcgacagagaaaagccaactgcaggttccaacttttggggtatttgaagacgacttcgaatctgatagagatttagaaaccgaatcagaggacgaggagcaatcaaacacatcgatacatctaagttcggaacagaaagaggttagaacaaacgaaattaaaaatgaatttgttagtgactttgagactctactgctaccaagtggtgtacaagaattcataatgagttcagaactctataacagccagattgagtccaaaataacgtacaagagatctcgtgatatgtgcgaaatttctagactagtcgaagtaccgcaaggcgtcaacccaccatcccccctggatgcattcagatccactcaacaatgggatgtgatgcgttgttcattgcgcgacgtaataatagattcagaaacgcagaaagagagttcatcatcggtctatgacagaatcttagaaaacttcagaactttagagatgttcacactattctacaattactatttttctataactcctttagaaagagagattgcatttaaaattctaaacgagagggattggaaagtttcaaaggatggtgctatgtggtttttaaggcaaggtgagatcaaattttttaatgaaatctgtgaagttggtgattataaaattttcaaactggatgattggacagtaattgataaagttaatttcagattagactactcatttttacaaccacccgtcgatgcagtacctgaggctggcgatattgatgttgacaataacgatgttaacgatcaaagtaatgtaactttagaacaacaaaaacaacaaatttctcatggtaagcaactcttgaatcaattgagacaaggtaagaataatgtatga

SEQ ID NO: 1269 - DNA, 1953 bp, Saccharomyces pastorianus
atgaacaatatgtgcgtcgtaagatctttatcactccctcagaggttgttctattgtctcttccacccccttctgctaatattctttacttcaataattctaactatttggagcaccttttcagttatagatattacaatggctaaaacatatcacacgaagaccgagtggaacaataccgttgtcacttcagtatctatttctacagccacaacaacagctacagaaacatcagtcactacataccaaccttcgtactccaccagtttttatactttaaacaattcctatattgaagagaggatcgatcaatactttgagagcaaactccgaaatatttcatccgtagttaatacggatatgcaggcaaaattcgagtcatacacggatgatttactgaatgacaaacaacagctgataaccgaccatataagttcacaaaccgaatcaataaaaagcgttcttgagctgaacaatacgatctttaacgagttgctcgctaaatcgcatttaataaatgtaacatggagcgaaatatctgaagatgcgatgacgctggaccaggattcaatttcacaattagcacagaatttatttttgaattcttccatgttcgataacgttttccaaaattactccagtagattggaatttttacaggaatttaatgacaccatcaccgattttcctattcagctgagtgataataagactttaaatttaagttatttacaaacatccgccgactgggttcaattaagacagaatttcaccagaaacttacaaagtcaaattttcattctctctgggaatactacaaacaccaagtcatcagcctcaataacgaagagatctataaataataatagtgaggaaaatagcgatttcattgcaataaaaagaaaagttttttataggtgtcagaaaatgacaatagttttcaccgtactctattttgccttagtggttttactaatgatagtggaaagaattaagtttcagctggaaaaccaacagtttaacttagtaatttcccaaattaatgattctacagggtgcacaaacttcacgcaatacaataacattctgaaaaacctgataactactttgaacctctccgcactttacccagttgtctaccaattgacaaagcttataaaccagaagatattgaaaaggaacgcaaaagaaagcaacgagagaaaagcaaaacggtccaaactattttattgcaattggtggttattctcaaatggcgtttatttgtggatttttggtttactgatgatattgattcattggcaaattgcgtcacgattaacaagcttttcagtagcagattcacgtgcattaaataaaagatcagaacctctgtcatacaagagagaactttgggcagacgtaaatatgactaccgcagtagatggcgtcattaatgacagtataaacttattgtgcgcgaacttccaattggacatcaacgaacggttcctctcaacacatttcacgtttcaggctgacccaagcttacgagcacaatcgatggaaattttgagctcctggggtaatgcgacaaacactcaattcgagaaatatctcaatgatagttctcagaattggcaaaaaacagacgtgcaaattgaacctcttctgagcaccgactctgtcacagtattcatgaaccagtattccgtcccactgaatagagttgccggagccagtacatcattagcaatagacattcaaaagtatgggataatcattaaggaaactaatgtaaccaacaattcagtggcgacactctcatcactgggaaagcgtctggtagaaaaacaagaaccaaaacaaaaaaactcgccctcatcacacaacgttttcaagtggggggttttaatagcctgtttgatcatactgcttcaccacctgctcaccttcataataataaggctgtaa

SEQ ID NO: 1270 - DNA, 1119 bp, Saccharomyces pastorianus
atgaaatgcagggtattgtcagaagctcgtgtttatacgaatatcaataagcaaagaaccgaggaatattgggattatgaaaatactacaatcgattggtccacgaatacgaagagctacgagattgagaataaagtggggcgtgggaaatattctgaagttttccaaggtattaagttggactcaaaagttaaaattgtcattaaaatgttgaagcccgttaaaaagaaaaaaattaagagagaaattaagatcttaacagatttgtctaacgaaaaactacctccgacgactttaccattccaaaaagaacaatactacacaaatcaaaaggaagatgttgtaaaattcactagaccctatatttttgatttgcctcacaccggtcatgcaaatataatccatttatttgatgtaataaaggacccgatttctagaacgccagctttggtctttgaatacgtcgataacgtggactttcgtattctttaccctaaattaaccgatttggagattaggttttatatgtttgaactattaaaggctttagattactgccattcgatgggaataatgcatagggatgttaagcctcataacgtgatgattgatcataaaaacaaaaagttacgattgatcgattgggggttggccgaattttatcatgttaatatggaatataatgtccgtgttgcatcgagattcttcaagggtccagaactactagtagattatagaatgtatgattactctttagatctatggtcatttggaacaatgctagcttccatgatatttaaaagagaaccatttttccatggaactagtaatacagatcaacttatcaaaattgtcaaagtgcttggtacaacggattttgagaagtacttgttgaagtatgaaatcactttaccaagagaattttacgatatggaccaatacatcagaaagccttggcatagatttattaatgatagtaacaaacatttaagcaataacgatgaaataattgatctaattgataatctgttgaaatacgaccaccaagaaagactaactgctaaagaagcaatgggtcacccatggtttgccccaatcagagaacaaattgcaaaataa

SEQ ID NO: 1271 - DNA, 864 bp, Saccharomyces pastorianus
atgtctgacactcaattcgatgctgctttggatatcctcagaagattgaaccccactacgctgcaagaaaatttaaaaaatttgatagaattgcaaccgaacttggcgcaagatctgctatcttcagtagacgttcccctatctgtccagaaggaccccactcactcacatcgcgaatatctctgctgtgattacgaccgtgatattgactcgttcagatcaccatggtcgaacacctatttcccagaattgtccccagaggatttgcaagacagtccctttccttccgcgcctttgagagagatggagatcttggctaatgactctttcgatgtttacagagatctgtactacgaagggggtatctccagtgtgtatctttgggatcttaatgaagatgatttcgatggacacgatttcgcaggggtagtgcttttcaagaaaaaccaatccgaccatagcaattgggacagtatccatgttttcgaagtcacagcttccccttcaactcccggctctttcgattatagagtcaccactacaattatcttacacttggacaaaccaaagaatgaccaggactcccatatgatgttgtctgggaacttaacaagacaaacagaaaagggcatcgccgtggacatgtcccgtccactggacgttatctccacatcacacgttgctaatttgggatccttgattgaggatatcgagtctcaaatgagaaacttattggaaaccgtttatttcgaaaagacaagagatatcttccaccaaacaaagaacgctgcgattgcatcctctgccgaggaggccaacaaaggtgcccatgcagagatcatcaagggtctacagtctctatag

SEQ ID NO: 1272 - DNA, 1251 bp, Saccharomyces pastorianus
atggtcttttctttgtccaaggaatcgcaagctgagttgcagctgttccagaatgaaatcgccgccgccaatccgtctgatttgctacagttctccgccaactacttcaatcagaggctagagcaacagagggcgtttcttaaagccagggagcccgagttccgggccaaaaacattgttctgttccccgagacagacgaacccctgtccaggccccagtcagcgcagtcgcagtccaggtccagatcgagcgtcatgttcaagtcgcctttcgtcaacgaggatcctcactccaacgtgttcaagaacggttttgatatggacccacacgagcaggacgcccaccagccattaaaggaagagcaacaacatggcggcgaaaagggctccacacccccgcttccaatgcacttcaacgctcaaaggcgtacctccgtcagcggtgagacgctgcagccaaacaatttcgatgactggactccggaccactacaaggagaagtctgagcagcagttggaaagactggagaagtccattggcaacaactttctcttcaacaaactcgactccgactcgaaaaggctggtcattaactgtctggaagagaagtccgtgcgcaatgggtctaccatcatcaagcaaggtgaccagggtgactacttctacgtggtggagcagggcaccgtcgacttctacgtcaacgacaacaaggtcaactcctctggtcccggttccagttttggggagctggctctcatgtacaacagcccccgtgccgccaccgtcgtggccacttccgactgtctgttgtgggccctagataggctcacctttaggaagatcctgttgggcagctctttcaagaagagactaatgtacgacgatctgttgaagaccatgcccgtgttgaaaagcttgactacgtatgaccgtgccaagctcgctgacgccctggataccaagatctaccaaccaggcgaaacgatcatccgcgagggcgaccagggggagaacttctacctgatcgagtacggcgccgtggacgtctccaaggacggtcaaggtgtcataaataagctgaaggaccacgactatttcggcgaagtggccttgctgaacgatttgcccagacaggccaccgtgaccgctacaaagagaaccaaagtcgccactttgggtaaaagtggtttccaaagactattaggtcctgcggtagacgtattgaagctcaatgaccccacaagacactga

SEQ ID NO: 1273 - DNA, 426 bp, Saccharomyces pastorianus
atgacgctcgtctccaaattactttatgcagtttctacgttagtgctattacactctggtttctcaagttatgaatttcatcatttattaaaacttaaatcgctaaacaatgcacaaaccgtaatccatgaattgcccaaggatataaagtatgagacgtatgcaggattactattatttgttcttgcagtatttacgtctttcaagaaactacaatatttgccaattgagagcaacgacgggatgataatatctgaagggaactatctaaaggaaattgcattgaataaagccaccaacgtggataacttgatcggtagcaatcctaatggtgaaatcgttttcactccaagctttgttgatgtccacgctaagaggaaactttcaagagaatgggcttctaataatgagaaaaaggaaaaatga

SEQ ID NO: 1274 - DNA, 570 bp, Saccharomyces pastorianus
atgtccagttttttacttatcatccccgaagacgtaatcaaagagtactccaaaggagataagctggtcgttacaggggagttcgataactggggacactcagagtatgttttgcagtacgacagcagcgcacagaactacacggtccaaatacccagacgtaaggaccaacgcagcacgatgttcaaagtggtgataaatgataagaagtgggtcaccctcaactacttcgacaccgtgacggataggtcagggcacaccaacaatgtgctgcatttcaaagacaacgaggcaagccagctcatggacgtaccactgtcaccacatgcacgggccagcactgccaaggggaagccagaggacgactcgttgaacgactacgtcaacttgtcgtcgcatagcgacctaagcagcacggaggagatcgtgtactggaactctgatatggaggacgagaacctggacgccaccatccagtgtgacttccacgaggcgttcaacagcaggaaggagtctctgaacgggctaatgtgtattgccaagaaggtcaagacctactggaacaaatag

SEQ ID NO: 1275 - DNA, 1050 bp, Saccharomyces pastorianus
atgaaggcgttccaggtttgctcttatctgctgggcgtggcccctgcagtactggcccacgggcttcaccataaccatgctcatggccagggcgcagagcacgagttcaagcagggctctgtaatcttgaagcaagaatccgtcctttacccgctggtgcagttcctacaggactacgtgttcgccctgggcccccgctacaatgccctcgtggccatcctgatcatacagtttatgccatgtctctttgtgctgctggttcccggactgcgcagaaccgatcctgccagcttgacactgcccttgctggtttcgttttcactggggtcactgctgggtgacgttttcttgcacatcataccggaaagccttatcggcggtagtgcagacgatggcatgatggtcgggtttgctatcttcctggggtttatctgcttcttgaccctggacaaaacgctgcggatcctatccggtgcctccaacgacgatggtggcatgcactcccacttacacggccatgcccacccacaccaagacgcagagaagaagactggcttcaacatgtctgcgtacttgaacgtcatatccggtatagcccaccacatcaccgatggcatagcgctggcgtcgtcgttctacagctctgcgcaggtcggcataatcaccagcatagccattactttccacgaaatccctcacgagctgggcgactttgctgtcttgctctccagtgggttcacgttcccacaggccatacgagcccaaatgataacggcgtccggtgccgttgttggcaccgccattggttgtctgatcaacgagatcgggggctccagccatgcaccaacatcgtcgtcgagtggtgtttccgagctcatgctgccgttcactgcaggtggcctcatttacatcgctacgaccaacgtggtgcctcagatcctgcaaagctccacccataatagcaagtgccaagagttcaagcggtgggtcttacaactgggctcggtttttgtggggtttgccgtcatggcactcatggacgaccactga

SEQ ID NO: 1276 - DNA, 1272 bp, Saccharomyces pastorianus
atgtacagatcgactcttactacgctcgccgccgggtgcaggccccaggatgcaggactcctcgttactaaagccctgttctccacctctgtcactcgtgcccaaggtggaaaccctcgatcgccactgcagattttccgtgacacatttaaaaaggagtgggacaagtcccaggagctgcaggagaacatcaagacgttacaggatgcctcaggaaagctgggagagtccgaggcttacaagaaggccagagaggcctacctcagggctcagagagggtccacgatcgtgggtaagacgttgaagaagaccggtgagaccgtcgagcacatagccactaaggcctgggattccgaactcggtaagaatacaagaaaggccgcttctgccacggcgaagaagctggacgagagctttgagcccgtcagacagaccaagatctacaaggaggtctccgaggtcatcgacgatggcgagagctcccggtacggtgggtttatcaccaaagagcaaagaaggctcaagcgtgagaaggacctggcctctgggaaaagacacagggcggttaagagcaatgacgaggcgggcacggcagtggtcgccacaaacatcgagtccaaggagtcgttcggcaagaaggtcgaggactttaaagagaagaccgctgtgggccgttccattcaatcgttaaagaacagattgtgggatgaaagtgaaaaccctctgatcgtcattatgaggaaagtgaccaacaaagtgggcgggttcttcgcggaaacggaatcgtcccgtgtgtacagccagttcaagatgatggaccccactttttcgaacgaaaatttcaccaagcacctgagagagtacatcgtcccggagatcctcgaagcgtatgtgaaaggcgacgtcaaagtcctaaagaaatggttcagtgaggcccccttcaacgtctacgccgctcaacagaagattttcaaagagcaggacgtctttgctgacggccgtatcctggacatcagaggcgtcgagatcgtcagcgcaaagctgttggcccctcaagacatcccagtcttggtggtcgggtgcagagcgcaagaaattaacctttacagaaagagaaagaccggcgagatcgccgccggtgacgaagccaacatcctgatgagctcgtatgccatggtcttcaccagagatccagagcaaatagatgatgacgaaacagagggctggaagatcttggagtttgttcgcgggggttctaggcaatttacctga

SEQ ID NO: 1277 - DNA, 960 bp, Saccharomyces pastorianus
atgagtgaagaaggcccccaagtgaaaataagagaagccagtaaagataacgtggatttcatcttgaccagcgtggatttggccatggccaattctctacgtagaatcatgatagcggagatccctaccctggccatcgactctgtcgaagtggaaacaaacactactgtcctggccgatgaatttattgcacacagactaggtttaatacctctacaaagtatggatatcgaacaactagagtacagtcgtgattgtttttgtgaagaccactgtgacaagtgttccgtggtgttgacattgcaagcctttggagaaagcgaaagcactacaaacgtgtacgccaaggacttagtcatcgtgtcgaaccttctgggacgcaatatcggtcaccctgtcatacaagataaagaaggtaacggtgtgcttatttgcaagctgagaaagggccaagagctgaaactaacttgtgttgccaaaaagggtatagccaaggaacatgccaagtggggtccggcagcggccatagaattcgaatacgatccttggaataaactcaaacataccgattattggtacgaacaggattctgccaaagaatggccccagtccaaaaactgcgaatacgaagatcctccaaacgaaggcgacgcctttgattataaagccgaggcagacacattttacatgaacgtggagtccgtagggtccattacagtcgaccaagttgttgtcagaggtatcgatacgttacagaaaaaggtcgcttcgatattgttggctctgacacagatggatcaagataaagtcaatttcgcatcgggcgataacaacgccgcctcaaacatgctgggaaccaacgaagacgtgatgatgtcgggtgctgagcaagatccatatttcaacgcatctcaaatgggtaatactggatcatcaggcgggtatgacaatgcttggtga

SEQ ID NO: 1278 - DNA, 1044 bp, Saccharomyces pastorianus
atgaacagtgatgaagaggaatatgccaggcaattagaactacaaaggaaagcctttgaaagccagttcggatctctagagtccatgggattcgaagataaaacaaaaaatatacaggctgaaaaagatacaagctccggttcagacggtgaaaaggacagttcagacgatgctggtgaccttgaaaatactaatgggaacggccacttctcttctgaagaggaggcggaggatgatgtaagcgatgaggatgacgaacagaaacccaagctgaaaacgcaacccaaagttatcaagttcagtgggcccagcgatgtttacgttcctccaagtaaaaaaacacagcaactactgagaagcggtaagacattatcgcaaataaataagaagttggagagcactgaagctaaggaggaaaaagaggatgagactgtggaagcagaaaatttgcaaaatgacctggagttgcagcaatttctaagagagtcacacttgctgagtgccttcagcaatggtggaagtaactctgcggatagtggagtagcattgactctgcaaagtatgggcggtggtaacgatgacggtatagcttatcaagacgaccaagtgattgggaaagctagatcgcgtacattggaaatgagactaagcagactgtcgaaggtgaatggacacgaggagaaaatcaacaaactagaaaaagtgcccatgcatattagaaagggaatggtcagcaaacacgtccaaaggattaaaaaatacgaacaagaagctgcagaaggtgggattgtcttgtcaaaggtgaaaaagggccaatttagaaaaatcgaatcgacatacaagaaagacatcgaaaggcgtattggtggaagcatcaaggccagagacaaagaaagagccaccagaagagagcgtggtctaaaaatcaccagtgtaggcaggtccacgaggaacgggttgattgtatccaaaaaagacattgatcgcatcagcggaaacaacaagggcggtaaattcaacggtaaaaagaattcccgtcgctag

SEQ ID NO: 1279 - DNA, 2769 bp, Saccharomyces pastorianus
atgactgtggcttattccctggagaatctcaggaagattagtaatgccctagtgggtgatcaactggctaaagtagagtacttcctggccccaaagtgtctgattttccagttcctggtggccattaggccggatgatagggtggcattgaagaatgcgaagttggatttgttgtatactcttttacacctggaaccgcaacaaagagatatggtaggcacatcgtaccttgatactgtctctgcgatctacaagtccatgactctggcaagaagttttgcccagaatgagtctttgaccaactataagtacgtgaaacttctgaatttgtgtgcagaagtctaccccaattgcgagttttcagacctacagtaccttcagaaggggtttatccatttggtcaacaataaatttttgagaggcttatgcagtgctaatgaagttactacaattattgaactgttgaaattcttttcacttgtggacgaggaaagggacggtggttctgatttgacggatcctataaagcaagaaagggaagtgacagaaatttcgcactatcaagattttaatatggcggattctcttgaacagataatagtcaagacttccacgaagtacctggaccaaataagcctcaaatacatagtgagactcaaggtttccaggccagcgtcgccctccagtgtcaaaaacgatccattcgataataagggtgtggactgcacccgcgcaattcctaaaaaaattaacatctctagtgtttatgactcaagtttactgtcattggggttactgctttatttgaggtactcttatgtgataccagacgataggaaactgtggaatgacctgaccttcaaggcatttattctgggccttttaaagagtgatgatgtaaatatcagatgcatttccttaaagttcttattgcatccataccttacagaggataaaagatgggaggattcgcgtactctggaaaaaatactgccatatctcgttgaatcgttcaactacgacccattaccttggtggtttgatccattcgattcactagattctttggtagtactatataacgaaactactccaatgaataatcccgtactcgccaccctggcccatacaaacgtcgtattttgtattctgtctcgtttttctcaatgcctttctttaccacaacagaacgagtcttctttgagaacgactacaaagttcatcaaactgtgcgcctcctttgcagcctcggacgaaaaataccgtctattattattgaacgataagttgttattaaaccacttagaatacgggctggaatcacacattactttgatacaagattttatatcattgaaggatgacataagagaaacggttgccgagactcattttatgtgtttacctcccatatatgaccacgagtttgtggcagcttggttacgattgctgaagtcattctcaagaagcgtttctgcccttaggacgactttgaaaagaaataaaatagcacagctacttttacaaattttgactaaaacatataccttaacgaaggaatgctattttgctggacaaaattttatgaaaccggaaatcggaattatgggcattacgctgggtagcatttgtaattttgtggtggagttctctaatttacaatcattcatgttgagaaacggtataattgacataatcgaaaaagtgttatcagatcctttattcaactcaaagaaagcctgggaagatgacgaaaatgaaagaagaatcgctttgcaaggtataccagtacacgaagtaaaggcaaactctttgtgggtgttaaggcatttaatgtacaactgtcagaacgaggagaagttccaacttttagccaaaatcccaatgactttaatcctagattttattaatgattcgtgttgggcagtacaagctcagtgtttccagctccttagaaacttgacttgtaactcaagaaaaattgttaatattctcctggaaaaattcaaagatgttgaatacaaaatcgatccccaaacaggtaataaaattagcatcggttcgacgtatctttttgagttcttagcaaggaaaatgagactattaaatccactggatacccaacaaaagaaggcaatggaaggtgttttatacataattgtcaacttggctgcagtaaacgagaacaaaaagcaactggtaatcgaacaagacgaaatactgaacattatcagcgaaatattgatggaaactacaaacgataattcacgttatggcaacgacagtaatttgaagttagcgtgcctatgggtcctaaataatttactttggaattcatctgtttcacattatactcaatatgcgattgaaaatggtctgggaccgggacattcaccaagtgattctgaaaatccacaatcaacggtcacgatagcgtataatgaaccagttgctggtggatactccagaggaaagtattttgacgagccggatggcgatgatagcagtagtaatgccaatgatgacgatgatgatgatggtgatgatgatgatgacgatgaaggcgacgagtttgttcgtactcccgcagcgaaaggtagcacttcgaatgtacaagttacacgggctacggtggaaagatgtagaaaattggtggatgtaggtctatacgatttagtcaagaagaacattactgacgaatcgctatctgttagagaaaaggcaagaacgttgctgtatcatatggacttgcttttgaaagttaaatga

SEQ ID NO: 1280 - DNA, 480 bp, Saccharomyces pastorianus
atgtcatacagtgtgatggacgaatggaagagcaagttgagcaagaccagcacttcgacgtacgtcgtgctggccataatcgcggccgtattcttggtcacggtcactagacctagcagtagcaagggaaagagcggcaagaggaagggctcgaagaaggacaagaagagcaaaggccgcttcgaaaaggccccggttccacttaccttggaagaacggatcggaaatgtgtccttgagatacaataacgaactgagagaccgaagcaaggatcttataagtaggttcgattccggtaacgaaaaggatgtttatgaacgcaactactgcaacgagatgctgttgaagttattgattgagctggacggtattgacctgattaatgtggatgagtctttaagaaagtcgttgaaggagaaaagaaaagctgtcatcaaggaaatccaggcgacgttgaaaagtctagactctcttaaataa

SEQ ID NO: 1281 - DNA, 1779 bp, Saccharomyces pastorianus
atgttcattataaatcacttttgtttacgacttctactggtgggtctcgcgatctcaaacaccgttgctgctttaagaagcgatggcagcggtcatctggaattttcactaaagcatgaagagcagatgtactacgctacaactttagatataggtaccccatctcaacaactgacagtactgtttgatactgggtctgcagacttctgggtgatggactctagcaatccgttctgccttgctaaatccaatacaacatattatcaaaacgcgacttataatggcagcaggatcaccccttcagtggattgtttgtctttgagtacatacaacgagaacagctcttccacctatcaagatcttgataacggcaggttctatatcatatacgcagacgggacgtttgcagacggttcttggggaaaagaaaccatgtcaattgacggaattaaaatccatgatatacagttcggtttagccaaatatgctacgacgccagttagtggtgtcctgggcatcggtttccccagaagggagtccgtgaaggggtatgacggtgctcctaatgaatactatcctaatttcccacaaattctgaaaagtgaacatattattgacgtggtcgcatattcactcttcctaaattcgcctgactctgatattggttctattgtgtttggtgccattgatgaatcaaagttttctggcgatttgtacacatttcccatggtaaacgaatatccaactatagtcgatgtcccagcgactctagcgatgaccatacaaggtttgggggcccagaataaaagcagctgcgaacatgaaacattcatgacaaccaaatacccagttttattagactcaggaacatctttgttaaacgctccaaagtccattgcagataagatggcttcctttgtaaatgcctcatatagtgcagatgaaggcatatacatactagattgcccagactccacaaacggtgtagaatacacgtttgattttggtgatctgcaaataaacgttccattaactagtttgattttgagtcctgagacagagggcggatattgtggttttgctgtccaaccaaccaacgattcgatggttttaggtgatgtgttcttgtcttctgcatatgttgtgtttgatctcgataactataaggtatcgttggcacaggcgaattggaatgctagtgatgattcaagaaaattggtgaatattcctactgatgggtccattccgggtggtaagagtgcaactgcacaaccttggtccactaatgatccatttacagtcacttccgatatttatgcatctgacgtttgcaaaactacgctctcttcgcatcaacagacaggctcctcatctattccacagactagcatgcaagctcttaattccacaacaagggttgtgggagtcaggtcgactactacattgagcaaaactactcaaacaggagtgacaaaccaaggggaaagtactaacatagaaagtgcaacggcgcgtaatcaatcagcgccttattacgatgcgaaaagttcagatagtgggctaatcatagtaactgagtcatcgggtagaaaaggtttctcaagtcctacgcactcaatgcctcaaactacagttaacccaactgcgacgaaaagttctgcactaatatccatatctgtagggaagagtataaatcgacctactcataagaccatcataacagaaaccgttacgaaatattctacagttgtaataaatgtttgtaaaccaacattttaa

SEQ ID NO: 1282 - DNA, 789 bp, Saccharomyces pastorianus
atgtccttcactaaaatcgctgctttactggctgttgccgctgcttccaccaaattagtttctgccgtggacgaatatgaaatcgttgaattcgacgctattctggttgatgtcaaagccaatttggaacaatatatgtctttggccatgaacaatccagattttactctaccaaatggtgtcttggatgtctaccaacacatgaccacttacagtgctggtgatgatggttacactagttggtacaccgaattagattttgctcaaatcaccaccgctatgcaacaagtgccatggtactcttccagactggtacctgaaattctctctgctttacaaagtgccggtatcactgttaccgctttaggtgacgatgccgctgctgcttcttcagctgctgcttccgaatctgcttccgaatctgcttcagcttccgaatcctctaaggcatcctcctccgctgctgcttcctcttcagcttctgaatcttcttcagcttccgaatcctctaaggcatcctcctccgctgctgcttcctcttcctctgctgccgcttcctcttctgccaagagctctgcctcttctgctgcctcttctgctgcctcttctgctgcctcttctgcatcttccaaggcatcttcctcttctgccaaggctacttcttcagcagcaaagtccagcaacggtacctcctctgctagtaagaacgctggtgccgctatcaacatgggtttcttttctgccggtgttggcgccgtcgttgctggtgcagccgccatgctattatga

SEQ ID NO: 1283 - DNA, 648 bp, Saccharomyces pastorianus
atgggcgaagcactacgtaggtcagctaggattgcaacatccaaaagagtgttggaaaatgaaggttccaaactagttccagtttcgccaccgaaaccggctaagaagaaggtcaagacgattccaaaactggatatcgaagaaccagtaaagcgggtagaccacagttcgtcaggtgctaacgaattggaaatcggagatgctatccccgatttgagtctcttaaatgaagatgatgagtctgtctccttgaaagaaatcgctaaagaaaacaaaattgtagtatttttcgtttatccaaaagcaagcacacctggttgtaccaggcaagcctgtgggttccgggacaactttgaagatctcaaggaacatgcggctgtctttggattgagtgcagattctgtgatatctcaaaaaaaatttcaaactaagcaaaatttgccctaccatttattgagtgatccaaagagagagtttattggtttgttaggtgccaagaaaacaccgctttccggttctgttagatcacatttcgtctttgctgatgggaaattgaggttcaagagggttaaaatatcaccagaggttagtgtcggtgatgctaaaaaggaagttatggaactcgctaaaaagtttgaaaaagaatga

SEQ ID NO: 1284 - DNA, 300 bp, Saccharomyces pastorianus
atggtgaatgtaaaagtggagtttttgggcggattggatgctatttttgaaaagcagagggtgcataaagtcaccgtggacaaagaggatcctgtaacagtgggtgacttgattgagcatatagtgtccaccatgattaagaatcccaacgacgtcagtattttcatcgaagatgactctataaggcccggcatcctcacattaatcaacgatactgattgggagctcgaaggtgaaaaggactgtgtcttagaagatggcgatatcgtctctttcacttccacgttgcacggtggctaa

SEQ ID NO: 1285 - DNA, 672 bp, Saccharomyces pastorianus
atggaggagaaagaactaagcgatttgttggccaatgtcaagatagacccgagtctggcgtcgaggatagaccagatggatgacttcaaactagcggaattgatggtgttaaagacggatatcgaggcccagctggaggcttatttcagcgtgctcaaggagcagggtattggtatggattctgcgctagtcacgccagatgggtatcctcgctcggatgtagacgtgctgcagatcaccatgatcagaaagaacgtcaatatgctgaagaacgacttgaaccaccttttgcaaaggtcacatgtcctgttgaatctgcactttgatagaatgaacgtcaagactcaccaaacggtggacggcaatgataggggcgacgaagatcgacccatccagtacactatcccctttgccttcatcagtgaggtcgttgcaggcagtccatcggataaagctgacattcaggtcgatgataagctgatttcgattggcagtgtgcatgcagcaaatcattccaaactacaaaacattcagatggctgtcataaagaatgaagacaagtcattacctgttcgtctcttgagagatgggaaaattctcaccacgtcgctgacaccttctaggaactgggacggcaggggtcttttgggctgcagaatacaagaattgtga

SEQ ID NO: 1286 - DNA, 2106 bp, Saccharomyces pastorianus
atgacaacacatttgaagaggcacctattggccttcctgcctttcatagctcttcttatagccctcacagtaactgctgctgaaccacccgaaggatttcctgagcccttgaacaaaaataacttcaaagaagagctgtccaaggggctgcatattatcgacttctatagtccatactgcccccattgcaagcacttggaacctgtctggatggagacgtgggatgaatttagagatgaaggcaagaaactcaatataactttttcacaagtcaattgtgtcgagagtgcagatttatgttcagaggaaaatattgaatcctatcctgatgttagactttataatccgtcaggatacctgaaatcgtttactgaaaggccaaaaaccaaagagtctttgatggcgtttgcgcgtagggagtctatggacccagataacctcgacacggatttggattctgccttaagtcaaagtcagcatctcgaaggttttgattttatcaagctgattgctggtaagaccgataggccatacttggtttctttctggccaaccaaaaatctgaaagatagtgatgattctgtaaatttcgagaattgtgacaaatgtcatgaattccaaagaacttggaaaatcgtttcccggcaattggttatggaggatataaagtctggccacgttaattgcgaatccaacccaacgctttgtaaggaactagggttttccgacttggtgaaaataaccaaccacagggcggatagagaacccaaagtggcattggttttacccaataaaacttcaaataatttaatcgattatccaaagggcttctccgtgaagtcaaacgattatgtggattttgccaaaaggacttttgccaacagtcagttcccgaatataacggaagaagaacttaaaaaagtggctagggaaatcgactttgtaccagaaaagggagcatcgttcaacaatgatattcacttggtctttgcatatgaccccgaaactgtcgtggttgaagactttgacattttagaatatctgattgagcctctttctaagattccaaatatttatttacaccagattgacaaaaatttgataggcctatctcgcgatatttttgaaaatatgtataaattgattaacgattacaacaccggtgaagctcaaaagaattttagtgaagaatactttaccatgaacacggttacacaactgccaactttctttatgttcaaagatggcgacttcgtatcacatgtttaccccggttattcgacaacagaaatgagaaatgtcgaggaaattatgaaatgggtgcaaaagtattccaatcccttggcgacagaaatcacctcttctaatttgagggagtggatgtcattccaaactgaaagttacagtaatttagccattcaattagtaagtactggtagtggtaagcaaattaagggaagtaatacacttatccgtaagcttcttctcgcgagcttcgattacgaacatgttcgtatggaaaataactttgaacaaataaatgaaaaaagaacgaagaaagctgacagtattaagctactaaaggagaaaaagacaccagccgacaaaattgttgataagatgcgtgaagaaattcctcatatagacaataagaaattattgttgggttatttagatctttccaaagagaaaaagttttttagaagatttggtataacgggagaccacaaggttggagatgtcattataattgacaaatcaaacaacttctattatacaaaagataattttggtaatactttaacggccaatgagcctctcttactaagagaggcatttgtctctctaaatattccatcgaaggccttgtacagctctaaaatgaaggggagattgatgaattctccattccacaacgcttttagcttcttagacatagtccatcagaacggcatttacggctatctttgtatcattattttgattatcataatccttaaaagcccctctttttacagaaaatataaagtaaggaggaactataattcgaagagaaatgcagtcggcatcttagggaacttagagaagaagcaaaatcaagactag

SEQ ID NO: 1287 - DNA, 2841 bp, Saccharomyces pastorianus
atgaaactgttcatcggtagaaaaacacgttcggttgtcatctcttccaataattactgtttatcgtttcaacgactgcgcagcataccaggagccagttcccagcagcgtcaactaagtaaaaatcctagcgtaactataaaatctttccctgatacagacctctcaaatgataataactatatcgaagtcaaaagctgcatattcaatgggttatttgggctcgtgtgtctcaatggtgatatatatgtcgccgttatatctggtgtccagaatgttggatttcctagatggaaattagtagatcaccaagtaaggccgtcagagaacatttataaaatattagatgtcgatttttacagtttagaaaatgacgtttttgattacctcttttatgaaaggtcagaacaaaactacgataaattgatccacgaacatccctgtggtcccttgaagaaactgtttagtgatggaacattttattattctagagatttcgacatctcaaacatcgtaaaaaaccacggttcatcacataacttggaatacactgtggataaccaagatttatccttcatttggaacgctaatttggctagtgaggttatcaattggagaagtaaaatttcgaatgaagagaaacaactctttgcaaatgcgggtttcttaacgtttgttattcgaggttattgcaagacagcgttaatagaaaacggcccaaatacagcctccataactatcatttccaggatctcaactgaaggtaagcaggatacgctcgaattagagggcattagtgaagacggaaagatttccttgtttgtcgaaactgaaattgtggtaaccacagaaaagttcattttttcctacactcaagtaaacggaagcattcctcttttttgggaatctgtggaaagtcagctgttgtatgggaggaaaatcaagataacgaaggatcctatcgaagctcaaggagcctttgacaggcattttgataatctaacatcaaagtacggtgtcgttagtattgttaatatcataaaaccgaaaagcgagtcacaagaaaagctagcactgacatacaaggattgcgctgaatcgaaaggaataaaaataacaaatatagaatacagctctagtgttctaacgaaatctccccataaactgctttatttgctaaaacaagatatttacgagttcggcgcctttgcgtatgatatctccaggggcatctattttgcaaaacaaacgggtgtgataagaataagtgcatttgattcaattgaaaaacccaacacagttgaaaggttagtgagcaaggaagtccttgagttgactaccaatgaaatcgatgtatttgagcttacttctctattcttagatgcccatgataagctgtggtcagaaaactattactggcttgatcgaacatacaccaagcatacaaagagttctggaaagtacacgaaagtttattcgaaattgtttggttcacgagttagattatacgatccgctacacatctacatctctcagcacttaaagcaactaaggacaaaatatacctttgagaaagatatctcaatatttgcagggacatttaacataagtgggaaaatccctaaagatgatataaaggattggatttttccaaagtcaatgtctacggatgatgaaatggctgatctttatgtgataggattggaagaggtggtggaacttacccctggccacatccttgctacggatccatacgtccgccaattttgggaaaagaagatactgactttattaaatgggcctggacgtaaaaagaaatatgttcgtttatggagcacgcagttgggtggtattttgcttctcttattcatgaacgagacagaatattcgaaagtcaagcatatcgaaggggatgtaaaaaaaaccggctttggtgggatggcttcgaataaaggagccgtcgcagtcagtttcaaatattccgctacaaagttttgcgtactggtgtcacatttagcggcagggttagaaaatgttgaacagagacacaatgactataaaacaatcgcaaaaagcattcgattttcaagaggactacgaataaaggaccatgacgcaattatttggatgggtgatttcaattacaggatattgatgtcaaatgaagatgttaggcgaaaaattgtttctaaagagtatgccggtttatttgaaaaagatcagcttaatcagcaaatgatagccggtgaatcattcccttatttctacgaaatggcaatcgatttcccgcctacctataaatttgatcctggtacaaaaaactatgataccagtgaaaaaatgaggataccagcttggactgaccggattctaagcagaggagaagtattaaaacaattggaatatagatgttgtgaagatatcgtgttttccgatcatcgaccagtatatgcaacattcagggccagagtgactatggttgatgaacaaaaaaagactactctgggtacacaaatctacgagagaattatggaaaaattagaagggttggatgatgatgagaaaattgcagttctaagtgatgacgcatttgttattgacagtattgagggcaacgatgcgatagctgggcctacgcactctccaacaccaattcctgaaccgaaaagaggcagaaaattaccaccacctagttcagacttgaaaaaatggtggatcgggaacgggaagcaggttaaagtggttcttgacgtggacccagaagtttatatgatcaacccagagagggatcccaacccttttatcgagaacgaggatgaaacgctttttatagaaagataa

SEQ ID NO: 1288 - DNA, 2991 bp, Saccharomyces pastorianus
atggctagtgcaggtgattgctttagtgattttgaagacgatgaactagataagctgtatgaaaaggctatcaacaagaccgtccaagaaaccgtaataagacgagccgtaccggtccaaagagatctcaaaaacaacgttttgcctggtcagaaaagtgtatacgaagaaatacaaagagatgttagttttggccctacacatcatgagctgaatcatgatgctttatctttttacgtgtatcctacaaattatgagctaagagattaccagtacaccattgtttataaatcattgttgcaaaacacgttatgtgccattccaacaggtttgggtaagacattcatagccagtactgtaatgttaaattatttccgttggactaaaaccgcaaaaattattttcactgctcccacaagacccctggtggctcagcaaatcaaggcgtgcttgggtataacaggcataccttcagatcaaactgccattttactggacaaaagtaggaaaaatagagaagaaatttgggctaataagagggttttcttcactacaccacaagtggtggaaaacgatttgaaaaggggtgtattggaccccaaggatattgtgtgtcttgtcattgatgaagctcacagagccactggttcctatgcctatacgaatgtggttaagttcatagacagatttaattcatcatataggctattggcattgaccgccaccccgggttctgatctggaaggtgtacaagaagtggtcaataatctagatatttccaagattgaaattagaactgaagagagtatggatattgtcaaatacatgaaaaaaaaaacaaaggaaaaggtcgaagtaccgcttatattagaaattgaagatataattgaacaattgggtatagcagtcaaacctgtgcttcgacaagcagtggaactgggcattcacgaagaatgtgacccttcacagataaatgcctttaaggccatgcagcaaagtcaaaaaatcattgctaaccccaccatacctgaaggaattaaatggaggaatttttatattttgcagcttttaaataatgttgggcaaatgttgaagagattgaaaatttacggtataaggacatttttcaactattttcaaaataaatgtatggaattcactacgaaatataacctaaaaaaatctactaataaaactgcggctgaattctactaccatccaattttgaagaatattaaaaagcaatgtgagcattatctaaatgatccgaaatttgtgggccatggtaaactacaatgcgtcaaagatgaattaatggaatttttccaagagagaggttccgactcaagggttattatttttacagaattgagagaaagtgcacttgaaattgtcaaattcatagactctataactgacgatcgaatcaggcctcatatttttattggacaagctcgtgcaaaggaaggttttgatgaagtcaaatatacaaggaaacatgcgccaaaggggaggaagaaggccgaaaggttaaaaaggcaagaagaagatgaatccttggaagctcaacgacgtaagaatgtggataatgataaatttgaaagaagtgcaagacggacggggagctcggaagaagcacagattagtgggatgaaccaaaaaatgcaaaaggaagttatccataattttaaaaaaggtgaatataacgtcctagtttgtacttctattggtgaggaaggtttagatattggtgaagttgatttaatcatttgctatgatactacaagtagtccaatcaaaaatatccagcgtatgggcagaaccggtagaaaacgagatggtaaaatagtattactgtttagtagcaacgaatcatacaaatttgagcgagctatggaagattattcaagtcttcaaggactgatatctaaacagtgcattgattacaaaaaatcagatcgaataatccctgaagatatcattcctgaatgtcggaagaccctcattacgattaatgatgaggacgaagtaattaatgaaatggaggatgttgatgacgttattcgttatgctactcagtgtatgatgggcaaaaagccgaaggcaaaaaagactataataaggaaaaagaaggttaatgaaattaaaaataagaaaaaatttttcatgcctgataatgttgaaacaaatattgttagtgcaagcagtctactcaataagtttgtagtggacaaaagtggtgagaaacaactagtaacaaagaaagaaaacactaataaaaaaagaagagttttcaaagctttagatggtttagagaatgattcaacagaggaagcttcttcttctctggaaactgaggatgaagaaatgagtgataaggatgatgatatgttcatcgccaatgttcaaaacctagccccaaaaaaactaaaacttaccactaactatgataggaagattatagcacaatctaaagatccttctaattttgataatcctagtatggctacatttgtgaacggtcacagtttcccaatgaaaagtgacaaggaactgaaaattccagatttgaaagatattaaagagcagacgcatgctcttaacagcaccggtgacaagaacaaccttgcattgaattcagatgaaaaggatttattcagggatcactatgtaccagaaggcgcttcttttgatgttgagccaaatcttctacagtttaataaggaggccaacgtgccacactgccagaaggtttccggggtcatctcattgttcgatgatgagaggaatgatgataagaagagaacaattgagatgaactacaccaaatgtttggcgagaaacatggtacgagacatgcaaaaggcctcagaagcccaaaataagagtcagacagaaaatagtaacagtatcagctatgaatcatctcagtctttgactttatcgaatgcagaattggatgatatactaggttcagattcggatttttaa

SEQ ID NO: 1289 - DNA, 1296 bp, Saccharomyces pastorianus
atggtcgttgacactgaatattacgatttgttaggcgtatctactacggcgtccgccatagaaatcaaaaaagcttacaggaagaaatctattcaagagcatccagataagaaccctaatgatcctaaggctaccgaaaggtttcaagctatctctgaagcttatcaggttttaggtgacaacgagcttcgtgtgaaatatgataaatatggaagaaaagaagctataccccaaggtgggtttgaagatgcagccgagcaattctctgtcatcttcggtggagatgcctttgcctcttatattggtgaactaatgctactgaagaatttacagaagactgaggaattaagtgccgctgatgaagccgaaaaggagaaggaaaatacagaaccaaaggatgaatctacagaaagcaataaaacggatgctgatgccgcttcccttcctgagccaacaacagctaataacaatgaaagcaacaataaggcaaagggaaatcctagtgacctgagtgtacacgacggtagcaaaaaagatgagcaagtaggaacagagacaaagaaaaaaaagacaaaactagagcaatttgaagaagaacaagaattagaaaagcaaaagaggatagaacaattgagtaaaacgttaattgagaaattatcgatactaacagaaagtgtctatgatgatgcttgtaaagattctttcaaaagaaaattcgaggaagaggcaaatcttttaaaaatggaatcttttggtctagacattttacatacaataggtgacgtctattacggaaaggctgaaattttccttgcgtctcagaacttattcgggatgggcggtatattccactctatgaaagcaaaagggggtgtctttatggatacattgagaaccgtttcggcagccatagatgcacaaaatactatgaaggagctcgaaaagatgaaagaggcgagtacgaatgataaacctttgttagacaaagacggaaatgagcaggtaaaaccaactaccgaagaattagcacaacaagagcagctgttaatgggcaaagtattatcagctgcttggcatggttctaagtacgaaataacatccactttacgcggtgtctgtaacaaagtattagaagatgactcggtgggtaaaaaaacactaatcagaagggcagaagcaatgaagctattgggcgaagtcttcaagaagactttcaggacaaaagttgaacaagaagaagcacaaatttttgaagagcttgttgcagaagctacaaaaaagaaaaaacatacctaa

SEQ ID NO: 1290 - DNA, 4473 bp, Saccharomyces pastorianus
atgtataatccgtaccagcaacagggcatgggctaccagcagcagcagcagcaaccgacggggttctacccgcaacagcagcaaggccaacccgcaaatcaagcccagggccagccccaaccacagcagcaaatggggtttaaccaacctcaggccactggatttagtgccttgcagcaaaactttggcaactccttcgctgatacgccacagcaggcacaaactggttacaacaataacggtaataacggcaatgtgtatggcaacaacagttttggccaacagcctcaacagcaacaacagcaacaacagcaagtgcaaccgcaacacacgggatacgctcccaatgcaaacatgagtgctggtgtgcctatgattaacactccgggctcaataccgccacctcatccggcccaacaacctcagttacaatccatgcagcctcaaggtacaggctactatcagcaagtcaatgcggcaaatgcgcaacctttacaatctcaaggaacaggttactatgtgtctacaccgaatttggtttcttctaaccaggctcagcaacctcttcaagctcagggtactggttacttccaatcccagccccaacaagccccccctcctcctccgcgagctcagcctttgcaacctttgaagccacagcaaactgggttttacgttcagcctcaaaatcaaactcccttagagccattgaagcccactgcaactgggtttgttaactcatttgccaataatggtttaaacaatgacatcaagatccctgctatgaggttgtcctttatcactgcacaggatcaggccaagttcgagactttgttcagatcaattgtcaccaacggttccaatactgttaatggcgctaactgcagaaaaattttgatgagatccggtttaccaccatcccaactggcaaaaatatggactctctgtgatacatcaagagcgggtgaattattgttccctgaatttgcattggccatgcatttgatcaacgatgtcctgcaaggtgattctattccttatgaactagactccaagacaaagaacgaggtttcaagtttcattgacgccatcaatctaagtattgcaaaccaagattttgtggccaaagatgctccaaaaacaccttttgacgaattcattaccgcaggcgtgcagaatttgcaaccccaaccaacaggtttcatgcctcaaactagttttggcattcccttacaatctcaaatgactggtggtgcccccatgttgaatcctcaatctactggaatgatggcacccactacgtttaatatgtcaatgaacaccggcgccccaggattgaccactcaaataacgggtggagcgcccatccctatgcagcctaccattactggtaacgctttacaacctcaagtcactggcatgatgccacaaacttcgtttggtgttaacttaggaccacagctaactggtggcgccttgcaatctcaatatactggaggatatggttctgtaatgcctcaacagcccaataatgcaactatgcccagcttatcttttaaccaacaaggaattcagtctcaggcaacagggttacaacctcaaccaactggcttcctgccaccatccaatttcaacgctaccatgccactaaccgctcaaaaaacagggtttgggaataatgaaatttatacacaatcaaatttcggtagtaatttaatcgataactcaagccaagagaaaatttcgagtgaagaaaaatctttattctataaaatttttgaaacgtttgatacccaaaacagaggtctattggattctcccaccgctgtggaaatttttagaaaatctggtttaaaccgcgctgatttggaattgatctggaacctatgtgatataaacaacactggccaattgaacaaacaagaatttgcactaggtatgcatttggtttatggtaaattaagcggaaaacccatccctagtagattacctgcaagtttgatcccttccagcacaaaacttttggataatctcaaaaaccaattaaagactgaaccaggtactgcaaaagaaaggccttcattcgggaaaactgatgccttgagttacaagaacaatgatgaagatgatgttttgccaaactacagaaatcgtagaaaggtttactctgcaaagaatgaagaacagtcctcttcttctttgactgataaagtggagaagcacattagtacttctcaaagtaatgatttttcagaagacaaactagtcaaaaagcagccagtcaaaccaaagtatgctgggtactcaagagatattaacttgaagagtattgccgcactggaatatgaaatcaaaaatagtaagagtctaaaaacctcttatgatagttctattccatctgatttgacaaaccgttttgacaccattattgctaaacttccaaacttattcaatgaaatttccacaattgacaacgaaattactaatgcgaaaatccagttgtataggaaaaagaatccatcgtcaatagttggatccggtccgaatggtgagataaccgaaaacgacaggaagaaagctaagagtagagctttgttgagagcaagaatgtctgctttaaccggtaaatctacaggacccgatgattcaatttccattgaagatgatcaacaaagcactgaaatcaataaaattcagcaagaaaatggtaagaaccaagaaattatcagggacataagatcatcgatttcggatatttcagcctctttaaaatccacaatgacaggatcagaaatgacttccaatcaagactttgaaaagtgggaattcggtattggattagaagatagtgtccgtgaattattggatgacctaaagtcaaattccgataaacaagtgggagaatcgtctccattcgtaccttcaccagcgccaacacctgtggacgatcgttcttcgtcaccttcttattcgcaattcaagacttctgaagaaagagcagcgcatttgaaagaacaagcaaaaaagagaatgaaggaaaaattagccaagttcgataagaacagaaggagtacaactcagcgttctaggtctactgtacatgaaagttctcaagggcatccacaacagattgcaagtgtttccgattcagttcaagctagtaaaactccattcaaagaagaagagaatatagaatccactcaaccaactcaacctgctcaacctgctcaaccctctcacttttctcagcctgctcaattttctcaacctgctcaattttctcaacctgctcaattttctcaacctgctcagcctgctcaacctgctcaacctgctcaacctgctcaacctgctcaacctgctcgtaatgtaaagcaagaatcagatgatgacgatgaagatgaagaagagagacgtttacacgaagaactgaaacgattaaagcttaagaaaaaaactgagaaagagaaaagactagcagctttacgtaagcaaattgaggatgctcagaatgaaagcgatgaagaaaaggaaagttcgaaatccaaccctagtggcccttcaaatattccgcaagtcgcacaaatttcatcacaagaacagcagctaggtaatggttctaccacaggcaatgctgccggttcctctgcggtcaatataactactacgggtttgtcttctacgcctaagggacataatccatactttaaggatacctcagctagctctacatctaccttcgatgctcaggctgcagaaatgcaaagaagaattcaaagagggttggatgaggatgaggatgacggatggtctgatgatgacattaacggagccgcgaaggctaacatcggacaagcaagcgctcttccatccaaccaaacacaatctgcttctgttgcacctactccaccaatgccaacagccgctcctattttagctactccaccaattccacaaacttcctctattccatctgctgctcctatcgcacaagtactttctgctcccccaaccaggccacttgaagcaaatggctataatgaaactggcagtcccattccggtagctcctatcttacctggtgctgttcaagagccacctatcccattggcccctcccttacccagtgtcaatgaaccccaaggaccatcaattccattagctccgccattacctaatggtgtacaaaaattgaacgcatctaccccggcactggccggaagtgttttacctcctcctccttccttgccagcccaacaaatttcccgttctgaacctactatcgatattaataatagagatgaccttggagggaatatgggtgcatatggtcccgattccgatgatgatgttttatcaatccctgaatcggtcggctcagacgatgaagaaaaggatgccccaccaattccaactgcaagcattccaccaattccagcctcaggtatcccaccacctccacctttaccgtga

SEQ ID NO: 1291 - DNA, 2292 bp, Saccharomyces pastorianus
atgcctgccaaaatacatatttcagtcaacggtgagttttgcgataaagaaggtaacgtgatccaattgcgaggagtcaatttggatccgtcgattaagattcccgccaaaccgtttttgtcgatccatactcccatcgtggacggcaaatatttcgaagatgctgataaagtcagtttcatcaatcatcccttagttttagaagatgtggaagaacacattatcagattgaagtctttggggtataataccatccgtttgccctttacttgggaatcgctcgagcacgcaggtccaggacagtacgattatgactatatggactatatcgtggaggtactaaccagaataaacagcgccgaacaaggaatgtacgtttacttggatcctcatcaggacgtttggtctaggttcagcggtggatctggtgcgccactatggacgcttcactgcgcaggtttccagcctgcaaactttcaggctactgaagcagcaatattacataactactacatcgacccaaaaacaggcagagaaatcggcaaagacgaagagtcataccctaaaatggtttggcccaccaactatttcaaattggcgtgtcaaacaatgttcacgttattctttggtgggaagcagtttgctcccaagtgcataatcaatggagaaaatatacaagactatttgcaagggaagttcaatgatgccatcatgacgctgtatgcgagaataaaagataaagctcctgagttatttgacaacaactgcataatcggattagagtctgtaaacgaaccgaactgcggttacatgggggaagcaaatcttgatgtaattccgaaagagagaaacttgaagttagggagaacccccacggcatttcaaagtttcattctgggtgaaggcattaagtgtactgtggaccaatataaaagaacatttttcgggttcactaagggaaaaccgtgcactgtcaaccctggcggcaagaaggcttggttgagtgcgcaggaaagaggtacaatagatgcgaaatacaactgggaaagaaatcctgaatgggagcccgaaacgtgcatttggaaactgcatggcgtctgggaaaatcatcgaagtaggggccccgtcttactcaaaccaaattattttggtcaagccaatgaaacggttttcattaataaccatttcgttgagtattataccaagacgtataacaagttcagggccattgataaagaatcattcgtttttctgcaacaaccagtaatgaaactgccacctaatttgcaaaattctactctcttggacgataggacagtatgtgcatgccatttttatgacgggatgacactaatgtataaaacgtggaataaaagaatcggcatagacacatatggtctggtgaataaaaaatattcaaaccctgcctttgctgtggttcttggtgaaaataacatacggaaatgtattagaaaacaattagcagagatgaaaaaagacgctaaatctatgcttggtgaaagggtgcctgtctttttcactgaaattggtataccatttgacatggatgacaagaaggcatacactactaatgattattcttcccaaattggtgctctggatgctcttgggtttgcgttggaaggaagcaatctttcgtacacattgtggtgttattgcagtaccaattcgcatgaatggggggacaattggaacaatgaagatttctccatttggtccccagacgacaaactgctgtaccgtgaaaatcgatcaaagacaccaacacgggcaccatctccaacgtccacaacggattccatatctacctccaaatcaaaactaaattcctcctcacaaccgccaagttttataaagcttgaaagtaacttggacttggatagcccatcatgcagtctagagacagacttgtcagggtacagggctcttgacgcaattatgagaccattcccgataaagatacacgggacgtttgaatttgctgagtttaatttacataacagaacatacattttgaaaatagtcggtaaaacgggaatgacgacggccactacacacatattcttaccacgtcatcattttgcacttaaccgtttatcaatacgctcgtcatcaggccaatacacttacaatgcagactaccaagttcttgaatggtttcatgaacctggtcatcagtacattgaaatatgtttaaaatccaaatctaggagcagtaccccagttagcgatgattcaaacgacttgccggcggattgcattattagctaa

SEQ ID NO: 1292 - DNA, 1236 bp, Saccharomyces pastorianus
atggtcgagtcagtgaaggcaaatgggccaagttcctcggacatggagtactattacaagtctctctacccgttcaagcatattttcaattggttgaaccattcgcctaaaccctctagggatatgatcaatagggagttcgccatggctttcagatcaggtgcttacaagagatacaactccttcaattctgtgcaagagttcaaagcgcagattgaaaaaggcaacccagacagattcgaaataggtgccatatacaataaaccgccaagggaacgtgatacccttctgaaaagcgaattgaggcccctggagaaggagttggtgttcgatattgatatggacgattacgatgctttcaggacatgctgttccggggcccaagtttgctttaagtgttggaaatttatatctttggcaatgaaaataatgaatacggctctgacggaagattttggctacaagaactttatttggatcttttcgggtagacgtggtgcccattgttgggtaagtgacaaacgtgctcgggccctaacggatatacagagaagaaatgtcttggattacgttaacgtcgtcagagatagaaatactgataagaggctagctttgaagagaccttaccaccctcacctcgctcgttcgttggaccagttgaaacccttctttgtcagcatcatgctcgaagagcaaaacccttggcaagatgaccagcatgccattcaaactttattgcctgcattatatgataaacaactgatcgaatcattaagaaagtattggttggagaaccctgggaggtcaagcaaagaaaaatggaatgatatagatcaggtggccacgtctctttttaaaggacccaagcaagactctcatatagcaaggttgcgtgagtgtaaggaagatcttgtattaatgaccttataccctaaactggatgtggaagtcacaaagcaaacaatacatttactgaaggcacccttctgtattcatcctgctacagggaacgtctgtgtgcccattgatgaatcgtttactccagaaaaggcgccgaaattgattgctttacaaactgaaatggaaaaaaataatgacgtttcactaacctctttgcaaccttttatcgatcaatttcacacgtacgtgaattctcttttgaaaagtgaactgggttcagttaaaagagaacgtgacgatgatgaagataatgaatcggcttccttagatttctga

SEQ ID NO: 1293 - DNA, 336 bp, Saccharomyces pastorianus
atgactgaaccagcaagaaaaaagcagaagactgatcgcgatcctcaccgtattgcgaccgaacgtgtagcggaacccaagaacacgctatatgtgagccagctgaatgaaaagatcaacacacaacggctgcgaatgaacctgttcctgctgttttccacatttggagaagtgttaaaagtaagcataaacttcaagaaacagcgaggccaggcctttattacattgaggaccatcgaccaggccagtttggctcagatttcattgaacgacgagttgttctttggtaaacctttaagagtggaattcagcaagagtgaaacaaagacgctataa

SEQ ID NO: 1294 - DNA, 1680 bp, Saccharomyces pastorianus
atgagtctggaacccacgcagacgattcctggcacgtcgccgatgttgcaccaaagaacgcacaaacacgtttacccattgcggatggaaactatcccgatttcagaaccagattccaaggccaaaatgcaaagcaacgggccttccgaagaggacgaagaagagggccagtattttgaaggcaagcaatccgtgtcgaatctgagtcccgatctgaagttcaaaagacacaagaataaacatactcaggggtttcctactctgggtgaaagattagataacctgcaagatatcaagaaggcgaaaagggtggagaatttcaattcttctgcaccattgggggaagagaaccatgggaatgggaatggggacgttaacgcaagtgcgatgcccgctccatatatgccttattattattactaccaccccatgaatgctcctgcgccaggaatgatggcatatcctgggtcgccaatgcattctatgatgcctaattcttcactacagcctttttattcacaaccgagtgccgccggcggtcccgatatgaccactccccagaacttgtcttcatcgcaacaattgctgcctgcaccacagctgtttccctatggatcgttccatcaacaacaacagccacaatacattcaacggacaagagaaagaaaaagatcaattggcactcaaagaggtagaaggttatcgatgttggcctcccaaggtaatggcgggagcactattatatctccacataaggacgttcctgaagaagacttctacaccgtggtggggaatgcgtccttctttggtaaaaatttacaaatacgacagcttttcaattggtgtttaatcagatcgcttcataaactggaagcgaaggccaaaggcacagaagaggaagcagaaccggagcatctaaccaaaaaacccaagcccgaaccagttaaggacaaaacaagttacgtggatcccaaacgtatggccatggtcatactaaaggagtttgtcgatgacttgaaaaaagatcacattgccatagattgggaagacgaagaaaaagatgaagatgaagaaaaagcgttagatgatactgaaaactacgatgacactgaactacgacagctgtttcaagaaaacgacgacgacgacgacgacgaagatctggactattcagagatacaaagttctaggcgtaaacttaatgaaaggagaaaagcagtactgaatgaaccaaggaaactactacctaatggcaagaacgtggaaaataccaaaaatttgaatctattggtcggcaaggtgtacgccataaaaaacgaagtcaaagaatgggctactacactagacacctcgagaccggatcttgaatggcaagaattaacttcactatcatcacaaccgcatgaaccagctttggacaaggaggactcacaactcacgtttgcagatattgaggcaaagttaggcacaaaagtcgatgaattaaggtaccagtcacacatattgaactcacattcattagccttaagcgaaataacgacctccaagctgaaaaaattgaacgtggaaactatgaacaaaatttctaacgaaacggacgatgaccattcgcaagctattaactctcaacaattactgaaggggttaagtctatcatttggaagaaaactggatatataa

SEQ ID NO: 1295 - DNA, 357 bp, Saccharomyces pastorianus
atgtccactaggcttccaaccgtgatttcaaatggaacagcgtttaaaaaaatccccgtgcaactgttgctgaatagcgggtctacagcaccaactgctttccctgactctattccagcccgcccaagaaccggtatcactaggacttgcgggcaatgcggggaaatcaaaacttcactgcagtggagggagggccccaatggtgccgcctgcttgtgcaatgcatgcggattgttctttagaaaactaacgttgcggttcggtagagcagcggctaaaacatacatggagcaaatcaagggaacggccgccaagagaagaatccccaaggaactcaccggaacggtcagattttaa

SEQ ID NO: 1296 - DNA, 504 bp, Saccharomyces pastorianus
atgaatttgagatcggaattgcagaagctgttgaacgtatgctttttgtttgcgtctgcctacatgttttggcagggcttagccattgctaccaacagcgcttcacccatcgtggttgttctttcaggctccatggaaccggctttccaaagaggtgacatccttttcctatggaatagaaacactctgagccaagtcggtgatatcgtggtgtatgaagtcgagggaaaacagatccccattgtgcatagagttttgagacagcacaacgatcatgcggataaacagtaccttttgactaaaggtgacaacaatgccggcaacgatatttcattgtacgccaacaagagaatctatctgaataaatcaaaggaaatcgtgggaaccgttaagggctacttcccacaattggggtacattacgatttggatcagcgagaatcagtacgcaaagtttgcattgttaggtatactggggttgagcgctctactgggcggtgaatag

SEQ ID NO: 1297 - DNA, 1911 bp, Saccharomyces pastorianus
atggctagcgacgctctaagtgctattttcagcaatcagtcgaaaaagaatgttcagcccatcacatccattgtatcatacactaataacaatgaaaatgatataatagacgtcgaaaacgggaagtttagaaagaacaaaaacgtcagcactaaagtctatgacgacaattcatcgatagaagaggacgagattgaccccttgcctgagacaaattccttttggagcaagatatactacgattaccttgtattggataagacaacgttgaacgtttcgctcaaggaatccttcttatataacagagatttaaacccggttgaagaagagagaagatgctggtcctggttcaattatttatacttctggttggcagactgtttcaacatcaacacatggcaaattgcaggtacaggtcttcaactaggtctgaattggtggcaatgttggctcacggtttggattggttacactttcgcagcagtgtttgttgtgctgaattcgagatttggttccgcataccatttgtctttccctatcactgttagagcctcgttcggtattttcttttccatgtggccaattataaatcgtgttgtgatggctatagtgtggtatgcagtgcaagcgtggctaggtgctacgcctgttgcactgatgttgaagtctatctttggtaaggatctgcaagacagaattccaaaccattttgggtctccaaatagtactactttcgaattcatgtgtttcttcatattttgggtgatcagcataccgtttgtcctagtggctcctcataaaattagacatttgttcacagtgaaggcggctctgattccctttgccgcctttgggttcttgatttgggctttgaagaaatcaaatggtaaaatcgaactggggtcactaaatgattactcgcctcatggttccgaattttcttggatattcgtcagatctttgatggcctgtgtcgccaactttgctgctttgattataaatgctcctgattttggtagatttgccaaaaccccccaagcatctctgtggccgcaattggttgcaattccattattttttgctattacctgtttgatcggtataattgtcacttcagcaggttatcacttatacggagttaactattggtctcccgtggacgtccttggtcaatttttggaaactacgtatacaagaggtactagggcaggtgtgtttttaatttcttttgtgtttgccttagctcagttgggtacgaatatttcagccaattcgttggcatgtggtgccgatatgacagctttgtttccaagatatatcaatattagaagaggttctttattctgtgtggcaatggccctatgtatctgtccatggaacttaatggctacttcaagtaagtttactagtgctttgagtgcttatgcaatttttctttctagtattgctggtgtcatttgctcggactattttgtagtgagaagagggtatgtgaaactgacacatttattcctggcgcaggaaggctcttactatatgttcaataataagtacggcttcaattggagggcccttgttgcgtatctctgcggtatagcaccaaatttgcctggctttatcggtgacgtgggcgctccaaaaattacagtgtcacaaggtgcaatgaacatataccacttgggttatccagtggggttcttcattagtgctgtgatatacatcggactgtgttactttttcccagttcctggtactccagtagacaacattcttacagataaaggttggtttcaaagatgggcttacgttgaggatttcgaacaagattggaagaatgaactgcgtagagctgacttatgcgatgatacaatgagtatctgtgatataagcgatgaaaagatagtctactaa

SEQ ID NO: 1298 - DNA, 1032 bp, Saccharomyces pastorianus
atgaaattttttggtttagaggaagaaactaaattcaaagaagtaattacttcaaaaaataaggcggtggatgttatagggtccaaactaggtggtcaggtagtttctttctcagatgaatggtttgcttctgctgaaaacctgctcaagccaaccgtccccataagggatcctactagatttgtacactccggtgcttggtacgacggctgggagacacgaagacacaacgaagcggaatacgattgggttattattaagatgggagttgctgctgcccaaattataggtggtgaagttgacactgcatttttcaacggaaaccatgcaccattcgtatccatagaagcgctttatgacgaaggcgaagaaggtaatatagtggagaacgatccacgttgggttgaaattattgagaaatttgagtgtggtccttcacaaagacacttttttatcagaagtagcggccttactgaacaaaagtttacccatgttaaattgaaaatgtaccccgatggtggaattgccagatttaggttgtacggaaaagtcgcccctccagaatacaaaacagagggtcacataattgacctagcttatgtttgcaatggtgctgtagctttagactattcggatcagcactttggttcagccgataacttgttattgccaggccgaggccatgatatgtctgatggctgggaaacaaaaagatcaagacaaccaggccataccgattgggcaataattcaattgggcagagaatcttcattcattgaaaaaattatcgttgatacagcacactacaggggaaacttcccgcagtttatcagtgtgcaaggttgcttgaatgaaccagaatcgagtggtaacattaaccaaagaacatggataaacttagttgacaagtcaaagactgggcccgataaagaacatgtatacgaaataaataaaaatctaagaatatcccatgttaaactaacaattattccggatggcggagtcaaaagaataagagtttggggatactaa

SEQ ID NO: 1299 - DNA, 1665 bp, Saccharomyces pastorianus
atggtaaagataaacttggacaacactgccttgtacgcagacattgacaccacccctcaattcgagccctcgcagacttctgtagctgatattttaaccaaagatgctttggaatttattgttctgctacatagaaccttcaatgcaagacgcaaacaacttttagctaatagaggtactttacagtctaaattagattcctgtgaatatcaatttgacttcttaccggaaactgaacaaatcagaaatgaccccacttggcaaggtgctattcccgcccctggcttgatcaacagatccagtgagattacgggccctccgttgagaaatatgttggtcaacgccttgaatgcagaagtcacaacttacatgactgattttgaagattcttcgtctccaacgtgggaaaacatgatttatggtcaagttaatctttatgacgctatcagaaaccaaatcgacttcaagactccaagaaaggaatacaaattgaaggacgacatttcaaaattgcctactttgattgtcagacctcgtggctggcatatggtggagaaacatctttatgtggatgacgagccaatcagtgcatctgtatttgattttggtttgtacttctaccataatgctaaagagttgatcaaaatcggtaaggggccttacttctatttaccaaagatggaacatcacctagaagttaaattgtggaatgatatcttttgcgtcgctcaagattttatcggaatgcctcgtggtaccattagagccactgtgctgattgaaacgttgccagcagctttccaaatggaggagatcatttatcaagtgagacagcattccagtggtttgaattgtggtcgttgggattacatattttccacaataaagaaactaagaaatttgccccaacacgttttaccaaatagggatctggtgacgatgacttcgccctttatgaatgcttatgtgaaaagattaatcaatacgtgtcaccgcagaggtgtccatgcaatgggtggtatggctgcccaaattcctattaaggatgatccaaaggccaacgaaattgctatgaacaaggttcgtaacgataagattagagaaatgaaaaatgggcatgatggttcatgggtagcacaccctgcattggcaccaatttgtaatgaagtttttagcaacatgggtacagcgaatcaaatttacttcatcccagatgcaaatgttacatcatccgatttattgaatacaaacattaaagatgcggaagtcacaactgaagggataagagtaaatttagatatcggtttacaatatatggaagcctggttaagaggttctggttgcgtcccaattaatcacttgatggaagacgccgccaccgctgaagtgtcacgttgtcaattgtatcaatgggttaaacacggtgtcattctaagcgatactggtaaaagggtgactccggaggtaaccgcgaagatattagatgaggaggctacaaaactggcttcaacaagtcccgtaggtgaaaagaataagtttgccttagcagctaagtatttcttgcccgaagtcacgggtgaaatctttagtgatttcttgaccactttgctgtacgatgaaattattacaccaaatgccaagccgattgatttgagtaaattatag

SEQ ID NO: 1300 - DNA, 588 bp, Saccharomyces pastorianus
atggtgacgctgattgcagagccgttgacgatagattctttcaaggaatatgggacgataatctctccagaggaggaaatctcgaggttaggcagcctcgagaaaagtgccaaccatgggactgcaatcaagttgcttcaggtaagccgtgtggagaacgggtccagtagcggggttcccaattggaacttgtttcgttgcttcccgcaaccacacctgaacagagcgttcacacctgggtccactcggggggtccttcacaaggttgaagtccttgaaaagcacccgagtagttcgcaaacgttcgtgcccatgggtagaaattccgctgaagtggcatacttgatagtcgtggccaaagaaattgcgaacaagccagacttatctacggtaagggcatttacatgtttaggtggtcaggctgtgacctacggcttgggcatctggcatgctcccatgatagtgcttggcgtgcaagagcacttggactttgcagtcctgatttatgaaagtctggatcccgaataccctgagcgggactgtgtggaagaacactacggccacgctggcatccatatcaccgtctag

SEQ ID NO: 1301 - DNA, 3375 bp, Saccharomyces pastorianus
atgcaacagaacagcgaatttttaacagaggcaccggggaacgaccctcacatatctcaattgcacggcaatagcgtgttagaatcacaacttctggatgatttcttactgaacggatctcccatgtaccaagatgacagcatggcacatatcaacatcgacgaggctgctaatttccaaaatttcattaaaacagacgagacaggctcgcccaatttactatctttcgaagggcttggtaacagtactcatagcaaccaggacgtgtccactcccctggaggacgggatggaggacgggatggaggacgggatggaggatgacacggctccgaaggaggaggaagacgacgagaatgaagacaaggctttcgagagaaacgacgccggcggttccgctcatgacgacgttgtctttggcaggaaggaggcgatccagtctgtttatatcaatgctttagatttcgttaaagtgagtgaagatcaattgcctttgaaaatggaggtttcagggctaccacaggtatcccgagtcgaaaatcaacttaaattgaaggtgaaaatcacttcagagacaccgctaagccaaaatatggtctacttgcccagcgattccatctccagggaaaaattctatttgaagaaaaatattgacgagtactcacacgatttcaggaagaatttattgtatataaacgcgtttgttctttgcgccgttagcaacaggacgacaaatgtttgtacaaaatgtgtcaagagagagcaaaggagagccgctagaagaaaatcaggaatcgcagacaacctcctatggtgcaataatatcaacagaaggctagtcgtgtttaataacaagcaagttttccccataatgaaaaccttcgaaaatgttaaggagttcgaattaaccaccagattagtttgttactgcaggcatcacaaggcgaataacgggtttgtgatcttgttcaccttaaccgattggcaaaatcaacttttgggtaaatacacaacaacacccatcatgattacagatagaaaacctgcaaatatggacactaataaattcaataacactaccaccacttctagaaggcaattaacagaagaggaatctaccacagaatattactcaactgacactaaccagttgagcaaggacgatagtgtgccctttcaatacacctaccaccataacccatacgataatgatgctcaaatgaataatattccattgaaagacaaaaatgttccattccactattcaatcccgcagcaatccgatctattacagaataacaatctatcactgaacctttctctacccaatcagcatatcccgtcaccaacgtccatgagtgaagagggctcagagtcattcatttatcatcaccgtgataatgaaaatcccgtccgtaccatctctttgaccaacatcgagcaacaaagtcaactgaatcaaaggaaaagggcacgtaacaacctagaaaatgacataggcaaacccctgtttaaacattccttttcaaactcattcagtccagcaaataccatgaatccatccttacatgcaatgcaagacttttcagcaaaaaatagcaacaacaccttaccatcaatcaatcgtgtcattccttcacaaggcccaattaatggtggtatcgaagttactttactaggttgtaacttcaaagatgggctttctgttaaatttggtgccaaccttgccctttccacacaatgttggagtgagacgactatcgtcacttacttgcctcctgcagcctatgcaggtcaagtctttgtttcgattagtgacacaaataatgaaaacaatgctgataatcttcctcaggaaattgaaattaacgacaataaaaaggccatattcacctatgttgacgataccgatagacaactaatcgaactagctttacagattgtggggttaaagatgaatggtaagctagaggatgcaagaaatatcgccaaaagaattgttggtaatgactctcctgacagcggtgcaaatagtaatggcggctcaaagagcacaggaccatcaccaaatcagcataatgcgaccttgcacaccggtgttcgttattccgatgaagttttgattcaaaaagttataaaaccactaaacactaactcaaatatttccatttgtgattctttgggaagaaccttattacatcttgcatgcttaaaaaactactcgagcttagtatctacattgattaaaaaaggcgcccgtgtcgatgatatcgattcgtttgggttgaccccattacacttcgcatgcataagtggtgatcctaaaattatcaaaatgctattaaactgtaaagctaattatttactaagggcacacaatggattaacagcaaggcaagtatttatggccaaccacgttcacttaaaggaagatggaaaacaagagaacaagggcaatcacaagagaaataatctcattgtatataatgataactatatcagtgaagtgttgacgttgtttgaagtttttgaagatggaacaaaaattgacaacagcatagagacagacagtagttactctattagcaggaaatactcacaatccagtttcaattcaagcctgttagataacgaatcttttaacgaaaacttattcgagaatcaaagcatgataaattcagccctcacggaaactcaacatcctgtttttcaattatttgagaattcaagttattctgaatacgatcagagcgattttgaggaagacggtgatgaaaacctctttgttgccgatgaagtagaacaatacaggactgaacgtaaggaggaatcaagggaactttccgacattggaactaacattaatgactccactgaggacaacgggaacacgtcactctggaatagagttttaaaccgcattaatgatgatttacctaaatatgaggatttgttcccactatcttggggcaaagacgataaattgaaaactgtgaacccagaaaatgttgtagagcagtcctcatctaatgtggaaaactccgagaattcagaagaagaagattatgaggaagaggaggaatttttgaaaaagcaatttaacagattctttcaaaacaagcaaaacttccaaaatgataagatgttaatatttttctggattcccttgaccttgctgcttttaacgtcgtttatcatgtataaatttggcaatcaagacaactccatcaaccatataagtgagttgatttcagaatacttaagaattgctttagcaaagttcttattaggaaatgaaagaatgaaaactgcattcaggtcaaaattatcgaacctgcaaacaacaagaatgttgaatgacttaattgtaagttaa

SEQ ID NO: 1302 - DNA, 1122 bp, Saccharomyces pastorianus
atgcctgccgttaccttacacttaagagctgaaactaaacctctagaagcacgtgctgctttaacgcctaccacagtcaagaagctgatatccaaggacttcaaaatatacgtagaagacagcccacagtctactttcaacatcaatgaataccgtcaagcaggtgccatcatagtgcccgcaggttcatggaaaaccgctccacgcgacagaatcatcataggtttaaaggaaatgcctgaaacagatactttccccctagtgcacgagcacgtccagtttgcccactgttataaagaccaggctggatggcaagatgtccttaacaggtttatcaagggccacggtactctatacgatctggaatttttggaaaatgaccaaggcagaagagtcgctgcctttggtttttatgccgggtttgcaggtgctgccctaggtgtaaaagattgggcattcaagcaaacacattctgacgatgaagatttgcccgcagtaaccccataccctaacgaaaaggctttggttaaagacattaccagggactacaaacaagctttggccacgggcgccagaaaaacaactgtcttgatcatcggcgctaaggggagatgtggctctggtgccattgatctcttgcacaaaatcggcgttcctgatgccaatatattgaaatgggatatgaaggaaacctcccgcggtggtccctttgaagaaattccacaagcagatattttcattaactgtatatatctatcaaaaccaattgcaccttttaccaacatggagaaactgaataaccctaacagaagactaaggactgtggtggacgtgtcagctgacaccaccaatcctcacaatcctatcccgatatacacggtggctactgtgttcaacgaacccactgtgctggtacccaccactgttgggcctaaattatctgtcatttccatcgatcatttgccctctttactaccaagagaagcttcagagtttttctcgcatgaccttctgccatctttagaactactgcctcaaaggagaactgctcctgtttgggttagagctaagaaactgttcgacaggcactgtgctcgcgctagaagatcttcaagactatag

SEQ ID NO: 1303 - DNA, 765 bp, Saccharomyces pastorianus
atgggcaaagtcatcttagttactggtgtctccagaggtattggtaagtcgatcgtcgacattctattcagcctggacaaggacactgtggtttacggtgtagccagatcagaggctccgctaaagaagttgaaggagacatatggtgacaggttcttctacgtcgttggggacattaccgacgactccgtgttgaagcaattggtgggcgacgctgtcaagggacacggtaagatcgactcgcttgtggccaacgctggtgtcttggagcccgtgcagaatgtcaacgacgtggacattaatgcttggaagaagctgtatgacgtcaattttttcagcattgtgtcgttagtttgcattgcgctgcctgagttgaagaagaccaacggtaacgtggttttcgtcagctcggacgcctccgacatgtacttcagctcttggggtgcgtacggctcctcgaaggccgctctgaaccactttgctatgacgttggccaacgaagaaaagcaggtcaaggccattgctgtggctcccggtatcgtggacacggagatgcagatcaacatcagagagaacgtggggccctcctccatgagcgcagagcaattgaagatgttcaaggaactgaaggatagcaaccagttgctggacagcactgtgccagccacggtttacgccaaactggccctgaacggcatcccagaaggtgctaatggacaatacctgagctataacgacactaccttgaaggacttcatgccataa

SEQ ID NO: 1304 - DNA, 492 bp, Saccharomyces pastorianus
atgtccgaattctataagctagctcctaccgacaagaagggtcaacccttcccttttgcccaattaaagggcaaagtggttcttatcgttaacgtcgcctccaagtgtgggttcaccccgcagtacaaggaactagaagccctgtataagcgttacagtgacgaagggtttactattatcgggtttccttgcaaccaattcggccaccaagagcctggttccgatgaagacatagctcagttctgccaattaaactacggtgtgactttccctgttttaaagaaaactgacgttaacggcaataacgaggacccggtctacaagtttttaaagagccagaagtccggtatgctgggcttgaaaggtatcaaatggaattttgagaaattcttggtcgataagaagggtaaagtttacgagagatactcttcgctaaccaagccttcgtccctgtctggtgccattgaagaactcttgaaagaggcagaataa

SEQ ID NO: 1305 - DNA, 1599 bp, Saccharomyces pastorianus
atgcagctgtttccttttctaccgttggctttatctttggcccattccctcgctgtttctggttcttctgtaagttcttatgtccagtttccggtccaaaagttggcaagcattccaaatatagccttgcagtatacatctggtatttttaagagaggcgaggcttctaattccacattggtacatgaaataggtctgtatgctgtcaaaatggagattggaactcctccccaaaccgtgtatcttcagttggataccggctcttcagatatgtatgttaatgacgctgatagcgcctactgcgaattgttgtctgatgggtcagactacgtctcaactgataattacgagctcacggcaacattcagcgagcttccttctagcacggtctcggcagaagtttataatactctctgctcctactggggtgcattcagccccagtaactcctccactttcaagtacaatgacactttttttgatgagacttatggcgatggtacgtattatgaaggtacgtatggaacagatgttgtctctttaggtgatattacgctaaagagtttctcttttggggtagccaataatacagaaaatcaaaacgggattctaggtatatcgcttcctgctggagaatatactgacgcacttgaaaatgcctataatataacaccttttgagtatagaaactttccaatggcattgaaaagctacggaaagatcgagaagatggcatattccttgtttttgaatgagcctgaagcacattttggcagcatcttgtttggtgctgtcgacaaaaataaatactcgggacagctctacacattacctatgctgcaggcattcaatacactcgactctctggggccaggaatgtttgtcactgcgcagagcgttgcaatttcggatggtttttctggaaacaaaactgtttctgagatccagttcccagtattgtttgattctggcacaacctattctactttacctacagaaatagcagattcgattggaaaattttttgacggaaagtacagctctgacgatcaaggttacatcgctgattgttcaaaaatgaataatactctattatctattgattttgggggatttaatatctctgcaaatatatctaatttcgtgacacggaccaaggatcactgtcttttaaatattgaagccacagattcgggattcgtgttaggggatgctttcctcgtcgacgcatatgtcgtctatgatttagaagactacgaagtttctattgctcaggctagctttaacagtcaaggggaagacattgaaattatctccaacagtattccaggtgctataccagcccctggatactccagcacatgggtgtatacaccagatagtcccataggaacaggagattttcttaatatgagctggacctcatattcagactattcggaataccaaactttactctctgctgcaactgcaagtagtagcagcagcagtagcagttcagaccaaacaactacgaaaaaacggaactccggtgacagaatacagcaatcatttttttccttttcgctaatacctcttctatcttacatccttttgtga

SEQ ID NO: 1306 - DNA, 711 bp, Saccharomyces pastorianus
atggcgaatttaaataaatttgggcaagaggttggtgcggacgtcgaaggctggacaacaagggccttcccagagaaagttgtattgaaaggtaacacctgtagactagaacctctagatagtgaaaaacacggctcggaactttttagtgcctataggaaagcaggccaagaattatggacatatgtaccagtgggaccattcaatgacttggaggaatacctaaaattcatcaaggaacttagtgaaactaaaaatattgtgcctttcgcaattattaatgaagagactgaacgcgccgttggtactttagccctaatgagaattgatcaagcaagcggttcgcttgaagttgggtatgtcattttttcgccagaattgcagaagacgattattgcaacagaagcccaatttcttctgatgaagtatgtatttgatgttttacaatacaggaggtatgagtggaagtgtgatagtttaaacgggccatctcgtagggcggcgatgcgtttgggatttaagtacgagggtacctttcgacaagcgatggtttataagggtcgaactagagacacccaatggttttcaataattgacaaagaatggatatacattcgtaaaacattcgagcaatggttagataaaggaaacttcgagaatggtagacagaagagagggttagctaatataagagaaaatctgctaagctga

SEQ ID NO: 1307 - DNA, 711 bp, Saccharomyces pastorianus
atggcgatcttaaacaaatttggacaagaagttggtgccgacgtcgaaggctggacaacaagggccttcccagagaaagttgtattgaaaggcaattactgtagactagaacccctcgatagagaaaagcatgggccagaactttttaatacctatggtaaagcgggcgaaaaattatggacgtatttacctgtgggaccattcaataacttggaggaatatttggaatttattaatgaacttaatgaaactaaagataccgtgcctttcgcaattattaatgaagagactaaacgtgctgttggtacattatgcctaataagaatcgatcaagccagcggttcacttgaagttgggtatgtggttttttcaccggaattacagaagacgattattgcaactgaagctcaattccttttgatgaaatatgtatttgatgatctacaatacaggcgatatgaatggaagtgtgatagtttgaatgggccatcaagcagggcggcaatgcgcttagggtttaaacatgagggtacgtttcgacaagtggtggtatataagggtcggactcgcgatactcaatggttttcaataatagacaaagaatgggtagacattcgcaaaacttttgagcaatggttagatgaaagtaattttgagaatggtaggcagaagagaggattagctacaataagagaaaaattgccaaactga

SEQ ID NO: 1308 - DNA, 597 bp, Saccharomyces pastorianus
atgaatgaatttaaaggtaccctgttatcaaaagggttatggctcaatgagccgaaagaagttacagaagacgcgggtaaacttagcttcaaaacggatgagaaatctgacttctggcgtgaaacctactatggatttacccgtgacagtggacatttcttaggaatgaagacagacaatgctttttctgcacaattacgggttcagggaagttacgagggcctatatgaccaggctggtataatggtacgtatagatgatagccactggctcaaagctggcatagaaatatctgatggtcaagcaatgctaagcagcgttctaacaaatgaaatatccgattggtcaactgctgtttatggcggaaatccttatgaattctggcttcggattaccgtcgaaaagggagttttaaggcttcaagtgtcttcagacaaaaagacatggccactggtacgtttagccccatttcctgtgtcagaccactatctagttggaccgatggcctgctcacctgaacgtgctgggttacaagtcaccttctcagaatgggatctcacatctcctttgagaaaagctttacatgatctaacttag

SEQ ID NO: 1309 - DNA, 2406 bp, Saccharomyces pastorianus
atgaccattattcacagggacgtcgactcggtagagtcgcagccctcaacatcgcggtcgccagccgtcgtcgccatccagataaaccagacagaagataagaaggacgatttcgtcaagaacatcgacgaggacgtcaacaatctcactgctactactgacgaggaggaccacgaccctgaaagccagaaatacgaccggcactccatccaggaggagggcctcgtttggaagggcgaccccacatacttgcccaactctccataccctgaggtgagatcggcggtgtccatccaggacgacccgaccatccgtctcaaccactggcggacttggttcttgaccacgatcttcgtggtggtgtttgcaggtgtcaatcagttcttctctctgagatatccatcgctcgagattaatttccttgtcgcacaggtcgtgtgctatcccataggaagaatgctggctctcctgcccgattggaagtgcaccagagtgcccttcttcgatttgaatccggggcccttcaccaagaaggagcacgccgtagtcaccattgccgtggcgctcacctcctccaccgcatatgcaatgtacattctcaacgcacaaggaagtttctacaacatgaaactgaacgtcggataccagttcttgttggtttggacctctcaaatgatcggctacggtgccgcgggcctgaccagaagatgggtcgtcaaccctgccagctccatctggcctcaaacgctaatttccgtgtcgttgttcgactcgttgcactccagagaggtcgaaaagtcagttgccaacggctggaagatgccccgttacaagttcttcttggtcattcttatcgggtcctttgtctggtattgggtgcccgggtttcttttcactgggctgtcatatttcaacgttgtcctttggggctccaagacaagacacaatttcatcgctaacacaatttttggtactcaaagtgggcttggtgccttaccaatcaccttcgactacactcaaatctctcaagccatgtccggttccgtgttcgccacacctttttacgtctccgccaacacttatgcatctgtgttaatttttttcgtcatcgttctaccatgtctgtattttaccaacacttggtacgccaaattcatgcccgttatttcaagttccacttatgacaacactcaaggcaagtacaacgtcacaaaaatcttgaacgaagactactccatcaacctcgagaagtacaaagaatactcgcctgttttcgtcccattttcgtatcttttgtcatacgctctgaattttgccgctgtcattgctgtctttgttcactgtatcctataccatggtaaagatatcgttggcaagtttaaagatcgtaaaaacggtggtgttgatattcacatgagaatctattccaaaaactataaagactgccccgattggtggtacttggtcttgcaaatcgtcatgataggtttagggtttgttgcagtttgttgtttcgacactaagttccctgcttgggcatttgttatcgcgatattgatttcccttgttaacttcattccacaaggtatcctggaagcgatgactaaccagcacgttggtttgaacattatcaccgaactaatatgtggttatatgttgcctttgagaccaatggcgaacttgctatttaaactatatgggtttattgtcatgagacaaggcctaaatttaagcagagatttgaaattggccatgtacatgaaagtgtcaccacgtttgatctttgccgttcaaatctatgccactatcatatccggtatggttaacgttggtgtccaagaatggatgatgcataatattgacggcttgtgtaccactgatcaaccaaacgggttcacttgtgccaatggtcgtacagttttcaattcctccatcatttggtctttacccaaatatcttttctcaccagggcgtatttataatccattgatgtggttcttcttgattggtttattattcccaatggtcgtctacgctgttcaatggaaatttcctaaatttaagtttgccaagcacattcatactcctgtctttttcacaggtccaggtaacatcccaccaagtactccctacaactactcgttatttttcgcaacatcattctgtctaaatatcataaggaaaagatggagaccttggttcaacaagtacaacttcgtgatgggagctggtgttgaggctggtgtcgcaatcgctgttgtcattatcttcttatgcgtacaatacccgggaggtaaactcagctggtgggggaacaacgtttggaaaagaacgtatgataatgattataagaaattttacaccttgaagaaaggtgagactttcggttatgataaatggtggtaa

SEQ ID NO: 1310 - DNA, 816 bp, Saccharomyces pastorianus
atgtctcgggttgcgcagctggacgcgatagcgcttgatagcgagttgtatggacagttctggtctgagttcaacgcggccgtcaacacggacggacacaaggaggagtgggagttggtgatgaattcactggtgtttgtgtgtgcgacaaggttcttgtcgcagcacggttccagccacacgtacgggtctgcgctgagcggtgtagctttccgatgcaggaaacgcaccttgtatgtggtgaccgtgctggctgggtacgtgtggaggaagatcacccactttgtgttcaatggttctcgtggtaggagccagatggcgtggctgaagctgtacaagtggctcaacgtggcctatcatggttgcggtgtgactaatttcgtgcggtttctggcggcggacggtgtcggggccaggtcgttcttgtcgcccgtgtatagaatgtttaatgtgtactcgacgagactggttcgtggcggctctgcatccgcctccgatttctactcgggctctgtgtttgctggattggaataccagaacagacagctgctgtggaacgcacttctggagctattttcaaaaacactgcttacgaagaggggcctcctgccctttgctaagagaccgcagagggtgcggtcgggcactgcatcccagacggtgtgcccccattgcgagcgtttcccgaccaatccataccagattgcttgctgccgggcgaactactgctatgtgtgcgtcgtgaaggcgctggaatggtctttgtgcgatgcgtgtggtgcttccaaggcactgactgctgcgccagtgtattga

SEQ ID NO: 1311 - DNA, 1962 bp, Saccharomyces pastorianus
atgtttctgcctcgtctcatttgtcacaggactgaaaggtttataacggttcccacctggatgttgcgacaaatcagccataacagcagggactcgctgcagaaacaggttctgttccttattagcacaaaggcgagtttgaataacgacgataagttgaaaatacgaaaatactggtccgaaatggcagactacaagaatcttcggaaacagagaaccgccttactggaaaactccatcctgcacaagatgaagatcgaagactttgttgagtttattaaccgcaccaaaagctcctctatgaccgcgagaggactgtatagaagagagtgtttgtaccagtgcaaggacgatctggctctggttaacgaagtggtcgcccaggtttcatcggcgaagcaactaaagccattagataccccgctggataccatgcgttggtccgtcgatgacgcctttagcacggcagacattgtcatggccgcagaccttttcctgttgtattacaaactatttacagataatgtccagccagacgagccatacgcaaggaaaatcatatcggcactagcatacccgaatccaatgcatgaccacgtccacctcgtgaaatatttggagatgaactcgttgtttgaaaaaagagtcggaaacggcataagattgaccagattccaattagaaactctttccaacaaagctctcggcttgagcgatgacgctcctcaattatgcaaggcaatactgaacaagttaatgaacataaactactttctgacggcagaatcaaagctacgagacgaccagattttattggcatacaagtccattgacgaaaactacagaagaggaaatgtggcaagcatatattctacatggaataagatcaaaggacactatgtctcgattactgcgcacgactcaagaatcatttataaagtcctgaagatttgtacacataatagagcttatagatctatatgtagcgaaattttttggcaattgactccggaatattactgtaacaaccctttactactacctgcaatcattgacttcatcacaaagcgagattctctgccgatggccaaagaactcatgcaaaacatcagcaggtacaccttgcctgagaaccatcatatcgtctggctaaacaagagatgcctctcctcattactaagaatgcatttgaaattcaacgattccaacggtgtagatagggttttgaagcaaataaccaccaactttaggtccttatcacaggaaaattatcaagcaattatcattcaccttttcaaaacacaaaatctcgatcatattgcaaaggcaattaaattattggacactataccacccaaacaagcgatgttggcctatggatcgattatcaacgaattagtagattggaagttagcttcaaaggttaaattcaccgataatttgatggccctcatcaatgaacttctgatgaaagctcatgattttgaccccgaacatagaagctccctttggaatgtcgtttcttccttatacatcaagaagctctgtcattataagaaacaggagggtaaatacgtcggcaatacagaggaggatattgacttggcaaaactattatatttgaatgcttcaaaaaaagaaaaaatccattggacaaagtcaaattgtaatccgttcatcatctccacaccaagtgatgttaaattgaaaataaataatcaaaacagattcgctatcttgaggaatattgcattaagcgccttacagacagaaagaatagatatttttctttgggcatgcgcagaattgtaccaaaatggtatgacgattgaggagctgagattggattggaatatcatgttaaaacatcaattaagaaattcagaatttaaaacaaacaaagaaattgtccaggatattaaaaaacatggtgtgtcatctattaagcgttacttaagataa

SEQ ID NO: 1312 - DNA, 6045 bp, Saccharomyces pastorianus
atgggaaatcagtctcttagagaactcatagaaacgtcaacagatcacggccatgacctgttaacgtggataactgccaatttggagaaggtgatatctttgaaggacgccagtgacgctgaattacaggaggttaaagacatacataaccaattggatgaatttataagatataccacaacattagaggatgcggatactttagagctgcactcggtgttcaccagcctgtctcagctttatgcaatgtccacacaatgtctaaaagacgaacatcctgggatggtattcgattcctctgcatttctgaccaatgtattatgtgaggaggatgtcttgatcgatgacgaaattaatgatcctaaccaaacgaaaaaaaaaaaaaaatcaacaatgaagaaaaagaagtatatatacacacctgcaaaagatattgcatgtaccgttttgattcaattatttgaaatttttggaagtgaagtttcatctttggtcccattgctgtttagtgcagtattcaaaaacttgaaaaagatcatggaaaagagtaaatatcaccatgcaacttttatgacgttactacttcaactgtttaatgcgatcctaagaaattctaataatgatgacaaaatcttagatccaactacatatgcaaaattctcaaagctatccaaaaccgttttcgacagtatttattcggatgaaaaggacttcccagtgagttttgtgtctgtactgatagaatgttgggtggctcatttcaaacaaacagcttttatcaaagagcatgctcatgatatcctagaaacaatatattctaaatttacggagggcgagataggggtttatggttttgccaacgataagacacgtctctctacggcaaagtctttagcggagatcttatttgattattacttctcaaaagagatcctaactttgcaagaagtatggtcgatttacgtgagaatttttctaaattctgacactcgagatgtgaaaagcggttgttttgaatctattatacattttattagtttaaatttacttgctgacaaaaccttcctgagtaactcaaaataccttgatacagtgctatctttaagtcagatctttagtgattacgaagtgaataataaaagcatgaacacattaacaaggtatttgaggtactttcaacatatgcatgaattcatattaccacatctgagtgacactgctaaaactcaagtgctatatcatatattaggttgttcggattcttacctgaattcctctaaaacggattcagcgaaaagcttaaagtacggcgttgatgttaagcctgacacacagtggcttacactagtacaactagatttgacgtatgttttaatacgcgatttgaactctacatttgccactgaggagtatactattaaagaaattagagataaactagttgaattggccacgtgtgaaatctttacaatccgtgttcacacaatggaaattttgagagttttcctcaataattgtccggagtatctttcggagactatagaaaactctctacatgcgttatccagtgatttcaaatcgactgaaaagtttgtcttttatagaaatcatggacatgcttttattatagcgaatttgattaaagacgccaagagcgactatatctcgtacgagctaattatgagaattacggttttctccacttcattcattaaaaacaataccacgtctacatcctccaatttatacttcaaaggtcttttatgctggatactattgatcggactaatgaattataaagatgaacaatatttgaaactacaaacatctcaattatttcttttctggaaagttttattaacgcacacttacacgtatcacgacgaggatgaattgtacaagaatttggaaataagaaaccacgccttgacctgtttattgacgtatttaagtaatacccaaattgacaaagatatggccaagcaagtatcatatttgttgactaaatgttccaatttcaaccattccgttgatttgaaatctaaaaacatcgacaacgcactattgcacaacgagaacaggatcctacaggtttacctcaaattagaaaagtacataagtggcgatttcaatagctcgttactaatattaatcgtaaagaatttctcagatcccaatctctatacagagtcaagctcttctggtttaagcaacctcaaacacattcgtaacaagaaggtggggaataaagacgatgtagaaaataacgccgtctcagaatcctcaataaattctttactccgtcaaaacaatggcttcgcctttggtctttctagtaagatagctagcgaccgtattgcaagtctgtcaatgtcccctgctaacaaatatgacgaatcaattagtggaaactggccatctaaggattacgattggtacaacattttcgagaaggaaatatcaaaaccaatttctccaattctatctctagactcattgatcctactatatggatccggatcttactcgcaaactgatcgttatgcacctcaggttactacatctctaatcgactcctctatggagctcttttcgtctgtatttccatttctgaatagtaaaatacagtactctgttatggaaactttaaacttgtcaatgttttccaagatgactaccccgttgagaagtgttgcaattgcggccaacgtttgtagtgcgttgcatagtgctttgtacattatgcaagaaagaagcttagagctggactacacagtggggcaattaattattgaatctatcaaaaaaattcagttttttaatgacacctttttaacaaaaatcaaagcagattgtatagggttacttacagccgctattgcacggacatataacgatgaagagaggcaaaggtttcttatagaacaatcaagaatattcattaaaaacgttgcagatatggaagagccatacttcagaatgtttcacgtgctatcgctggcaacaattttcaaatacaattcacaatacgcaaattttgaaacctcatttaatgtaatttttgcgctaacaaatgacccacatcctgtggtccattcttggtcattgaaggcaatgcacgttctccttgagaagcacttggttattgatctgaaaacaacatctatgctgctcaattttatggaagaggcgctgataaacgacagatatggtgcctacgggcgctccactcttcgctgcaactacaatagagaatttaattcacatgtggcaattggtgaaattttaaggactttagctgaaacggtgggcccaaactttctagagctgaatcctaaggttcttgattcgttcaggaatactactttatctttattgatttccaataacacactcaacaatatcattagcattaaaatattcgaaaatatggctacgttcaaaatgaaaagcattctaaactacggaatattcatttctttttctaagaatataattaaaaattcaatagttacaggaataggatccacatattttaactctacctttacaggctcaaatgaacttattccatgtacttcgagtttaaaaagcgctttcgaaaactttgattcattcacattattgtacaaattacaaatggaagaaatattcatgaaagggatggaaagtttaagctggagatatttggcgctttttccaaattctcgctctgtgaggagttactttaccgaatggatattgcatactcttgaagaagacagccattggttcgacaaattgtattcggttttcaatatgaatataggaagactatttcaaagttattacagggacgtgacagtgttattaaagctaaacggtctccaaaaatcttcagagaaagaaataaaaggtgaagaagaagaatcgatagctaacgttagccagatggccaatacagatacccacgatctcggctcagacagcattcaatggaagagcaaacaagttattttggatttgattttaacattgtgtttggaatccgaaaaacatgaaaaattacttgttgctttgagtaaaaagcttgcggatctcattgaaatctcattccgtggatctacagtcaggtgcgaggatatgaagttgacaggattacaaattttgaattttgtgctcaagaactactcatcaatgagagatcctcagattcctgaatcgtcgatattagaacaacaggaagctcaaataactagcgcgttgatgcctgcattcagtaaaggaagctcacctacggtaatatccttcgctatcactgttgccgctgaagtgctagcttccaatatcatgccacctactaaactaggaagaatttcccaactattgattgatcttttgcgcaatttgaaagattctacttccagcataaatgtaggtgaagctgtcattgttacgccaaaagcaaaacggaaaattgaacttgccgttttggacgcttgggcggaggtagtacaaaggtccatcacctcatcaaacgaagaactcgtctctttcacaaagaagtattggaatattttggttccattatggatcatttctcttcgcgaatacatgatgataaaatatgatgagaatgacgctacactggaattgaaaaatcaatcgaaagacaatacctttattgaattaagaagtacaaagattgaattatatgagccagtctggttaaattttgtagaggcacttggatgcacgcttgattcagacgttaacattattctaggatctcttgataacgaggaattggagtattttatttttgttttgtttagccaatgcttggaggctatcgtcaagaatattgatgaccattcaattaagatgcaggtcctacctgctttgcataatgttttaaaatgtaatttatgcaccaaacgtttatttgaagatgatataattgctgaagttgttgggataatggataggcttatttctacaggtgatagcaaagaagaatttttacttgttgatatcatcaacgacttgatcattggttatacaaaatgcaatactacacctgagacgtttctacaagatatcgacaaattatatgaattactgcggctgttaatgatgataatttcaaaaagactgccatttatcaagtataatgtgttagacagcaatgataacaataacgaaataaagctatccaccactgacattgatttgctgaaaaaaacgttcatcgcattcgagtcaaacattagtaagtttgacaatatgtttaagttagatctctattcctgtcttttattcatcatagggaagatttatgaatgcggtgatcgcgacttgataatcccaattatacttccgcttttcaaggcattggtaatggcacttacagactctgaggatgataaaaacattgcgttacttgaaattttttacgggtcaataaaggatgtgatttataataaactaaactcaaacaacaaaattgctaccattttaattttactgtccaacggatactccaatctaagcaatcaagaactgagtggctgcgcagatatcctattggaagcactaaacaactctactacacaacctattactttccaaggtttcaaaagaataatatcgaataccgctaaatactcgtcattacaatacttgatgaagttggtcataaagagatttttccaagatatccaagctaaagattctttatctctagcgaacattgaaatgaagctaataatacaattcacaggggaagtaattaagcaagataactcaaaagcgtcatcgtcaattgcgttatgtctttctttctttgtcagatatcatgaggcttatatgaacaaagtggacaaagaggttgcaaaggaaatcatggctctggccaaattggacaaaaattccttcaaaggtgctattgcaaatattttaaatcccgaacagaaagcaagtattgtttctttaatggatgcttatgctcagtcagaatctgtaggatctgtcgaagaaccctttcaattgaaatccttcaactaa

SEQ ID NO: 1313 - DNA, 2526 bp, Saccharomyces pastorianus
atggacggcctactaaaagttcccaaggtcgtcattaatattgcatcatttttgcccactacagattatttaagttttcaacaggtaaataaacaggttcatgattcagttcttcaaggtgagaatgattcaaagtactggtcgttgaagttaaccagaatgggccttcaaatggtccgctcgcacgacacagaagatagtaaattattgaacgacaatgataacgaggatcctatagcaatattcgaggtatacaaatctttcacttctcaagaatccaaaaaaatctttgcaaaattttaccattgttataattcatttgctaaaaaactgtacaacaacaacctagctaatttctttccaaattcatactccaacgatccattgaaacaaataaaaactctaaatttcatcaaacgctacaatttatcaaacagaaatgatctgaaaacatatagtaagatagatacgaactttaacatccttagagaaatctttataaactctgttctcaaagaaatggaattaaattaccagtccaacgatttagtcacagtggcgcgctttattaaagtcttactggtatcaaatgaggaaaacaatgctatcgaatttttcaaatcgaaagcagatttacctcctagtttaacagttttaccttccaatgacgaactgtttttgagagagcaaccccaaagaggggaagatagtaaaagtacagacatcattaatcctgagactttggacaaacttctcgacccattaagagactttcttaatgaaaagatcaaattagccgacatcctatttcaagaggaatttcctgtaattttacagttagttgaatcttttattcaggatgttttactggacattctaagtaacattctatcaaattatagcgggtttttgaaatcaaacgataaagattccaaggcaaattatgaatgtttaccacagctttattttacgtttataaagaaatttggtaccgaattaaatgattctgtcaacgcaggttcaacttttcgtaaggttgctgacgaatttttagacctgtatctggagccctttgttgtcaactatttaaatcagacaactagagtctttgaatcactgattagttcacagttagttaattacgatatccaatttcaagacaaagaacgagagcagaatgaaaaaatttataactctctgaaagatcaaacagatactacgagcacaaataataacgattcatcaaatagccattcaacaacaataatttcggcaactacaccagaagcagaaccaaagttaaagacaccaccacaatcggtgcactcaactaataacatatctgatgataaactggattttttaagttcctttactaagatcttcaaattttccaataacgaaaatcaaaaactaaaacaacaactacaattagcatataatttgaatttgatatctaataatctacaaaatattaaatcgctgataagtcttgacctttgttacaaaattctacacgagacaagcgaaaagacagatgaaatctatagatttcatacgatggaaaatttgttaccgttaattaagttgcgatgtcaagagatttttaaaattttgattacccaattgaataaaaatcacgttaaacctgcttttgagaaggcgattatgctactacaaaagtataatcccaatgagttagagcaaatagaaataaagtttgattcactttcaccgggaaatagtcgggtagaaccgttggtacaatttactgagctgatcaatataggtgacatcatattacaaatgatttccattttttacaaaaacgaactaattcctaagaagattatcgacaagaacaaagatttcctcaatgatgttatccaatcaaaaaaaaattttgaaacttctattgatgactttgtagcagaagggttaaatattggtataaacaaactaatggatgaaatttcattcgttttcaagactctacagttacctgacgactacaacccaccgcccccttccacaaattcaccaatacgggatataaaaccgacaaaatgtgctattagggtcgttgagttactttctaatcattgtttcctattgactggggcgaccgataagggtaccattgatgtctaccaacaagaaatcggtgaaagatttttcaacgagatcgtaaaacatttgaaaaaaagctttatatctacagaaggcgctatttggttgatctgtgatctaaattacttctatgattttattgccaataaattgaaacaaaaaaacgttgtaccttattttgttggattgaaatctattgggcaattgtatatcatatccggaaaggactcgaaagagctagggaagttaatttccgaccttgggaaattcaatggaattttcacgcaagaagaaatatatgagtttgttcaaagaagaagcgattgggttcgtgtacgaaaagacgttgaaaaggtgatgtatggtctcggcatacgtgattgctgcattatgtaa

SEQ ID NO: 1314 - DNA, 843 bp, Saccharomyces pastorianus
atggaaccgcaagatccacaaataagagaggacattaaaactactgcaacatacattaaacagcacggggctagtttcgaaagcaaattattagaggatgagagattttcatttatcaagaaagacgacccactccatgaatactatatcaaagttttgaacgagccagcaacgaattcaggaaatgaggaagatataggaaggagggagcacgagatagctaaaccacgaaactttttattttcccagtatgatacagggatctcacggagagacatggaaataatcaaactcacggcacgctactgtgcgctggatgaaagtaaccttggatgcatagcctcgaaacatggcgagggctctttacagtttttaaacagttcacatccgttacacaacacgtttaccgattttgtcactcagtataaacgcataatctcttccgaggatcaacaaataaagaaaaccaagagtgaaatcatcgacgagtgttttggcagagcacaatattgggaattcgctaaagatcaagaccaagagcacaataaacttgtagagttgtgtaaaatacaatttgcggcgatcccgtgggatgaattcactcaagtggcgaaattctttattcctgaccacacagatacattggtagatgctctcgatttatcccagatgaggctgcgaagagtacaacccaatatgaagatatttgaccgtgtcagtccagtgaatgaagaacaaaaggcggccctggaccaggtgaagtctaagggaggagcccctggaagtaagaaacgtaaaattagagcagcaggggagacaaggctaaagaagaacaagaaataa

SEQ ID NO: 1315 - DNA, 2370 bp, Saccharomyces pastorianus
atgctatcttccgctaacaggttttacataaagaggcatttggcatcacatgccaatatgttcccttctgtgtccaagcaatttcaaacaaaagtacctccatatgctaaacttctaacaaatctagataagatcaaacaaataacaaataatgctccattgacattagcagaaaagattttatactcgcatctctgcgatcccgaagaatcgataacttcttcagacctatccactgttcgtggtaacaagtacttgaaactgaatccagatcgtgtggctatgcaggacgcatccgctcaaatggcacttttacagttcatgaccactggtctaaatcagacatccgtccccgcatctattcattgtgaccatttgattgtgggtaaggacggtgaagcccaagatttaccatcctccattgctactaaccaagaagtctttgatttcttggaaagttgcgccaagagatatggtattcaattttggggtccaggttctggtatcattcaccaaatcgtcttggaaaatttctcagctccaggtttgatgatgctaggtactgattctcacacaccaaatgcaggtggtctgggagctattgctatcggtgttggtggtgcagacgcagtggatgctctaacaggcacaccatgggaattgaaggctccaaacattttaggtgttaaactaaccggaaggcttaatggatggtcaactcctaaggatgtaatcacaaagatcgctggtttactgaccgtaagaggtggtactggttacattattgaatatttcggtgaaggcgtctctacattatcctgtaccggtatggcaaccatctgtaatatgggtgctgagattggtgctacaacatcaaccttcccttaccaagaagctcacaagcgctatctacaggcaactaatagatccgaagtggccaatgcagctgatgttgccttaaacgaatatggcttcttgagggcagatgaaggtgcccaatatgaaaaagtcattgaaatcgatttatccgccattgaacctcacgttaatggtccattcacacctgacttgtccacaccaatatcccaatatgctgaaagaagtctgcaagagaattggcctcaaaaagtcagtgctggtttgattgggtcatgcactaattcatcatatcaagatatgagtcgtgtagttaatttagtcaaacaagcttctaaagtaggcttaaagcctcgtattccattctttgtgactcctggttcagagcaaatcagagctactttggaaagagacggtataattgatattttccaagaaaacggtgctaaagtcttggcaaatgcatgtggtccttgtataggacaatggaatagagaagacgtttccaagacatcaaaagaggcaaatactattttcacatcgtttaatagaaatttcagagcaagaaatgatggcaatagaaatacaatgaatttcttaacatccccagaaatagtaacagcaatgagttattctggaaatgctcaatttaatccattgacggactccatcaaattacccaatggggaagatttcaaatttcaaccacccaatggggacgaattgccaaaaagaggatttgagcatggtagggacaaattctatcctgaattggacccaaaaccaaatagcaacatagagatcaaagttgatcctaaatctgaccggttacagttattggatccattcaaagcatggaatggcaaagaattgaagacaaatgttcttttgaaagtggaaggtaaatgtacaaccgatcatatttctgctgcaggtgtttggttgaaatataagggtcatcttgaaaatatctcctataacacattaattggtgcacaaaacaaagaaactggtgaagttaacaaagcttatgatcttgacggcactgaatatgatatccctggtttgatgatgaaatggaaatccgacaatagaccatggaccgtaatagcagaacataactatggtgaaggctctgcaagagaacatgctgctttatcgccaagatttcttggtggtgagattcttttagtcaagtcttttgcaagaattcatgaaacaaacttgaaaaaacaaggtatgctaccattgacctttgctactgaatctgactatgataaaatctcgagcggagatattttagaaacattgaatcttgccgacatgattgccaaagacggcaataatgggggagaaattgacgttaagatcactaaaccaaacggtgactcatttatcattaaggcaaagcataccatgtcgaaagatcaaatcgattttttcaaggctggttcagcaattaaccatattggtaatatacggaggggcgaataa

SEQ ID NO: 1316 - DNA, 3768 bp, Saccharomyces pastorianus
atggactcttcgaatgcttcaagttctgagacttctttggtttataatgaaaaccaacaatctccaggtggcacgacaccatgtgatcggttgggagtggatttgatgaatgttttagagaataatgatgaagtaaagcaagaagcggctccagtaacaaaccgtgaaattggggacacggaatcagatgcttctacaggttcttcgtttgctagtgctaatgaattgcttcgtgaaactaataccaaaaatgaaactagtgttgatgctaatggcggccttacgttaacacagcaaagagaaatggtcgctcgactgacaagagtacagagggaagcgcaaaaagaaggtgataaagtctgcattgttccaaaggcatggtatgataaatttttagaccccgatgtcactgattctcaagatattggtcctattaatacacgggtgatttgcagagattttgaaaatttcgtgcttgaggattacaacagatgtccatacctatctgtcagtgagtctgttttcgaattcttggcagaaatttatggactgactagtggctcttatccagttattactaatttagttatgaaccaaactacgggggaattagagacggagtacaataaatggttcttcaggttgcatcacttgacagagaagcaagagatacgtaaaagagggtatagtcaggatgattcagtcttgtacttgtcaatgtctgcgttggatttggtacgcgacttagttgagaagagtatgaatttatttttcgagaaagcggatcatttagacataaatgctgtagactttaaaatttggtatgtctcacagggatcagacgtttccgcggatacaaacaccagtaatgttttgaatgcatcatacgaaataactccattgcagtttttagagctaccaatcaaaaaactactcattccagatatgtttgaaaatcgcttggacgtgataacttcaaacccaagtgatctagttatagaaattaaacctatagagggcaattaccattgggtttcgaatcactttgtttataataaactcgagtcagcttcaggaacgaccggtctggtcaatctaggaaacacgtgttatatgaattcggcattgcaatgccttgtgcaccttccccagttgcgggattactttctttataatggatacgaaaaagaaataaatgaagaaaatcctctcggttatcatggttatgtagctagagcatttagtgatttgattcaaaagttgttccaaaacaaactgagcataatgcaaagaaatggagcgtttcctccaacgatgtttaaatctactattggacatttcaattccatgttctccggttatatgcaacaagattcacaagaatttttagccttcctattagacagtttacatgaagacttgaataggattataaagaaggcgtacatagagaagccatcattatctcctggtgatgatgtgaacgattggaatgtgattaaaaagttggcagatgatacctgggagctgcatctaaagagaaatcactcagttataacagacttatttgtcggtatgtataaatctacattatactgtcctgagtgtaaagatgtttccacaacttttgatccctataatgatgttacgctcccgcttccagtagatacggtatggaataaagctgtcaagatttttcctatgaactctccgccacttcttcttgaagtcgagttaagtaaatcttccacttacttggatttgaaaaattatgtgggtagaatattagggttagatccaaatacgctattcggttgtgaaatcttcagtaatcagatatatgtcaactacgaatcaatagaatccaatgctaagtttttaaccttacaagagttgatcaaacctgctgatgatgtaattttttatgaattaccggtggttaatgataatgagattattgttcccgtggtaaataccagaattgagaaagggtacaggaatgcgatgttatttggagttcccttcttcactacacttacaaaagaacaaaggaataatccggcggcaataagaatgaaactccagaaaagatttattcatttgagtggtggatttatttcctttgcaacccccgttgaggatcaggccgacttagtgcatagttttcctttattggcagaaaaatatccagatattgaacttcgggattatgaagatatactgcaatatgtatcaaatatggcagtcgataaggataaatcttttttctcagtcaagattctacctgtagaaaaagagcaacaatttgttagcaacaaccaaacaggaccaagcttttggaccccgttctctcagttgaattacaacagagccacagatataaaggatggcctaacagatgtggttagggatatatacagttatccagccctagtaaaatctgctcaaggaacccctatgcaggtggacgatgaaggcgaggccggacttgatgaggaacacgattcctcaaaacccttacaggctgaagacaaactagaggatagaaagatagaaacaatcagtgggattagaagtgatgttaatgatcaagacgaagatatggaatcaatagacgatgttgacgaagatgggagtacacagccactaccaacagatagttgtagaaaggaagttttggataaaagcgagaatagcttacactctatttcgcacgaaattatttctgcagatgatattattgtttgtgaatgggaagaatcggcttcaaacgaggccttctctgacgacaagatttataactgggagaatccaagtattttgcctaatacagagctggaaaaggtcaaattggaaagacgcaatgctaaagaaagaactataacattagacgactgcctccaacttttctctaaacctgaaattctaggcttaaacgactcatggtactgtcctacatgtaaggagcaccgtcaagctacgaaacaaatacaactttggaacacgccagatattttactaatacatctgaaaaggtttcaaagtcaaagatcttttagtgataaaattgatgataccgtgaattttcccattacaaatttggatctgtcagaacacgttgtttataaagatgatcctaggggctccatctatgatttgtacgcggtagataatcactacggtggtttaggtggcgggcattacactgcatacgtaaagaatttcatggacaacaagtggtattactttgatgattcacgagtaactgaaacggtacctgaaaacagtattgccggatcagcatatttattattttacattcgccgtactaaggatgggaatgaattgggcggctctaaactacaagagataatcagggagtcacgccaggaatacgatttacgtattaagagtatatatgatgagcaaatgaaactatatgaaacgaataagacggatgatgaggaggatatgtctgatgatatagtggaaagtaatgaggatgttcaaacccctgaatacagcaatcgcagtttagaggttggacacattgaaacgcgggattgtggtgatgaagacgacaacgatgatggcgaaaggacaaactcggggagaagaaaactgaggctcttgaaaaaagtttacaagaatttggactcaggttcatcgagtacgtctgaagtatctgaaggaggtctagaaaatgagagcactggacttgaagacttgggttataagaacgacgtaactctcgaatctccagaatga

SEQ ID NO: 1317 - DNA, 1209 bp, Saccharomyces pastorianus
atgttccaacgactgtcgatctccattagacacaatgcacacatcatatttttatgtatatgctggtactttatttcttcattagcatctcaagtcactaagcaggttttaaccgtatgcccgttaccattgtttttgggtgagtttcaattcatatacactgctatgctagcttggtgttcctgtttcattgcatacaagtatcagaaattttatcacatatttcccaaaggcacatttccagaatattatggcaacgctggcgacagcaatcgtatgatgagaaaaccatccaaattaagttctctcattatatcaccttccaggccaattttacaaacagttttgcctttaggtctcttccaatttgtcgggaaatattttggccatacagctacttctttggtgcctgtttctaccgttgccagcataaaaacgctttcccctatgtttattcttttacttcaaaagcttctaaagatttccactttgaaagttacattaactcttacctttagtttatgcacattggtttttggggtttggattattgttcaggaagacaatcgtttacccgcttcttccagtgatctaagggaattctctaattatggcatcatatgcgctgtcatatcgatgttcatttttgtcctgcaaaatatatatggtaagactgtgtttacattcagatctcaaaaggatggtgtccaaactaactcaggatcttcccgggaagattcccctttacctatctatgaaaaatctaatgaaagacctgccatgcagaatgtacctaaatcgtatgacaaattgactttgatgatttacatctccctcgtgggattttgcctatctttttgctggtttatcaccttagaattccctatattattcaaatacttccttggaactgacaattcggtaactgtgattcaatcttttcccgtgtctctgcttttattgaacggaactttccacttcattcaagcaatgataactttccacttattaggcgaagtctcaactttaacatattcgatagccaatcttatgaaacggtttgccattattgcagttagttgggtctttattggaagaagaatcacctggctacagatcctcggcttggttttgaatacgttaggattgtttctctatgaacgatgcacgtcgcaatcgaaaacgaaaataaaatttcgccctgaataa

SEQ ID NO: 1318 - DNA, 2556 bp, Saccharomyces pastorianus
  modified_base (2241)..(2290): a, c, g, t, unknown, or other
atgagttctttggacgaggatgaggaggactttgaaatgtttgacaccgaggactccctgttcatggggaagaaggcgtttgggaaaaaggttgatgaggatgatgaggacgacggtgctgtaggagggagtactccgacgaataaattaaaattttatccgtactcgaacaataaactgacgagaagtacgggtactttgaacttgtcgttaagtaatgccgctttatcagaatctaactcgaaattcttaggtaagatcgaagaagaagaagaagaagaagaagacgaagaagaacataaccatgatgacgaagaggaggaggaagaagaggaagaaaccatggattcccgtataaatagatggtctcccttcaacgaaaccgataatgttgctacgcctactgtcaagagatcgatggacaggaccagcagtcccagcttccttgggcagtggaaccagcgatggttccccgcaaaccagagtcgcaatgatagtaaccctccttcctcttcatacaccgttgctaagcccaaccagtctgtcttcacctcttcgggactcatatctaagatgtccagggattcttctttataccctacaaaactaagaataccagaaacaccagtcaaaaaatctcccttgatagagggaagagaccatcatcatatccatctttcgaattctaaaatcatatcctcttcactaagcgtgtctcccttgaactttgtcgacgataacaatttacacgaagatcttttattttcagattctccatcttccaaagctttaccctccattcatgtatccgccatagactcatccccattaagcgagaccaaataccaatcacatgaccgtaacaatagtcatagcaacattctgtcccctactaccagtttgatcacaaataattctccacagacattgcattccaacaaattcaaaaaaatcaagaggactaggaattctgtcattttaaaaaacaaagagctaacgaacagtttacaacaatttaaagatgatctgtatggtacagacgaaaatttcccacctcctattataatatcaagccaccattcaatcaggaaaagcacccagcattgtcaacttcgtaaccctaacgacaatgacaccgatgaagagatttctactccaactaggcgaaaatctatatcaggcgcaaaacctcaaactcattatgaaacgaaacctttatcattatcttcagcatcggtaccaactaagtcaaacgcagagacgcattctatatcttccacagactcctcccccttaaattctaagaggcgtctaatttcctcgaacaaattatctacaaatccagattctcatttgtttgaaaaatttacaaatgtgcattctattggcaaaggccaattttccactgtttaccaagttacatttgctcaaacaaacaaaaaatatgccattaaagccattaagccgaataaatacaactccttgaaacgcattttgctagagataaaaatactaaacgaagtaacgaaccaaatcacgtcggaccaagaaggtaaggaatatatcatcgactacattagttcgtggaagtttcaaaactcgtattacattatgacagagttgtgtgagaatggtaatttggacggattcttacaagaacaagtaattgccaagaagatgagattagaagattggagaatttggaaaatcatagtggagttaagtttagcgctaagattcatccacgaatcatgtcatattgtacatctagatctaaaaccagccaatgtcatgataacttttgaaggtaatttgaaactaggtgattttggaatggctgctcaccttcccttagaagataaaagtttcgaaaatgaaggcgatagagaatacattgcaccagaaataatttcagattgcacttacgatttcaaagcagatattttctccctaggtttaatgattgttgaaattgctgcgaacgttatattgccggacaatggtaatgcgtggcacaagctaagatcaggcgatttgtcagacgcagggcggttaagttctacggatatccattcagaatcattgttttcagatactacgaaagtcgataccaatgatatatttgattttgaaagagaaaacactacaaacaacagcaacaacaacaacaccgccaatactgctactgctattactaccgctactaataccaccaccaccaccactaccactactaccacnnnnnnnnnnnnnnnnnnnnnnnnnnnnnnnnnnnnnnnnnnnnnnnnnnctccaacaggtaatatcactactactaaaaatggtctggttctgcataaaagtctcaaaattcccgcatgggtaccgaagttcctcatagatggcgagtcactcgaaagaatggttcgatggatgatagaacccaattatgagaggagacccactgcaaatcaaattttacagactgaagaatgtttgtacgtggaaatgactcgtagtgcaggcgccatcattcaggaagatgattttgggcccaaaccaaaattttttatatga

SEQ ID NO: 1319 - DNA, 1761 bp, Saccharomyces pastorianus
atgttgatcaggctgaagaaaagaaagatcctgcagctccttttcagcgcggtggtgctggttgtattcttctgcactgtacataaagacgcgtcctctagttggctcgatgccagcaagtcgagattgtcaaatctgactgggtccagcaacagaaacagcttttatacgttactggttgatgctatcgtcaaaaccaaacctttgcacgcacaccccgatttgcgtgagctgcatgctgtggaagggtgtgtatttgcgaacaacgtggctgctcatgatacttcgcacgatgatagcctgagttacgagagcttgagtaaatgttacaagctgaatagaacggtactggcaaatttagcggatatgcacaatgagtttacggatatcttatcaggaaagctaaattactccacctcgcaaatagaagctctttttcccgaatccgaagggatagtcaccatcggaggtgggaagtactctgtgctggcttatacgatgatcaagaaacttagacaaacaggcactacattgcctattgaagtcatcattccaccgcaggacgaaggcgacgatgatttttgtaaaaactggttgcccaaccataacggtaagtgtctttatttctcggatatcgttccttcgacgtcgttgcgtgatctggaactcaccaattttcagctaaaagcctttgggttgataatttccaatttcaagcgcataatcttcatcgatgcggataattatccagtgactaatcttgatcttgtcctcaacacaacatccttccaagatactgggttgattatgtggcccgatctttggagacgtgtcactcctcctgccttttacaacatcataggttccaccatcaacactagcaaaagagttcgttttgtcagtgatgatgtttcccccgtgtctcgttatgatcctttcgtcagcaagtcagaggaatacacgtcagaggagatgcaagaccatttcttgagacacgttcctttacatgatatggatggtaccatgccagatttaacttctgaatccggtcaaatggttatcaataaggttcgtcatttccacacactgctattggcattatattataatgtctatgggcctagctggtattataaaatgctctctcaaggtactgcaggcgaaggtgacaaagaaacctttattgccgccgcccatgctctgaatgtaccatattatcagattaaaaccaaatttgaattcgatggctttttttataaaacgaacgattaccaaggccttgctttgctccagcataattttgagcaagattacaagcaatatcaaaaagcccaggaaaaggttaaagctaacatcgatcaatattccaaactggatttagactataacttggatgatggtttcttgaaaactttgatgttaaatgacgatggctctgatttggatattatgtttattcatgcaagttattacaaggcggatccatggactttgttccgcgaaaataggtttattagtcccgatggtaaacaagtacgcggattctggaaaccgcaacggtatgcaatggatttcgaactgtttttgtttgacgatatgaaagaatccttctgtactcctgtgaaggacaaagttataaaattcaagtatttcgaagataagatcaacacacccaaatgggatgaaatgtgcaaatacttggctaatcatgttgattatttaacgagcactcataaagaattcatggaaaagaaagattaa

SEQ ID NO: 1320 - DNA, 882 bp, Saccharomyces pastorianus
atggcggccatgaacaatatccaggtagaacgcgggttgaggtctactcgcatccagcgcaggagtgacagcagcgttcatgatgaggtgtcaccgtttgagatggtggagttttctgggaggaattttgagcttgatttccataggttagagtcgtttgatgatgtacgggttatcaataaccctgagctttcgccgaagagctcatatactgccattagtcacaatgaggggctggagcctgcaagtagtgcctttgaagttccctccgacgagattgctatactatcgatatctagcagcggtactaaaagttcaccaccatcagaccagccgggcgccaatcttcgcaatattcaatattctactaactccgatagaatagatgagtggtgtttgagcagccacttcttaaatgggttgcgacagaatgtatctcagccaaacgatagcaccactcaggggttcccggtttcctctttcagggaaatggaactccacacatccgcaaaactaaagaagctcacaaacagccaaagaattgcggtgcaacagctatcaagagacttgtatcccattttgagaacctgtcgccgtacaaaatcccggggacctcttttgatataccgtcaagaaagactatatgatgatataccatcgtttttcccacagcgtgactccattttcaggtattattcgttgccttttgaattcgacagattttctgacgtcgatatagagtcctcgtcgccttcacgactggcagacgataattttcgagaaccgtcgaaccgctcatcaagtactgcatcttcttcggtggaaaacaggtcttggtttgggtggactttgctttctaggtttctagatagggaatggtag

SEQ ID NO: 1321 - DNA, 1269 bp, Saccharomyces pastorianus
atggcaattaaaccaagaacaaagggcaaggcgtattcgccgaaatcgacggggtctcaatggtttaatagaattggtttcaagcagaacaaatatggcacttgtaaatttctatcaatcataacgaccttcatttgcattctttacttcttctccagccgattctatccaatgtctcgttccatgagtgtatcccatcctccatctcatggactctatattaacgaaattcctgcttccagccgattgatcttcccacatgtagagcatttacccgtattgaagcaaattactgtaagggggctttacaatacaagactggaagtggacggtaccaagaggttggttttaaaagccgaagagaatgcctttaccgatgaagagaaaaaaaagaccacagatcaagttctactggtaaagcgctctttcttggaccacggtaaattggtataccgtaaaaccaacgatgctccgaaagtggttgtggtcacattgatagatttcgaaaactacgatatggaaaccgttattcgaattgttcaaaatagagtcgattatgctcaaaagcaccaatacggtgtttacgtccgttggatacaggaatttttgcccgttttggagaaccaaaatttggatcaaagctatgacttcattaagccattgatgataagagctgccatgcatgctttcccaactgccaaatacattcattttgttgatcaagatgcactattgatgaaccttgacctttctttacaaaaatacctattggatcctaagattctggatctggctctactaagaaacgttccagtcgtggctaactcaaacatcaaaacgtataatcattttgaattgaattcagccaagatcattattccccatgatacagatggtaatatcgatacatattccttcgtcgttgctaatgacttccatggccaagctctggtagactatttgaatgatccactgctaagaaattttccatgggaaactaaaggtgataaatttggttatgctattggtcaccttttacaatggcatcctaccttactgggcaagacagcaattgttataccaaaggtcttagcaagtcaacacgatgcttctttggattcagaagacgaggcaggaaacggtgcttccagcggcgacgcgtaccattacaatgaaggtgatttggccgcttccttcaagggctgtaggtcaagaggtacatgtgccagcgagataagaaacatgtacgagaaaattaagaaatcctga

SEQ ID NO: 1322 - DNA, 981 bp, Saccharomyces pastorianus
atgttgacatcattgaaatacgggaactgtgttgccaggtcaattagatcgacaatccctcgtttctattcactaaacgctcagccattgggcacagacaatacaattgaaaataactcacctacagagacaaacagactgagcaagacttctcaaaaattctgggaaaaggtgtcattgaatagaaacgctgaaaatggaaaaattgcattacaattagatgggaagactataaagactcccctaggaaacggtatattaattgatgatacaaggtctcttttagcatacctattaaaactagaatggtcatcgttatccagtctctcgatcaaaacgcactctttgccattgacctcattagtgtcgagatgcattgatttagaaatgacaaacaaacccggctgtgatcctcaattggtcgcaaagatcggtggtaatagtgatgttattaaagaccaattgttaagatatttggatactgataccttgttagtgttttcgcccacgagtgagtttgaagggaaactacgtgctgcccaaaatgagttatacttgcccttgattaaaggaaccgaagaattcctatccaaattttcttcccagcatgatgacattcatttacaggttttagatgctgatatccatgggttacgaggtaaccaacagccaaatgtagttagggacgcagctatgaactacatgaacagcttatcaccatgggacctggctatccttgagaaaactgtactaactaccaaatcgttcatctgcggtgtgctattaatggaaaacaagaaaatctctgataatctactccctggcttgaaaactgacatggaaaaaattgttcgtgctgccactttggaaaccatctttcaaattgaaagatggggggaggttgaagatactcatgacgttgacaaaagggacatcaaaaggaaaattcatactgccgccatagccgcctttaagcaataa

SEQ ID NO: 1323 - DNA, 330 bp, Saccharomyces pastorianus
atgtctcagatagcacaagaaatgacagcgagtttaagaaactctagaacgcaactagacatggttaaccaacaattagcatatttggacagacaagaaaagctggctgaactaacaaaaaaagaactagagtcttacccaacggataaattgtggagatcctgtggaaaatcgtttatcttgcaagagaaagccaaatatgtcaatgacttatcacatgatgaaaatgttcttttagaacaaaggaaaacattgaagataaagcaaaactatttagaaacatctgttgaaaagactatagaaaatctaaaggcaatgatgaagaattga

SEQ ID NO: 1324 - DNA, 2472 bp, Saccharomyces pastorianus
atgggaggtacgctgggcgacggatccacgacaggacttgccggggacgctattgaacaaggtgatggcaataacaatagcagcagcacgaacgtgacaacaactgttactacaaatacagaccttggcgacgagaagcagcagcaacaaagcgattcttcgaaggatgaagaggctgacacaaacacgggcgacgcggggagcgatgtggcagcagtgccagcagcacagcaaccgtttatagcggaaagtaaaccggaccctccgaaaacaatctctgtggaagaagacgacgatcaggttttgttcggccaagaccataatgatagcgataacttgtttggcgaaacagagagctctgtttcgaataacgagacaaacactcccgatatagctattaattctgtggagaaggataacaataagcttgctgaaaagaaggatggcgtgatagaagattcgagtaatgacataaaggacatagaggaagaaaaggtacagacgaaagaaggagcaacggagaatgaagaaattgacagtgtcaaagaggaagagccaactgaaaaggcagaggatatggacgaggacgagaacgaagacgaagaggacgaagacgaagacgatgatgaccaaccgatgatgagtcccgacaactctatttttggagatacaaagagtgagaccaaacagttagataatgcttcgtcgttcgttgaaacaccatctgaaatttcggatgcgcataaaaatgtccaggaagaaactataaataaaacggaagatattaatgaaaaagaagatgcaatcgaagagggaaacgagcatgcaaaggataatataaatggccacccagaagatgccgataccaaaataaagctcaccactaaaacagaaccagaaacgttcgatataccgcaagcacatgaaattgttattccaagttattctaaatggtttagtctagacaagattcattccattgagattcagtcgctacctgaatttttcacaaacaggattccatcaaagacaccggaggtctacatgagatatagaaatttcatggtaaattcttatagattgaatccaaatgaatactttagtgtcacaacggcgagaagaaacgtctctggtgatgctgctgcattattcagattacataaattcttaactaaatgggggctaataaactaccaggtcgattctaagctactacccaagaacatagaacctccactaacatctcaatattccacaaggcatgatgcccccaggggacttttccctttcgaaagctacaaaccatccatacaattaccagacatggctaagcttaaaaaaatgatgaacactagcgattctgaaagtactttgtataaatatttgaaggaaagtaaaagaaaatacgatgatatatcgcgtttatcgaacactccagataatgataatggcgataaaagcaataagaatatagagaaatcacctgatgagtctgatgagaatttattggaatacgatgaaacttcacgtcctctgaaaaaaattaaaattctggaacaaattgacaagaattggtcaaaggaagacttgcagaaattattaaagggaatacaagaatttggtgctgactggtataaagtggctaagcatgtaggcactaagtcacccgaacaatgtatcctgcgctttcttcagttaccgattgaagataagtttttatacggtgacggcaataccaagggcgctaatgaaagcggattgggaccattgaagtatgctcctcatttgccgttttccaagggcgagaatccggtcttgtcaacaatagcatttttggtgggattagtcaatccaaagactgtacaagccatgactcaaagagccatccaatctgaagaaacaatagaatctcaaaagaaggaaatttcagataaaggatcgtttgaaaatgttaaagaaggttcagaaattgctctatcatcgttgggcctaagaagccatgtttttgccacccatgaggagagacaaatgaatttattaacaaatgaattgatcagattgcaaatggaaaaactagactcaaaactaaatcacttgaaaaaaatagagagttttatggagttggagaggaaaactttagaaagacaacaagaaaacctactaatccaaaggttgaactttaatcagaattccaacaagattgttaacgtcctaaccaaatgcttgaattcaatatcggacagcaatattgataatagctcaatgacggatagggacgaaatcaggtcgcagataaaccactttcgaaacatgttatccaaacccgaaagtttaagtattggaaagaatcctttcggaaagtccaatattgaaacaggcgagacccttaatgaacaaaacacatctaacgaaaatgacgttaaaccgatttccatcgaagcaccccaattttacagatattggtcggcatga

SEQ ID NO: 1325 - DNA, 834 bp, Saccharomyces pastorianus
atgcgtttaccaacaggctccattttatacgcttgggtgtttttaatcacatgtgttctgggtgatgtaaacaccgtttctccattagccggagccaaattcagcccaagcggtggtacagtctctattcccgtcaaatggatggataatggtgcgtatcccccattaagcaaaatttcatactacacactcagtctttgtactgggcccaacaatgacattaattgtatagggacaattgccacacaggtcaaacccagtgctttggctcaggatcaagatggtgtttactcttacacagctacttttccctcgactttaactggtaacggtcaatattatattcaagttttcgcatgggtgaataatcaaggttctaccacccattatacgccaagattccagttgacatccatgggaggtactacagcttatacatacagtgactcggcggcgcccaccccacagacctccatccaaactaccactacgaataccgcacaagcatcttccatcgatagtcgttcatttactgttccatacaccaaacaaaccggtacttcacgtttcgctcccatgcaaatgcaacctatgaccaaggttaccgctacgacatggacaagaaaatacgctaccagtgcagtgacatacttttctactttcgggaaattgccccagcaagaaactactctaactccaggttggtcttattcgatatcttctggggtgaactacgccactcctgcagccatgccatccgataatggcggctggtataaaccatcgaagagattatctttgtctgccagaaagatgaatttgagaaaagtataa

SEQ ID NO: 1326 - DNA, 369 bp, Saccharomyces pastorianus
atggccagtgaaacacccagaatcgaccccaccgaaatctccaatatcaatgcccccgtgtttagaattatagcacaaatcaagtcacaacccacagagtcccaactggtcttgcaatcgccgaccatgtcgtcgacgaacggtggtgagatcgaaatgatcacattaaacaatatccgtgtctcgatgaacaagacgttcgaggtggattcgtggtacgaattcgtttgtaggaacaatgacgatggcgaattaggttttttaattcttgatgctgtactatgcaaattcaaggaaaacgaagagctaagtttacacggtgtggtcgctttacaacgactatgtaaaaaatacccagaaatatactag

SEQ ID NO: 1327 - DNA, 1737 bp, Saccharomyces pastorianus
atgattgccttgccagaagataaggcagttaaaaagcccatatggcaaagacatagagccttccttagcggaatagttgctcttataatcatcggtacttttttcctcacctcaggtcttcatccactcccaccatcaccccatgggcataagccgccacatgggggcaagggcgatcgtcacaagcccagatgtgagaagattgacgccttaagtccttcatttaaccgttccattgacacaattcttcatgattctgcttttagaaacagctccattaaaaaattgtccgacgctgttagaatccctactgtagtccaggacaaaaaccctcagcctgcagacgatccggactactataaacacttttatgaactacatgattatttcaacgagaccttcccccatgtgaacaagcatttgaaattggagaagatcaacgaattgggccttctttacacatgggagggctctgaccctgagttgaaaccgctattgctaatggcccatcaggatgttgtccccgtgaacaacgaaactttatcatcctggaatttccccccattctccggtcattacgatccagagactgatttcgtttggggccgtggctctaacgattgtaagaacctgttgattgctgaatttgaagccgtcgagcaactgttgattgacgggttcaaaccaaacagaaccgtcatactgtctttaggtttcgacgaagaagctagtggtatcctcggtgctgccaacctagcctcatttcttcatgaaagatatggcgatgatggtatttacagtattattgatgaaggtgaaggtattatggaagtcgataaagatgtctttgttgccactccaatcaacactgaaaaaggctatgtcgacttcgaaattagtattttaggtcacggcggccattcctctgtgccccctgatcatactacaattggtatcgcttcggagttaatttctgattttgaggccaacccatttgactatgaatttgagtttgacaatccaatctatggcttgctaacatgtgctgcagaacattcgaagtccttaagcaaggacttgaagaaaacaattttaggtgcaccattctgtcccagaagaaaggacaagcttgttgatttcatttccgagcaaaaccatttacgtaatttgataagaaccacgcaagctgtggatatcatcaatggaggtgttaaagccaatgccctacctgaaacaaccagattcttgatcaatcacagagtcaatttacactcttctgtctcttctgtctttgaaagaaacatggaatacgccaagaagatcgccaagaaatacggttatgggttatcaaagaatggcgatgatttcatcatccctgaaaccgacttgggccacattgacgttactgttttgagagagttggagccagcaccattttcaccaaattcaggccctgtttgggatatcttggcaggtaccattcaaaatgtctttgaaaatggtgtcttacaaaacgatgaagaattctatgttaccactggtttattctctggtaacacagacaccaaatactattggaatttgtccaagaacatttataggtttgttggttccattatcgatattgatttactgaagactttacattccgttaacgaacacgtagatgtgccaggccatttatccgctattgccttcgtttacgaatacatcgtcaatgttaatgaatatgcttaa

SEQ ID NO: 1328 - DNA, 1059 bp, Saccharomyces pastorianus
atggcttcagaaaaggaaattaaaagagagaaattcttgagtgttttccctaaaatagtggaagaattgaatgcatcgcttttggcttacggtatgccaaaggaagcctgcgactggtacgcccattcattgaactacaacaccccaggtggtaagttgaacagggggctgtctgtcgtggacacctacaccatcttatccaacaagaccattgaccaattaagccaagaggaatacgaaaaagttgccatcttggggtggtgtatcgagttgttgcaagcctacttcttggttgctgatgacatgatggacaagtccattaccagaagaggccaaccatgttggtacaaggtccctgaagtcggcgacattgccatcaacgacgccttcatgttagaggctgccatctacaagcttttgaagtcccacttcagaagcgaaaaatactacatagacgtgaccgaattgttccatgaagttactttccaaaccgagttgggccaattgatggacttgatcaccgcacctgaagacaaagtcgacttgagcaagttcactttaaagaagcattccttcatagtgactttcaagaccgcttactattccttttacttgcctgttgccctagccatgtatgttgccggcatcaccgacgaaaaggatttgaaccaagctaaggacgtcttgatcccattgggtgaatacttccaaatccaagatgactacttggactgcttcggtaccccagaacagatcggtaaaatcggtacagacatccaagacaacaaatgttcgtgggtcatcaacaaggctttggaacttgcctctgcagaacaaagaaagaccttggatgaaaactatggtagaaaggactccacctcagaagccaagtgtaggaagatcttcaacgacttgaaaatcgatcaattgtacgaacaatacgaagagtccattgccaaagagttgaaattgaaaatttctcaagtcgatgaatctcgtggtttcaaagccgatgtcttgactgcgttcttgaacaaagtctacaagagaagcaaataa

SEQ ID NO: 1329 - DNA, 285 bp, Saccharomyces pastorianus
atgggtcctccaagcggtaagacttatatgggatggtggggtcacatgggtggtccaaagcaaaagggtataactgcatacgcggtctctccatacgcccaaaaaccattgcaaggtatattccacaacgccgtattcaacactttcaggagattcaaatctcagttcctgtatgttttgatacctgcagggatttattggtattggtggaagaacggtaacgaatacaatgaatatctatatagcaaggctggtaaagaagaattagaaagagttaacgtttag

SEQ ID NO: 1330 - DNA, 2547 bp, Saccharomyces pastorianus
atgggagatgagaagctttcacgccacacgtctttgaagagagccaggtctctgtctgaatccatcaaaggtttgttcaaaccctcgggtatatcaggtggtagcagtactgggcaaccttcaccgcgtccaggtcaggaccaggcgcatccacatcaacctgcaagaatcatcactagtaatgtatcttctccatctgtatcccccattcaaagtcctgttttacaagtggctcccaaacatcataaactgggtgtccctaatattgctaagttatcattatcgcctagcagggaaccatctttgaattcggaaaatgaaatgttttcgcaggaatcttttataagtgagaaggatgaagatgaagccaatttgttggagagagaagagcttcaaaacaaaaatgaagagcaaaatcaaaggaaacaggcgcgttcaaaggacgctcatgtgcctcatcatcgttatacaataggcagcgatgaggctgaaaggcgaccaagggaaagacagaaaaactttccgcaaaatgctggtcaatcaaatccgacaaataacagtgctaatcatgttttggaccaggaaaataacttttctattgacgctatgcttgattatgacgacgaatccaaatttagaagaagaaacagtttgggtgtacgtaccaacagtaaccggacaagaagcaggaagaatagtttgtccacaccaagatcgccacctatgaaaactgtaaatgatggggcaaatcccaatgccagcaataatgctatgaataatacaagcaatagagtatatatgagaggaagaaaccattcagattctattagtgcctctagtttgccgaaattccaagaaatcgaatgcaagtgtattttagacttagaacaatttaaagtttttgagaacggatatcatgaacataatctaaaagtcttgcctattatcgaaaataataaaaacgtggacagtggcgaagataaggatgctgatgcccctgcaaacaacagtgaagatggcgacaacgatctcgaaacgaatattcataaacaaaagtctgtattttcattaagcggattattcaaatatcataaagatgcgaatcaacagcaacaacaacaagaagaagacgatgaccaaatcaatttggagaaggccttttcgataataccatcccagaaatttatcaaatctcaagtgttgaaaaaatcaagaactagtactcccaaaaatggtaataatgatgaactgatgaaaaatgatggtaaaaatatcccgcaaattgtgaaccctaatgctgcagtaggcgccgaagaattaaagttaattaatgcattgtctgagaagatacgaaaaggtctgaaaagcgaaaacgcaaagaatagtggcagtgaaaccagaagtaatagcaacaagcaggaagttatcgacgacaccgagaacaagtctcgaacagcaaacaatgacacttctcacaggccttgttctcaaaaatacggaaaatccattggagtagtcggtgcaggcgcatacggggtcgttaaaatttgtgcaagatgcaaaacttccaaagatatattaccgtatagtacctattctagcgggaaaaaattatttttcgcagtcaaagagttgaaacccaaaccaggtgatccaattgataagttttgtactagattaacttctgaatttattattggacattcattaagtcatccgcattttgaagcaaatacagcagtttcgggtagtattacaagacctacaccaccaagacatgttttcaatgcgccaaacattttgaaaattctggatctaatggaatataacaactcctttgtagaagttatggagttttgtgcgtccggtgatctatattcattattaaccagaaataatatttccagtgaggcaaataatggtagttcaagattgaaggaaggttccgggagcccattgcatcctctagaagctgactgctttatgaaacagctattaaatggtgttcagtatatgcatgatcatggaatcgcacattgtgatttaaagccagagaatattctgttccaaccaaatgggttgttgaagatttgtgattttggtacaagttcggttttccaaacagcatgggaaaaacatgttcattttcaaagtggggctatgggctcagagccatacgttgcgcctgaagagttcataagggatatggaatacgatccacgattagtggactgttggagttgtggcattgtctactgtacaatgattatggggcagtatctttggaaaattgccattcctgaaaaggactccctgttcaaatctttcctcagcgaaatcaaaaatgatggacagttttatctctttgaggaattaagacatgtcagtagtgaactaaacagattgagaaagatcgcattgtatagaacattccaggtcgacccgaccaaaagaatctccattgaacaactgttgcaaagctcttggatgagaaggacgaagtgctgtgtagtttatagacccttacacaacaaggtgagtaaataa

SEQ ID NO: 1331 - DNA, 1194 bp, Saccharomyces pastorianus
atgtcgactgaaaaacagagcgatggtggtcaaggggctccacatgatagacaaggtacggaagcacactcggatgaaggatctgagaagaaggtgaccgctgtaggaaacgaaaatgaagaaaagacaccggagaagggtggtgaggaaattcaagagaagccaaaaaatccccatattacttattacaatgaagagcagtacaaacagtttatcggccaggcaagagttacgggaggtaagtacagcttacaagatttccagatattaaggacattagggacgggttcctttggcagggtacatttgattagatcaaggcacaatgggagatattacgcgatgaaagtgcttaaaaaggaaattgtggtgaggttgaaacaggtggaacatacgaacgatgagcgattgatgctttccatcgtcacacatccatttattataaggatgtggggcaccttccaggacgctcaacaaatctttatgatcatggattatattgaaggtggcgagttgttttccttattaagaaaatcccaacgatttcctaacccggtcgccaagttctatgctgccgaagtttgtttagctttggagtacttgcatagtaaagacatcatttatagagatttgaagcctgaaaatatactgctcgataaaaacgggcacgtgaagataacagacttcggatttgctaagtacgttccagatgtcacgtacacgttgtgtggtactccggattacatagcgcctgaagtagtcagtaccaaaccatataataagtccatcgattggtggagttttggcattctaatttacgaaatgctggcgggatacactccattttacgattctaatacaatgaaaacttatgagaagattttaaatgccgagttaagattcccgccatttttcaacgacgatgtcaaagatttattgagtagattgattactagagacttaagtcaaaggttgggtaatttacagaatggcacagaagatgtcaaaaaccatccttggttcaaagaagttgtctgggaaaaactactgtctaggaatatagaaacaccgtatgaaccccccattcagcaggggcaaggtgacacttctcagtttgacaagtaccccgaggaagacatcaactatggcgttcaaggagaagacccatacgctgatcttttcaacgacttttaa

SEQ ID NO: 1332 - DNA, 540 bp, Saccharomyces pastorianus
atgctatttacaagaatattatgtcaaggcgtgaaattcactaagggaacagctacacagcccaaactcagtccaaaatcactaccgaaaggcaatttgtataccaatcttttagtaacaacactatatgggacaggcctggcatctttatatttggaatcaactagcttgaaaaagtctaagacgaagcgaggtcctcctgctattacagaagatgacgttgtcgatatagtccacgattcaccaaataggatattcaagccaaaactcaacacgcaagaagagaaaagacaagatttgcaactaagtgactttcgtaaagtggttcattcgttaacatatggtgatgtctcacaatttgcaattgcttggggttttcttatgcaattatcaagccttatcggcagttcttctttggggaggaaatctctattttataagggaagtgtagttggtgtcgtcgggttcccatccctgatatatatggcccttagactcagaatgaagcaattggaaaaagccggagtccactttgaatga

SEQ ID NO: 1333 - DNA, 693 bp, Saccharomyces pastorianus
atgcaattcaagaacgtcgccctagctgcctccgtcgctgccctatctgccaccgcctccgctgaaggttacgctccaggtgaaccatggtccactttgactccaaccgccaccatgtcctgcggtgccacccaatacacctctactttcggtattgccgttcaagctgtttcttccgccaaggccaagagagacgttatctcccaaatcggtgacggtcaagttcaagccactactgctgcttcctctgttgctgccgctcaagccactgacggtcaaattcaagcatcaaccaccgctgccacaaccagttccgtgaagtcctcttcctctgctgcctctaaatcctcttcctccgcttcttgcgctgccactccatctttgaaggacagctcttgtaagaactcaggtactttagaattggtcttgaaggacggtgtcttgactgacggtaagggcagaatcggttccattgtttccaacagacaattccaattcgatggtccaccaccacaagccggtgccatctacgctgccggttggtccatcaccgaagatggttacttagccttaggtgacaaggacgtcttctaccaatgtttgtccggtaacttctacaacttgtacgacgaaaacgtcgccgaacaatgtagcgccattcatttggaagctgtttctttggtcgattgttaa

SEQ ID NO: 1334 - DNA, 1359 bp, Saccharomyces pastorianus
atgggttacagtactctttctaatgataacgatatcaaagtatgcgtgataatggttggtttacccgcgagggggaagtctttcatctcccaaaaaatcattagatacttgtcttggttatccataaaggccaagtgttttaatgtgggtaactatagaagagacgtaagtgggaatgttcctatagatgctgagttttttaattttgataatgccaatggttttaaactcagagaattggccgcccaaaatgctatgaaagatattttggattggtttgaaaaagaaaacggttctgtagcggtattcgatgctaccaatagtacacgcgaaagaagaaattggcttaaagacgtgtgtgaaaaaaatgcgatccaaccaatgtttttggagagctggtgcaatgattatgaatctattgtaagtaatgccaaggatatcggcagcacttcaccagactatgaggattttgaaccttgcgtagcggaagctgatttcttaaaccggattgcacaatacgaaagattttatgagccattagacgcgcagacagacagagacatgacgtttgtcaaactggtcaatattgtcgaggaagtaataataaataagatcagaacttatttggaaagtaggattgtattctatgttatgaatattcgtcctaaaccaaaatgtatctggttatccagacatggtgaatccatttataacgtagagaaaaagattggtggggactcatcattatctgaaaggggctttcaatatgccaaaaagttaaggcatttggtgaaggagagtgcaggcgatgtgaagttgacagcatggacgtctactctgaagagaacacagcaaacggccaagtacctcccttacaagaaattgcaatggaaagctttggacgaactagatgctggtgtctgtgatggtatgacttacgaagagattgagaaaaaatatcctgaagacttcaaagctcgtgacaatgacaagtacgagtatacgtaccgaggcggagaatcatacagagatgttgtgattcgtttagagcccgtcattatggaacttgaacgtcaagagaatgtgctaattataacccatcaagctgtgcttcggtgcatatatgcatactttatgaacgtcccacaagaggaatctccttggatgtcaatcccactacatactttgatcaaattggagcctagggcttatggtacgaaggtcaccaaaatcaatgcaaacattcctgcagtaagtacgtataaagagaagggtacaagtcaagtgggtgaactttctcaaagctcaactaaacttcaccagctgcttaacgattctccgctcgaagacaaattttaa

SEQ ID NO: 1335 - DNA, 2838 bp, Saccharomyces pastorianus
atggcatatgcagacacaccagaaaacgcgatctctgttatcaagcagcgaacggcactgatgaatcggtgtctttctcaacacaaacttatggaatcactgcagcacacttcaataatgctgacagaattgagaaacccgaatttgtcgcccaaaaaatactacgaattgtacgttgtagttttcgactcattaaccaatctgtccacctatctcatagaaaaccatccccaaaatcaccatttagctgatctttatgaactggtccagtataccggtaacgtggtgcccaggctttacttgatgatcaccgtcgggacaagctacctggcattcaacgatgcccccaagatggagattttaaaggatatgatcgagatgtgtcgtggtgtacaaaacccaactagaggccttttcttgcgctattatttgtctcaaagaaccaaagagctactacctgaggacgactccttgttcaactcccagttcatcatgaacaatttcattgagatgaacaaactgtgggtaagactacagcaccagggcccattgcgcgagagagaatcaagaactcgcgagaggaaagaactgcagattttggtcgggtcccaactggttcgcctgtcccaaatcattgatgacaatttccaaatgtacaggcaggacatcctgcccaccatcttggaacaagtcattcaatgtagggatttggtatcccaggagtatctcttggacgtcatctgccaggtgttcacggacgagttccatttgaaaactttggacactttgctgcagaccactttacatttgaacccagatgtttcgataaacaaaatcgtgctcactttagtcgataggttgaacgattacatcacaagacaacaggaggaagagccaaacgccaccgccgcaaatgcgtacctggatatggacgtgttcggtaccttctgggattacttgaccttgttgaatcatgaaagacccgatctttcgttacagcagtttattcccctaatcgaaagtataatcgttttaagcttaaaatggtatcctgaaaattttgaaaatttaaacaaactattcgaactggttttgcaaaagactaaagattatggccaaaagaatatctcgctggaatcagagcatttattcttgaatctattatcttttcaaaataacaaactccagatgtcctcctcgtccacagcgtcttctaaccaatccatcatttctaagaaacattttatttttcaattgatttctaaatgtcaggcatataagagtattctggccttgcaaaacatcactttacaaaagaaagtcgtcaataagattctagacatattgatggatgcagacactgaagaattaacggataacgaacctgaatcaaagttgcatgcctcttcacgggacaaatttcatctagtcattgaagataaattacaagtgcaacgcttactgtcgatctgcgaacctttaataatctcaagaagcggacctcccacaaacgctacttcctctgaaacaaacatcgatgaagtatttttcaatagacacgacgaagaagaatcgtggaccttggatccaatacaagaaaaattggcacacttgatccattggataatgaacaccacttcacggaaacaaacagaggaaagcagaattcaattcagcttagaatcacaattggaaatattactacttatcaagtcctcatttattaagggcggcatcaatgttaaatacaccttcccggcaataattacgaacttttggaaattgattagaaaatgccacatgatacttcagtatctcctgaagaaaagggccgacaacaagacattgtcatctcattattccaatcttttgaaacagatgttcaaatttgtttcacggtgtatcaatgacattttcaattcatgcaacaactcgtgcacagatctgattctgaaattaaatttgcaatgtgctacattggctgaccaattgcaactaggcgaaatttcatacgactttttctcgcaagcctttacaatatttgaagaatctttaagtgattcaaagacccagttacaagctttgatctatatcgctcaatctttacagaagacaagatctctttacaaggagacctattacgattcactgattgtcagatgtacattacacgggtccaaattattgaagaagcaagatcaatgtcgcgctgtttatttatgttcacacctttggtgggcaacggaaatttcaaatattggcgaagaagaaggtatcactgacaattttttcagggacggtaaaagagtattggaatgtttacaaagatctcttcgcgtggcggattccataatggataatgaacaaagctgtgaattaatgatcgaaatcctaaacaggtgtctttattatttcattcatggcgacgaggctgaaactcatatatctatgaaatacatcaatggcttgatcgagctgattaaaacaaacttaaaatcgctcaaacttgaagacaacagtacttctatgatgacaaactcaatgaacgacctgcacatcaccggagatagtaatatcaagtccaacgtcaatccggaagacggatctggaatcgccgataaggacactaacgttgccgttgggtcagatggcacatatatccaactgaacacattgaacggatcttctacaataatacacggaatagtagcaaccgcttcaggtagcaagttgttgcaccaactaaagtatattccgattcaccatttccaacgtacttgcgaatatatcgagggccaaagggaagttgatgatcgattcaaagtcatatatgtatag

SEQ ID NO: 1336 - DNA, 2022 bp, Saccharomyces pastorianus
atgccgtttcaagactattttcagaagaaaaaggctgctttcaccaacagaaacaataaaaatagcgcagaggcatcgacactgcgaagcattgctggcagtgtggaggccgccgcggccgcagctgctgcagcagcagcagccaaagataagaactacatattcccactaaccaaactccccgatgagctcatgcacgaggtgttctcgcatttgccgcaaccagaccgtttgcagctctgcctcataaacaaaaggtttaacaagattgctaccaaactgctctatagaagaatctacttgaacgactccaacgtggtgaagagtgacttcatgcacctggccatcaactggaccctgttgaacttgccgtcctcgttgaaggaggaagagtcccgtaacatcgctaactacaaactggagaagcttataaaaaccctgcaaaataatattcgcatcacacagaccgtccagtggataagaatcaactgggatttggactccgtgctccaaagatccattctgaacatcctttgcaacgagggcaagtctttgcaaagactggaaaatgtcaccgacccgagttgtaacgacatcatctccaatggccacttctccaagtttaacgtctcgagtttcgacatggctccgccaaattcattgccggaaatgtccgtccccgacaattacatcccgaacctcaccaaatatctgtcccaacgaatctcatcccgcctgtctcacatgactcttttcatcgaccccttgaaactgttcaactacctttacccactagacatcaagttgcaaatcgtcgacttgaagttgcactggaggagggagttttacaacaatgactacttcgttagcaaggtacgacccggtaatcccttgactaaactatctgaagtgtttgacaagagaactttgaagatcctcaccatcatctcatggaatgacactctgttgaagcgggagaccgaaatgctcaaggatttcaaagaattcgaacagttggaagatttgtctttgatttccatcaagcaggacgttcacattctcgtagatcttttcagctcgttgaccaatttgaaaagacttaaaatggatttcttagtggattttatagccgagcctacgagtcctcacatcttcttgtctatccttctggcttgctccaaattgcaattcatagatttgcggtacgacggccttattcctcaaatcgtcaatatccaagaaaataagttccaattgaaccagcaatgcaattgcacaaactgtcaaatagtattcagtgacattctcaagggcaaagttttcatgttcccggaggactactatattcatgatatccacgatattgcagcaaaggatattttcaaaatgatgaaatatttgtctttattaccgtactcaaaggcttgtgatgcttacccgagcgtgagaacccaaccaatgaacttggccaattttgtcaacaagatgaacttgaaccttttgaaatacagaaactccaaatcgcagctagtacctaagattgttaataatccataccaccactctacggtgacttccgcaaccactgcccgcatgagcgagcctgaaatggtagtcatcgatgacgattatgatgaagatgacattaatatggatctgcctcaggatagtgatgacactgctaccaccatttccgatgacttagaactcccacacgattccttgaccaaaagagatatcattatgtgctaccacgccctaattcatcatttcaaatcgatatatatcacttttttgaagagctttcctcaattaagattcctcatgttgaatgatatcccgacaatagtcatggaggaggataacgaacgtatttttgagcccgtcttttatcactatgattataagagtaatttacatggatggtctagggaatccaacaagaatttggaaaacgatggcaacaacaataataataataataattccgataccattgcaagaatagccactgtcatgtaa

SEQ ID NO: 1337 - DNA, 693 bp, Saccharomyces pastorianus
atgtcaaagctttcgaaagactacgtatcggactcagattcagaagacgaagtgatatcaaacgagttcagcataccaaatgggttcaagaaatgtaaacatttgaaaagctttcccctcgacagcggtaacaacaagaagcctaaacagcaacagatctggctgatcaagtttccgtcaaatgtagacatctccaaattaaaatctttaccaatagattttgaatcctccacaactatgaccgttgacaaccacgaatataaaatcacggaaaatgcgaacattgagactttattgacacagggcaaccaaagtagtatgagcttgttggttccttcagaggataaggaaaccctaaagattgccgccacaggcaaggatagcacaccattacaattcgacaaattattctctatcagcgaaaattccaaggtcccagctattgattataagaaagtgagagttcctcgtaaagacgttccaaaagtggaaggcttgaagctggaacacttcgccacaggttatgatgccaaagatttcggcgtcactgagaatgtagtaacgaaagaatataagaaggaatcaaagaaacgttcacatcaacacgatgaagagggagattctaaagataagaagaagaagaagaaggagaagaaggagaagaaggataaaaaaaagaagcatagagattaa

SEQ ID NO: 1338 - DNA, 1149 bp, Saccharomyces pastorianus
atgagaaggactttttctctgttagcaacacggcttttaaagtctaaagatgatgagctaaaatcgactctaaagtttctaaccaaaggatctatgaagtcgttaggatctctgtttaattctcctgactctaaagaacaaaggcacatgttgaaaaatacaggtgataatcaaaagagccctgaaaatcatcacgtcgataacattttaaggatattgaattcaaacttgcctgaagtggaatccaagaaacaaaaggtggccattcattatgacgtacttttctcgcatttaagatcaatagtcacacagtcagtggaaagcaaggacattgcatcgaagcaattgcgaatggcatcatccgaggatttatatgataaattgttgttactacagtatatgggtaaattaactaatgtacgccaaatatcggaaatcctactatctaaaaactttcgtaagtttggcgaagtttgggagcacagggcgttgttcgataatggtcagaaactagtcatatccatcttactatactacaggtcacgtattgcgcaaataagaaaagaatacgaggctcgctggttgtcagactacaacgatttacagtttcccttgcgacgccttttatggagatgcttaacttttaatgtagttgatgagaatattcaacaaacagtatcacattataaaaagcgtttaggggaaaattggaaaaatacggatttagtcttgatttatcaatctctgtatgaaaaatcctacttgttacctgaactaacatccatagaagacagtaataatgaaacgatcaccttcaccaaaaatcaaagattacttgtttgtgcactgaggacgatttcgaaacattttgagggggatgcaaaaacggtcaaaagatggctaaccgatatagtcaagttgagtatacagagcaaaataatgctggaatcatcagcaccatcttctacatcaataatggatcaataccgttttatcagatccttagacattttcatacaaagcatacaccggacttgccaaaataagtctacctttgaagatttaaaaaacgatctcgagaatatatcaaagctagtcaacgacgaagaacacgaattaaagacacatttaccactaaaccttgtataa

SEQ ID NO: 1339 - DNA, 1422 bp, Saccharomyces pastorianus
atggataatcagcaggagcgtatatcagaagatatcaccggcgaccttgctgctgctgttaggaaatcatggtctgaaccgcaagacaatccgctgttgctcaatgttaataactctcctataggaactcccacggatagatactcccctgaaccagtcatgatggtggaaggaaatgctttgaacccgctatctctagcaagaggatctgcacagcaccagcaaaggctgtatggctcctctcaatctcgcgaaaaatcagagcagcaacaacaggactaccaattgtttaagcatcattactctctcggacaggagacaagggagtctgtttccgacattcttaacgatttgactctgggatctccagaaccaagtgaaagtagaacaccaataagacaaccatcagtggatgttcctcctgtaaccacaaggcgtagttccattcaggatgttcaatggatcagacacttactaaacccaaggagttcattttctggtgtatcctccaatgagcctgccagttctcccgacaattcttccaatgaaagcaaagcttgggtgacgatattacatgattcatctgcagaatcattacaggccgttattgtgttggcgcagtcattgaaaaaagtcaattcccaatacggtctttgtgtattgcattctagtgaagtcaatgcctctcaattgaatcaagtggggatcaagacgttaataatagatgaatacatcaacgtttttttgaatttcggatcgtgttcaggatttagtgggagcttacaagagaccgaaaccaaaaatgatttaaattttaagtggtgtaaactatttcttttcttttcgttgattgataggttcgagttgatctgctatttatcccccacatgcgttgtattgcaaaacattgacgaactgctggaaagccctgaggtgtctgatgagattgataatgaaacctgtgttttattatcgaataaggaaaactatatttgcggagatcttacaaccgtaaagcaagacccaattcttaacgaagaagataacgaagaagataacgaagaccctcagattatcatattgaaacctaatagtgcagtcgcaatgtgtatcaaggagtacttcacgatttatggaaatgagtttgaaggtgaaagtaaaaggtcgatgtttcatcaaatgaacgatttacaaattatgaaggcattgtttggtgacaaatggggctacctggataatgatggttactgtgctgtgcccgtgaccactattcccacggacaggttaaattacaagataatcgaattcaaaatcttaaagccgtgggaaagacagaattatgttagtgctggcctgcaaccaaattctataatgaacgaatggctaaatctatggcgggactttctaaaccaagtgaattga

SEQ ID NO: 1340 - DNA, 330 bp, Saccharomyces pastorianus
atgttaagaaaaagcacttcaacgatatacacgacacacaagaaaagcaacagcagcatactcaggagccggaaggaccagaccaaggtggacccgttagtagaagaatatcccatgggtgaattcgggaccactaatcaacccgcccagcctagtgtgatatactactttgtggagttgaccaatgcaggcatacaagaaaatacaagcagcaacaacaacaacaacaacaataacaataacaataaccatgacggtggtgagagcggtgcccgttacggccacggcagcagtctgggcgggaacgtccacttgcgccgttattcgtaa

SEQ ID NO: 1341 - DNA, 477 bp, Saccharomyces pastorianus
atgtcagccgatcattccagagatccatgtcccatagtcatacttaatgatttcggtggtgcctttgccatgggtgccattggtggtgtcgtgtggcatgggattaaaggttttagaaactcgccattaggtgaacgtggttcaggggctgtgagtgcggtgaaggcgcgtgctcctgtgcttggtggtaattttggtgtgtggggtggtttgttttctacttttgattgcgctgtgaaagccgtcaggaaaagagaagatccatggaacgctatcattgccgggttttttactggtggtgccttggctgtaagaggtggttggagacatacaagaaacagttctatcacgtgtgcttgtttgctgggtgtcattgaaggtgtggggctcatgttccagagatacgctgcttggcaagccaagcctatggctcctcctttgcctgaggctcctccttctcaacctttacaagcttag

SEQ ID NO: 1342 - DNA, 2430 bp, Saccharomyces pastorianus
atgaaaacatcaaacaataacaactccagcagcagcaacagcaataagaatacgtctctgagcccgactttactcacacacagtgacaccagtatgacctcgagtagagagagccaggacactagtcatttggggggcggtatatggaatccgtcatacatgggccaaacatctcaaaggcccacactgcagcagcagcagcagcaacaacaacagcaacaacagcaacaacagcaacaacagcaacaacagcaacaaaaccctcaattctcatttgtgaacccttggggcgaggaaaaaatcactaattctcagcagaatctagtctatcccccaaaatacgatgatccaaacactaatgagagcttggatgcctacagacgacgcaaatcgagtctggttgttcctccatccagggctcctgcgccaaacccatttgaatacgacagctatcctgcttttacgaactctaacacgagtctgtcagccaacgccaacggccagttctcttctgcttaccagcaacagcaacagcaacaagcatatcagcaaagcgctatcaatccttcacagtttggctctagatttgtaccctccctttatgatcgccaagagtttcaaagaaggcagagtttggctacggcgaattactcgtctaattttccctctataaattcgaacgctaaccaaggaacaagctccataccggcgatgtcaccttataggagactgagtgcataccccccaagcacaagccctcccctgcagccgcctttcaagcagttacggagagatgaagtgcaagggcagaaattatctattccacaaatgcaaccatgcaattctaaaaacgaccttcaaccagttataaacgcaactccaaaattcaggcgtgcgtccctcaattccaagacaatatcccctttagtgagtgtaacgaaaagtttgattaccacgtattccttatgctctccagactttacctaccaaacatccaagaatcccaagagagtgcttacaaaacctagcgaaggcaaatgtaataatgggtttgacaatgttaatagcgattatatcctttatgttaacgatgttttgggtgtagaacaaaacaggaagtaccttgtgctcgatattttgggacaaggtacgtttggtcaggtggtcaaatgtcaaaatctgttgaccaaggaaatcttggctgtgaaagtggtcaagtcgagaacagaatacctgacgcaaagcatcactgaggccaaaattttggagctgttgaataaaaaaatagaccccgctaacgaacaccatttcctaagaatgcatgactcctttgttcataaaaatcatttgtgtttggtcttcgaactattaagtaacaacctgtacgaattgttgaaacaaaacaagtttcacgggttgtctatgcagttgatcagaacattcaccgcccaaattctagattcgttgtgtgttttgaaggaaagtaaactaatccattgcgatttaaaaccggaaaatattttgctcttcgccccagataagccagaattgaaaatcattgattttggttcatcttgtgaagagacaagaactatttacacctatatacagtccaggttttatcgtgctcccgagattatactgggcatcccatattcgactagtatcgatatgtggtctttgggttgtattgtggctgaattatttttgggtataccaattttcccaggtgcatcagagtataaccagttaaccagaataatagacacgcttggataccctccatcgtggatgatagatatgggcaaaaattctgggaagttcttgtcaaaattagcaccagaagatagcggcaactcctcccaaaagcatcgtatgaaaactatagaagagttctgcagggaatataatatagtggaaaagccaagtaagcagtactttaaatggaaaaaactgccggatattatcagaaactatagatatcctaaaagtattcaaaataatcaagaactaatcgacgaggaaatgcggaatagagaatgtctgattcatttcttagccggtgtgcttaatttgaatccgttggaaagatggacaccacaacaagctatgctacatccatttatcacaaaacaagtattcacaggtgaatggtttcctccaggatcttctttacctggcccatcgagaaaacacgataatacaaaaggacagccaaatgacaacagaaacactaaaaactccgacaacgatgctaatcataactacgtttacaattttaatgctggcgacggcagtgctgatagcgttgatatcggctctattggtaaaagaaatgttaatttgtctaacaacttctctatagaaagtcattccgttcaagaaggcccctcaagtgaattcaataaacttcatattgtggaagagtaa

SEQ ID NO: 1343 - DNA, 660 bp, Saccharomyces pastorianus
atgaatgtttccacatcgacgttccaaacaagacggagaagattgaagaaagtggaagaagaagaaaatgctgccactttgcaactgggccaggagttccaattgagacagataaatcaccagggtgaagaggaagagctgattgccttgaatttaagcgaggccaggctagtgatcaaagaagctctaatagaacgtaggagagcgtttaaaagatcacaaaaaaaacacaagaggaagcatatgaagcacgaaagcgccaatgacgaaacgactgctgtggaggaagacgacgaggatttagacgaagacgatgctgacgaagatgacttcatgcattctgaaactagagaaaaggaattggagtccatcgatgttctactagaacagactacgggtgggaataataaggatttaaaaaacactatgcagtacttgacgagtttctcccggttcagagaccaggaaaccgtgggtgctgttatacagctgctgaaaagcaccggcttacacccgtttgaggtggcgcaactgggctctttggcctgtgacacagcagacgaggcaaaaacattaattccgagtttaaataacaagatatccgacgacgagttggagagaatgctaaaggagctatcaaacttagaaactctctattga

SEQ ID NO: 1344 - DNA, 1191 bp, Saccharomyces pastorianus
atgtctgaaggtattactgaaattgaagactcccaaatcagtctaaccaactatgacaaagttgtctacaagttcgacgatatggaattggacgaaaacttgttgagaggtgttttcggttacggtttcgaagaaccatctgccattcaacaacgtgctattatgcctattattgaaggtcacgatgtcttggctcaagctcaatctggtactggtaagaccggtactttctctgttgccgctttgcaaagaatcgacacctctgtcaaggctcctcaagctttgatgttggctccaaccagagaattggctttacaaatccaaaaggttgtcatggctttggctttccacatggacatcaaggtccacgcttgtatcggtggtacttcttttgttgaagatgctgaaggtttgaaagatgctcaaatcgttgttggtaccccaggtcgtgttttcgacaacatgcaaagacgtagattcagaactgacaagatcaagatgttcatcttagatgaagccgatgaaatgttgtcttctggtttcaaggaacaaatctaccaaattttcacattgctaccaccaactactcaagttgttcttttgtccgctaccatgccaaatgatgtcttggaagttaccaccaagttcatgagaaacccagttagaattttggttaagaaggatgaattgactttggaaggtatcaagcaattctacgttaacgttgaagaagaagacttcaagtatgaatgtttgaccgatttgtacgattctatctccgttactcaagccgttatcttctgtaacaccagaagaaaggtcgaagaattgaccaccaagttgagagacgacaaattcactgtttccgccatctactctgatctaccacaacaagaaagagacaccattatgaaggaattcagaagtggttcttccagaatcttgatctccactgatttattggccagaggtatcgatgtccaacaagtttctttggttatcaactacgatttgccatccaacaaggaaaactatattcacagaatcggtagaggtggtcgtttcggtagaaagggtgttgccatcaactttgttactaatgaagatgttggtgctatgagagaaatcgaaaagttctactccactcaaatcgaagaattgccatccgacattgctactttgttgaactga

SEQ ID NO: 1345 - DNA, 1233 bp, Saccharomyces pastorianus
atggtagacggattgaactcttcgagcatcaggaagagagccaggacgctttccaaccccaatgacttccaggagcctaattacttgttggaccccggtaatcatccttccgaacattttcgaactcgaatgtcgaaattccggttcaatgtgagggagaaactgctggtgttcaccaacaaccaatcattgacactaagccgctggcagaagaactatcgttgcgcgtttaacgatttatacttcacttacacatctttaatgggatcgcatacgttctatgtcctgtgtttacctattcccatatggtttgggtattttgagactaccaaagacatggtctatatcttgggatactccatctatttgagtggttttttcaaagactactggtgtttgccccggcctagggccccaccgttgcatcggatcacattaagcgagtacacaaccaaggagtacggtgcgccaagttcgcacacggcgaacgctacgggagtgagccttttatttttgtacaacatatggggggcagaagcgtgccctgtcacggtacggttgctgttgacgtgtttggtcgtgttttattacatgactttagtctttgggagaatatactgtggcatgcatggactactggacttggaaagcggtggaatcattggtatagcgtgtttcttaatcagaatatacttcaagtgcggcttcccgaacctacatatcgaaaagtactggtggttccccctgctcagtgttggatggggccttattcttctatttaagcacgtcaaacccatagacgagtgcccttgtttccaagacagcgttgcgttcatgggtgttgtgtcgggcattgaatgctgtgagtggatgggcaagaggttcgggttcacatcagtgtacaacttggaacccaactgtgggtggcaacaaacccttgccaggttactggtgggcttagcgtttgttattatttggaaggaggtgatcagcaagccgttggtgtactctctgctaattaagggcatgcgcctgaaagatgacagagacatggcggcaagaagaagattagaagccacgcggaaagaggggggcagcagcaagctcgaatgtccactgtatatcggagaaccccgaatcgacatagtgggacggttcgttatttatgcgggaatccccttcaccgtcgtggtgtgcagtcccgccgccttttcccttctacatatagcatga

SEQ ID NO: 1346 - DNA, 225 bp, Saccharomyces pastorianus
atgatcgctcaaagtacaagattagccgccgccgcctccgcctccgttgcctccgcaagcgtctcgagaatagccgccggagccattgccagcgccgttttcaagagatctccgggcaactcgttcacgtcgttcaaagagtacagagagaatgccaagacgtacgggcccttaagcgcctcgttggccaccagaagacacttggctcatgctcccaagttgtag

SEQ ID NO: 1347 - DNA, 945 bp, Saccharomyces pastorianus
atggtagaggactcgtcaaatagcaatgtagtaaggccaattccggccatacccatggactcgcccgactacgaagcgttgccctctcatgctccgctgtaccatcagctaatagcgggtgcgtttgctggtataatggaacattcagtgatgttcccaatagacgccctgaaaacgcgaatacaatcaacaaacgggaagtcgctgtccaccaagaatatgctttcgcagatatctcatatatccacttcagaggggaccctggccctgtggaagggtgtccagtccgttatattgggtgctgggcctgcccatgctgtatacttcgggacgtacgagttctgcaagaagaacctgattgacccaagcgatacgcaaacacaccaccctttcaagacggccatcagtggtgcctgtgccacaacggcctcagacgcactaatgaacccattcgatacgataaaacaaagaatccaactaaacacctccgcatcagtatggcagaccacaaagcagatataccaatctgaaggcttggcagcattttactattcttacccaaccactttagtaatgaacatcccattcgcagcatttaatttcgtcatttatgaatcatcaaccaaattcttcaacccatcaaacgagtacaatcccctcatacattgtctgtgtggcagtatcagcggatcgacatgtgcggcgatcacaacacctttagactgcataaagacagtactgcagataaggggcagtcaaacagtttcgttggaaattatgagaaaggcggatacttttagtaaagcagccagtgccatatatcaagtttatggctggaaagggttttggagaggttggaaaccaaggatagtggcaaacatgccggctactgctatatcatggacagcttatgaatgtgcaaaacatttcctaatgacgtattag

SEQ ID NO: 1348 - DNA, 2022 bp, Saccharomyces pastorianus
atggaagacaaatttacgaacctcagcctccacgagaaaaccggtaagccatctgcccagccccacgaaccaacaggctcggaaaatagctctactgtcaagagaacagcgtctacgtcgtcacactacaacaacatcaatgcggatcttcatgcccgtgtgaaggctttccaagagcaacgtgcgcttaaaaggtcagccagtgtgggaagcaacaagagcgaccaggacaagggcaattcgcaatcacccaaacatatccaacagatcgtcaacaaaccattaccgcctctccctgtagttggtagttcgaaggtttcacaaagaatgactggtcaagttgttcagacttcctccaagaacactctcaagaacgatcggagtgaccaaggtactcaggacaagataatcatggaggaagctacgagtgccagtattagcgttgatacgactaaaatcatcactacagcggttggtgtggccactgatctatctgcaaacggcgttacgccggcagcttctaataccgcatctgcagcacaaaaggctcaattgctgaatcccagcagaagagcgccaaggcgaccattatcccttcagcacccaacgaggcccagcgtcgctccacataaagcccctgccattataaacacgccaaagcaaagtttgagtgcccgtcgagggttgaaattacctcccggtgggatgtccttaaaaatgcctagcaaaagtcctcaacagccgcaacaatttgcaccaagcccttcaaacaagatgcacatagaaactgtatctagcaaagctgtggaggggaaaaagtcgaaccctggttctttggtaaacggtgtgcaaagcacttccacttcatctagcaccgaaggccaacacgatactttaggaactacaccccgaactgcaaacagtatcaattcttcaaattcaggtagtagtggtggcggtggactctttgcaaatttttcgaagtatgtcgatatcaaatctggctcgttaaattttgcaggtaaactatcgctatcttctaaaggtattgatttcagcaatggttccagttcaaggattacattggatgaactagagttcttggacgaactgggccatggtaactacggtaatgtctccaaagtattgcataaacccacaaatgtcattatggccacaaaggaagtccgtttggaactggatgaagccaaattcaggcaaattcttatggaattagaagtcttacataaatgtaattctccatacattgtggacttttatggtgccttctttattgagggggcagtatatatgtgtatggaatacatggatggtggctcgctggataagatatacgatgaatcatctgaaattggcggcatcgatgaaccacaactagcatttattgccaacgctgtcatccatggattaagagaactgaaagaccagcataacatcatacacagagatgtcaaaccaacaaacatattgtgctctgccaaccaaggtacagtgaaattgtgtgatttcggtgtttcaggtaatttggtggcatctttagccaagacgaatattggttgtcagtcgtacatggcacctgagcgtatcaagtccttgaatccagatagagctacttatacagtacagtcagatatttggtctctgggtttgagtatcctggaaatggcattgggtaaatatccatatccaccagaaactttcgacaacatcttttctcaattgagcgccattgttgacggaccaccacccaggttgccatcagaaagattcagtcccgacgcacaagattttgtttccttatgtctacaaaaaatcccggaaagaagacccacttacacagccttaacggaacatccctggctggtaaaatacagaaatcaagatgtccaaatgagcaaatatatcacagaccgattagaaagacgcaccaaaatcctacgggaacgtggtgaaaacggtctatctaaaaatgtacctgcattgcatatgggtggtctataa

SEQ ID NO: 1349 - DNA, 159 bp, Saccharomyces pastorianus
atgatatttttcttcaaccaggtccgctcgatctttacagctttgcacacacccactcaacaaatcaagttgtcaagaagggcctttttccaattcttgggctacttgggcagttgcgttgtgatttcattagcagctcaatcgaagtacgttgagtga

SEQ ID NO: 1350 - DNA, 924 bp, Saccharomyces pastorianus
atgagccacaaattcagaagggttgctgttgcccaactatgttcatctgctgacttagccaataatttaaaagtaataaaaaaactaatatctagagctattcaagatgaggcagatgttgtgttttttccagaggcgagcgactatctttctcaaaaccctcttcactccagatatttggcgcaaaagagtccgcaattcatccagcaattacaatcgggaatcactgacctcgttaagcaaaattcaagaaatattgatgtttctattggagtccacttgccgccaacacagcaggatctgttgaatggtaatgatcgggtcaagaatgttctcctctatatcaattacgaagggaaaatacttcaaaagtatcaaaaattacatttatttgacgcagacataccaaatggtccaatcctgaaggaatcaaaatcggtccaaccgggggaagctattcccgacataatagagacaccattgggtaaattgggtagcgcaatatgctacgatattcgcttcccggagttccctttaaaactccggtctatgggagctgaaatcttatgtttccccagtgcatttactaccaaaacaggggaggctcactgggagctactgggtagagcaagagcggttgatacccaatgctatgtggtcatgccaggacaagaaggtgtccacgacctttgcgatccagcatgggagaaacagcagcatataattgcttcggcgaagagccctaagagagaatcttggggccattcaatagtggttgatccttggggaaaagtaatagctcgtgcagacccaaattgtgtcggtccgcagctttttgttacagatttggactttgagttgttgcaagacataagaaacagaatgcctttgtggaaccaaagaagagacgatttgttttattga

SEQ ID NO: 1351 - DNA, 519 bp, Saccharomyces pastorianus
atgccagcaaataacagggagagaacccaatccggtcaagacaataaacgacaacagcaacacttctccaagaagatttcggaaggtgaagcagatttatatctcgatcagtacaattttactaccactgccgctattgtaagttcagtggaccgcaagatctttgtccttttacgtgatgggagaatgctgttcggagtattgagaacatttgaccagtacgcaaacttgatactgcaagattgtgtggaaagaatatacttcagtgaagaaaacaaatacgccgaagaaaaccgcggtatattcatgattcgtggtgaaaatgtcgtcatgctgggcgaagtagatatcgataaagaagatcaaccccttgacgccatggagcgcataccattcaaggaagcctggcagattaaacagcaaaatgacgaaaaaagattcaaagaagaaactcatagaggtaaagaaatggcccgtcatggtatcgtttacgatttccataagtcagatatgtactag

SEQ ID NO: 1352 - DNA, 531 bp, Saccharomyces pastorianus
atgccttccaagaactcaatcaatagacctaagctaacttcaaacctgaaccacagggtgcactctttgggtaagaagagagctcaaagagaaaaagcaggtctgttgcagccagccagatccagcgcaaactctagatccggggaaatcaaatctgtagcactggacctatatttccaaaataagaaggatgcaggcgaaacttccaccgctgtgaccttaccaacaccaccaactcacccagcttccatcactacaaggaccctttccaagaagagggctaagaaaatcgaaagaaacttgaaatacgctgcgcaaagaaaactgttagtcgatgcaagtgctaaagtagaagacgatatggacatcgacttggacagcaccaagaaggtgaaagaaaatgaaaagaagaaaagctctttgactttggttaaggaagctttgtggaatgtgattgacgacacctcgtctcacggcttactcatcgagaacggacaaggtactactttgggtggcccattcttcccatga

SEQ ID NO: 1353 - DNA, 936 bp, Saccharomyces pastorianus
atgtcggcacaacaaagaaataagaattccggcagaaagtccgataaaaacgccccatcggtcccacaagtggatgtgtcactacataaaccactagatatcgatgctccccccactatctacagcgtcaatctgaagccagcgtacggcactgctgcattgaatttgtctgccgatttcatcaagcaagaacaagcattagccaacaagtacttgttttctcaccctctcgttatcttcattctaaccgttggccttgcagtttatctggctccaaaaatcgtcttccctatcagaaacactgaatccatttccggatggttctaccaactggcccgcatcaatgggaaagatgtccttactggtatagtgttcaccgcaatcggtgcatctttcttgttcactcttctctcccgtgtgtctgatgcgtattttaaatccaagatcagccaactggtcgcttccaaaggtgggaaagtcttcggtatcaacctgaacgatttggtgtcaaagaacgaaaccgaagacccagtggtaaacaacacacacattatcgtttacagagaaacgcccattgcattgatctcgttggcccctaacgtggctttgactaccaaggaaaatttagtcatgagcgtcaccactgtaggttgtcgtcgtgtgtacgtcaagagtggtattattgaagacttgattgactgggctttgttgcattctaaaatcgttagaaagaacggtgaatacggggagaccatgaaactactaatcgacgtctactcattcgataacacactaagggaaattttgaagaagaaagggttcacttatattcaaagcatcagagtttctgaaaatagactactaggcggattgtttggtgtcaagaaggagttatggggtttgcaattccattttgaaagtgaagacaaggactaa

SEQ ID NO: 1354 - DNA, 996 bp, Saccharomyces pastorianus
atgaagttttccacagctgcgttattatcttccgtcgcttccgtcgctcttgctgctcccgctcctgctgacggccatcatggagaccaccacaaggacggaaagcctgccgtcgtcaccgtcacccagtatatagagtccaatgccgatgctacggccgctgcgccttctgccgccactaccaccactttgacctcttcggaacacaagcgtggtaacgggttccaggacggtaccgtcaaatgttccgactttccctccgccaacggtgtagtttccttggattggctaggatatggtggatgggcctcagtgatggacatggacgccaattactcgtcggaatgtcaagacgggtactactgttcctacgcttgcgaacccggtatgtcgaagactcaatggccttctaaccagccaagcgacggcaaatccatcggtggtctgttgtgtaaaaacggttatctgtaccgtaccaacacggacaccagcgacttgtgttcgactgaccagacatctgccaaggctgtcaacaagaaatccgactccattgctctttgtagaactgattacccaggctctgaaaacatggtcattcccactctagtggatgggggtgattcccaacccatctccgttatcaatgaggacacttatttccaatggcagggtaaaaagacatccgctcaatactacgttaacaatgcaggtgtttccgtagaggatggttgtatctggggcacttctggttcagacgtcggcaattgggctccaatagtcttgggcgctggttacaccaatggcgaagcgtatctgtcgttgattccaaaccctaacagtaacgaagctgctaacttcaacgtcaaaattgttgcatccaacggtggtgacgttcaaggtaactgtgcttatgaagacggttccttcaccggcgatggttctgatggctgtacagtctccgttctatctggttctgctgaatttgtcttctattaa

SEQ ID NO: 1355 - DNA, 852 bp, Saccharomyces pastorianus
atgtcaattgtatcactattaggtatcaaagttttaaacaatcctgctaaattcacagacccttatgaattcgaaatcacgtttgagtgtttagagtctttaaagaatgatttggaatggaaactgacctacgtcggttcgtcccgttctctggaccatgatcaggaactcgactccatcttggttggcccggtcccgattggtgttaacaaattcatattctctgccgatcctccctccgccgaactgattcctgccagtgagttggttagtgtaaccgttatcctactaagttgttcctatgacgggagggagttcgttagagtgggctactacgtaaataacgagtacgatgaggaagagttaagagagaacccgccagcaaaggttcaggtcgaccatattgtaagaaatatactagctgaaaagccaagagtcacaaggtttaacatcgtttgggataatgaaaatgaaggagacctgtatccgcctgatcaaccgggcgtagatgaggaggacgatgacgacgaggacgatgacgacgatgaggaagaagatgatgacgttgacgaagaagaagagaacgaagacgaagagaacggagacgaagaggctgaggaggaagccgaagaagacggcgacgaagaggaaaagaccgaagataatgaaacgaatcttgaagaggaggaggaagatatagaaaacagcgatggcgacgaagacgaggctgaagaagaagtaggcccctcaaacgggcatgaagacggcagtgacaagaagaggaggaaaacaggggagcagcccacagatatcgagtccacgccaaaggacacagcacccccaaccaattag

SEQ ID NO: 1356 - DNA, 2136 bp, Saccharomyces pastorianus
atgtcagtgaacgaccagataactcatataggaaaaacattgtccacaacggcgtccgcctttctgagctaccaaaaatcaaacagcagcactcaggatgtactaaccaatagtaaaccttaccaaaatttgttatctaacactgttaataatgtcaactcaagcccatacctaaaaaaaagaaatgaacaattgccccttatgagaaatggatctaatactcttgaagatatttattcgaaaacgagaaggggcgatgtatttaagaacaaatttacagacaacaagacatgctttagaatgcacacatacataagcgatgacttgttgaatgaaattccaactagagagggtccaagaggtaattacacgaatagcaacggtaagcttttgaaagaaggagaagagggcgaccattctaggaagaacacatccaagaaggaaccatctttatttcaaggctttaagagctacctaccaatagctgaactagccattgagaacaccgaaaagttgaaagatgatacggatgatgcaggaaacgttttgtctaaaacaacagaactagaacgcatagtcccagacctacctaatttccaagattcgttcctcataccgccgggggtggaaactaaaaaaataagttcttcctattctcctactgcattgaaaagtttttctcaaactctcgtaaatagtctagagtttttaaatattcaaaaaaattctacaatatcagaggtaaaagatatagatgttgaaatcgaggacctaaagcaaagaaaagagaaactactgagtaagattgcaaacatagaacaaaatcaacttctcttggaagacaatctcaaacaaattgacgatagaatggatttcttggaagagtacggattagagatcattgaagctagtagtgatgaaaataacaatatagaggatgagaatacgagtgatgacgcagcagcttccacaaatggcaaatggaatggtactgcaaagagtattacatcagaaactgcctctttacctacgagaagaaggcaacaacaccgagatgataactcatcaaataagctaggcgcattttatagtaagtccaaaaaaagacgtagaagaagctttccaacattccaacaactttatgaaccaggaacaaaaatcggttccatagaatccacacatgatgattttattacttgtttagattttgatgcgccctttggcactttgtgtacagcaggctatctcgatcacacggtcaagatatgggatttatccaagcaaaagaaacttggggaattagctgggcaccttgccacaattaattgcatgcaaattgatcgtgataacggaacacttgtcacaggtggtagagatgcagcattgaaattatggaacttaaatttagctcaacagctttaccaagaaaaccaaaacatcacttctcccacaagccatattgattcaccatgcgtttatactttcgaatctcatattgatgagattactgcattatcattggattccgattttttggtcagtggttcgcaagatagaaccgtcagacagtgggatttacgctccgggaaatgtatgcaaactatcgacttgagttttgctaatgtcttatcaacctccaccaatgtagatttatcaaagagcacgcttcttacccaaagaagcgaacggcccagtataggcgcccttcaaagttttgatgcggccttggccacaggtacaaaggatggtgttgtaagattatgggatttgagatccggtaaagtaatccgtactttggaaggccacacagatgccataacatcattgaaattcgattctgcatgtttggtcacaggctcatacgacagaaccgtcagagtctgggatttaagaacgggatttctaaataagttccatgcatacagtgcacccgtgctatcattagatttctcacaggataacgccgccgttgtagtcgctgatgaaacgtctgtccaggtgtacgatagtatcaaggatgaaagctggccctgcgttgaacccgacaacgaaataaacgttactgccgttaaatacaaagaaaattacatggtcgagggccgtggcaatggaagcgtgcatatttgggcagtctag

SEQ ID NO: 1357 - DNA, 1944 bp, Saccharomyces pastorianus
atggttgaaaaacgttgtaggcaaagttccagcagtggttcagagttcagcatcccgccggatgtcgacaacccacccctatctattcctttgaagactctatctgatagataccaactcatcgaaaaactgggagcagggtcgttcggttgtgtgaccttggcaaaggcacaattctccttgtcaaacatattaggtagacaacaacaggatttaaggggtactttgatggaccagcccaaaaatggacatcataactatataacaaagactcaaggtgttgtggccataaagacaatgatgacaaaattgcacaccttgcaggattacacaagggtccgagaaattaagttcatactagcaatccccgcaaatgatcatttgatacaaatttttgaagtattcattgattctgaaaactatcaactacatatcgtgatggaatgtatggaacaaaacttataccaaatgatgaagcatagaagacgccgagtcttttccattccttctttgaaatctattctctctcaaatattggctgggctgaaacatatccatcaagaaaatttcttccacagagatttgaagcctgaaaatattctgattactccaagcacccaatatttcgataaggaatatatgaaccggattggttatcaagataactacgttatcaagctagcagattttggtttagcacgtcatgtagagaataagaacccatatactgcctatgtttccacaagatggtacaggtcacctgaaatactattgagaagtggatattattctaaacctttggatatctgggcttttgggtgcgttgcagtggaagttactgtttttagagcacttttccccggtgctaacgaaatagatcaaatttggaagattttagaagtccttggtacacctatcaaaagtccagattttgctaatacaaaccatattattactcctccacctggtgggttttgggatgatgccagtaaattagttcataaattgaacttgaaattaccagatgtggagggttcttcattggaccatttgctttccagttcccagttatctgacttgtctgatgttgtcaaaaaatgtttaaggtgggatcccaatgaaagagccacagctcaagagctatgcgaaatgccattttttgaaaataccgtggcatctcaagtggagacgagaacagacacaactaacacagaacaagcgttgattttcgcaggcataaacccactggcagcaaaaaatacaaagccattatactttaattcctcaaccaaagtgccggttgaaaccgagtctcacgattttgacatcaaccacaacgacaataactctcaaacagtgtgtacaccaaatttgaatcaagaaaaactaaccttggtagaatttttaaacgagttcgttgaagaagataacgatgaccattcaatacctgacgtggatacggattccaccatttcggactctattgatgaaacggacttatcaaaagagatccgtaataacttggcactgtgtcaactgcctgatgaagaagtcttggaaaattcgctatccaatattagacagttgacaaatgatattgagatcataaataaagatgaagcagataatatggaacaactattttttgatttagagattcctgaacaagacgaattccacaaaaagcaaccgtttaatgagcatacagattttgatgaagatattgtcttaccatttgtaaacgattcgaattatacacatactgaaaagccatatcaaaagggtagtaatttcctgggtaatgcatctttaggcgattcatttaattcaatgccagactttactccaagaaatttcttgatacctacattagacaaatcacaggaaaagtttgagtctcatttatctaatcaaaaccaacattttgggaatataaccttttag

SEQ ID NO: 1358 - DNA, 450 bp, Saccharomyces pastorianus
atggctcatagggctttcatacaagtcataatcacaggaactcaagtttttggaaaagcattcgctgaggcttacagacaagcggcttcacaatcagtaaagcaaggtgctactaatgcttcaagaagaggaacaggcaaaggtgaatatggtggcattacattagatgaaagttgtaaaatccttaatatcgaagaagcgaaaggcggcttgaacatggacaaaatcaacgacagattcaactatttatttgaagttaatgataaagaaaaaggtggaagcttttatttacagagtaaagtttatcgagcagcagaaagattaaaatgggagctggctcaaagggaaaagcaagctggggcgaaggcaggggacgcctcaacgtcgagacctcctccaaattcaacaagtccacctggtgcagataaaaatgcaagccccaatcaatag

SEQ ID NO: 1359 - DNA, 1863 bp, Saccharomyces pastorianus
atgaccaaaaagctaccctcagagttgaagcaaacgagaaggtctatccagactgcctgtgagttctgccatactaagcacatacaatgcgatgtgggtagaccatgtcaaaattgtctaaagagaaatgttggaaatgtttgcagagacaagaggagaaaatcaaggaagcgggtggaaaaacataggatacatggtgaaccgtctttggcaaagaggcagacgatacatgatgtaccatcaaagacggtttcgccttccagcgtacaattggagttcaaggcgcgaccccttttggaacagcgggattttttatcttcagatctgaataaggctactcgtcctactactattcaatatacgtacaatatcaatgataatattcaaaacgcaggctctataccccgcataacaaacttcaatacaaacaacggtcgtgccgccttggaaaatgcatccaatgatataccggccccacaaccattgcatttagtcaatgaccccatcgtccccaccttacgaaagagcactctaaacctgaaatcacatttcttagaacaaggtaaagccatgcatcaaccagtggttgccaattcgttggttactaccacttctaatattccggtgcatcccggattaaatggcgctaatgaaaatgacgatgccgatgatgaaagtaatattcattttgatagtatgtggtgcaatgacgagtacatgaaactgaaggatatagtagatttttcaacgccgtatataccgaacaactcccagattttttcacaccaagagacgacgttccctaacggcaatacgcctatgaaaggagactctcctcttcatttagcgaatcttttaaacatgacgaaaaccactaataataataaacaatcttccattggtggatccgcctctactttcaacgcgtatgatgaaatcgtgtccaggccctatatttcattagatatgttgcattccaactccaatcccaacgtaaagccgaattcttcgattactgagaaagcagaagagaaaggtgatatctcagattcgggccaagaaaagcgtgatagcgattttatatcaccttcaaagtttcgtgagttagtgaagactcctcaggacttatatgacaacaaatttataataaaacctcatgactataaactcgcgtacaccaaattgttagcctgtctaagaaaaaaattcatcgaagaaaccaaagatgaacaatctggttctgcagagtttggaaagcataaccgaggaaaggacttaactcatgacctgcaggttataatacgatccatattggaacggtatgctccaattttcatttcattgacttctaatatgatcgaagaagatttgttattacaggaagtcactttgcagagagctttattagacttggaaaacatggcaaaattagtaagctgcacgccaatatgtatttggagaagatctggggaaatttgcttcgttagcaatgagttttattctttgacggggtttaataaaaatgtaatattagaccggaattcattcatattcgagtttctagatcataaaagtgtttcaaattattttcaaatttttaacgaattgttggcctttggttacaatgatattaacaaaaaaaaaaaactattgatgttaaattcatcgtcttcaacctcgtctaagattacagacggattttcttttactactgacgggaaagccatcttcactaaatgcaacttattattgagtaacggcctgtatttgaagtgtgcttgttgctggacagtaaaaagagattttttcaatattcccatcctggtgatgggtcaattcttaccgatttttgatatggattag

SEQ ID NO: 1360 - DNA, 1824 bp, Saccharomyces pastorianus
atgagcaccgaaataccacaacatgaccacaccacaaaccctcaccaaacggtgacagtaaacagctacgattggttacaataccgtgatcagcaagaacaccataaggatagaaacacaatagtgtacgcgtccccaggaggcagcctgagtacgaacacttcagacacgccgctgggtccgcagccctttagcccttcccgcgaacagctggccaacgtgttattcgagagcccgcgacttgatcaaggttcagggtctaactctgctattgaggtgctttccgacacagggaataaagcattaaggcaagaggataatgaataccgttacgaaattcagtattcggtgtttcgtcccttacaagcgtatccaacaaggaacttcatgtatgaacaactccgaagaaaagaagaagaagaacagagaagaaacttcgaccatttggttactgactgtatagaggcctcggagaagtttggacgcgagttagaaaggattaaagcaggctcaagtggttcatattttgtgtatggaacatcagccagcgaaagcaaacctgtgggcgtattcaaacccaaggatgaggaaccatacggcccgttgtctccgaaatggaccaaatgggctcatcgcacgttttttccatgcctgtttgggagaagttgtctaatacccaatctcgggtatatctgtgaaagcgcggctagcttgctggatagacggcttgaaacgcatctggtgcccttcacagataccgcatctataaagtctttgaatttctatgataacaggaaaaaatggttacttggatacagtttccaaaagaagaaacaaaaaaaactgggctcattccaactttttttgaaagactatgtcaacgccgatgagttctttgataggtatccattgccgggaatgtatcttgatgttaaacattcatttcaccacaaatcaggcgaagacgacagcaatataccagagggaagcacgaacataataaaagatacaaaatcgcccaagcaaataaactcttcaccgacatcggtcgattctgaagaaagtgcagaatttgagtggacagaacagagtttaagccaatttagattagaactagaaaaattgatcatcctagactacataatgagaaacacagatagaggccttgacaattggatgttgaaattgatcaaactgcccaataataagtggaagattaaattagcggccattgacaacggtttggccttcccatggaaacatccagacgagtggcgtttgtacccatacggctggttgtatttacctttgcacatactggccaaaccgttttccgaacaaataagatcacatttcataccaatcttgacaagcaccaaatggtgggaagaatcataccaagagtttttgactctcttcagcagagacgaagatttcagcgtccgaatgtggaaaaagcaatgggcagtactaaagggccaagcattcaacgtcgtggaaactctgaaagacccacgacaaggcccattggaactggttagaagaactagatgtcaggtagtagacgaaaagatgcaagttccctgctgcccacctcccctttctatctttaaaaacgctatagatgaacctatcggatcaaactcctcttcaccaatggtgcttcctagcacgccaaacacgattccatctcatgtacacaggcaagatgacagccaccctgtatattatgattccagcctccatccttttgcgaacaaaaaaactgtgatggtagaacgattacaaatagttaattccacccctgtattcacctggtgctga

SEQ ID NO: 1361 - DNA, 3186 bp, Saccharomyces pastorianus
atgtcaggatccttttggaagtttggacaagacttcagcacacagtctaccctatccaagctactgaatagagcttttataaagatcgatggcgacattactactgtggaagaagaagggaagactaatgttagtatagttgatgagaactcggaaaggagttcttttaggtcggaggatgaaggggacgaagaatgtgagttgcctaacacggaagaagaatacaaagcttataaaccaaatctgtacttattggacgatctcttagatgatgaagagctatacacggaactaatgtgctcgaacttcaaattgctaatatttttgaaataccctgaagtcctatccaaattgattgattatgttagaaataataccatactggatcccagcatcgatagagttatttctgaagacaccaagttggtatatgaaaaagacgtggacactatggatagtcctgacgatgaaacagaagattcagaaggcggacgaggcatctccaaaaaggaacagcgaggtgacgacgacagagaagaggaaaaagagattgaagatgacgacaatgcgtctgaagacacgagagtaacactacctcctgaaacagaagaacacgatgacatccgaagggccaggatagcagctgaaatattatctgctgacgtatggcctatatcgtctgctttgatcgaaaatgaagaactcctgaccaaactctggtcgattcttacccactctactccattatcgatagaggcatcaacacacttcatgaaaataaatgagcgtcttttggatatggatatggacggagtcatcgaattcattttaagaaaagaacacattgttgacgatttcttgaaacatattgataatccgcctttaatggactttttattgaaagtgatatcaaccgataaaccggaaatatcaaatggagttattcagttattcagaaaacaaaatttagtctctaaattggtccatttgctcgatcctgtgtttgattcttccactcaatccgcagcaggcgacttcttgaaggcactagtcaccattagtggtaactgccctaatgaaattgcgtcgagtattgggcccaatgagttaacgagacaattggtttcccctactatgatgaaacaacttatggacataatgcttaagggaggcacttcactaaacaatggtgttgggattattatcgaactaataagaaaaaacaactccgattatgatgttattcaggcgaattataccactatcaaatctcatcctccaacagatagagacccgatttacctagggtatttagtcaaattattttcagaacgcatgcccgatttcaacaagatactaactgaaaagaaaatcacccccttacagacctcctatggaacaattgaacccttggggttcgaaagattcaaaatatgcgaactcatcgctgaactattgcactgctcaaacatgactttattgaatgaaccgaatggttacagtattgttaaagaacgcgatattgagagagataggattttcattttagaaaatcagcttcactttaatgattgcgatgaatcaaaagaagatgaggttgagaacgaaggtgacgctaatgaagaggatgacgatatgaaccaaatcgaatctgctggcacatcaatagatggggaagaagttattgataaattgaattctttacaaatagagaccaataaagtaaacctcacaataagtaatgaagagaaggatgatgtggcgccagactttaacagtggaagtctacaagatgaagaaaatgaaaatccatttgaaccacagtactcggatgtcattctagattcctctgatatggaaaaggaattccgcatttctccaaacattggtgatcaaatgaagattgccctacaggatacgagagtaatagatactatgcttgagatgtttttccatttccggtggaacaactttctccataacgtagtctatgatgtcattcaacaaattttcaatggcccgctgaagataggttataatagattccttttaagcgatctcctgaccaacattcgcttaactgatatgattatcaacggaaacaacgagtgtgtgaaatatgaggaagcgcataattcaagactcggatatatgggccaccttaccttaattgcagaagaggttactaaattctctgcatacattgaagaaatgaatattagctttgacaacaaagaagtaatgggctctttattcgaagaacaatggatcaaatacaccgagaatgtgttagaagacttgaaggaaaaatacaatgccatattaggtgatgttgctgaagaaggagacatattggatgatgaagaggaagaggttgtttacaataaggggatgcatcctggcagcactgtagatgattatattaatgatatgatgcaaatggataatgaacataaccaagaagaagggaatgatgacggagaagagtatgatagctatgatgaagatgaacctcgggaataccatgacgataaacctagtaagagaaaagcgtccgatccatcaaatgatgagcgtgaccaaacggaactattttacgaatacgtcaacgaagatggtacaaaaacaaggctgaaattcaacccacgtcctgattctaccgaacacaatttagaggagctggataataacagcgaaataccgttaaaactcaaacgaagtttcacagatgcatacaaagctgaaatagtggcacaggacatcggtggtcacactgaagaggaggacggatttcaactggatgcggatttgaacgacgactgggagtcatcatcttcgaattcgttgcccaagagagcttctccttccaaaatcgatataagctcgcccgtttatcaacatcagttcgaacttcatagccccaccgataacagtggtgattacaagggtgtaatttcaagcgcgaatggccataacttcgacatagatgaagaatatgacgaattaagcgatgatagcgatgaagaatatgataattgtgaagatgaagaagatttagatgatgcgacttccggcgcatatgcattatgtagatccaaaagtaaagacaagatatcatgggatgaagaggagcaggcgcgactaatgggcgttgtaaaatttaattcagagcattacagggactag

SEQ ID NO: 1362 - DNA, 3522 bp, Saccharomyces pastorianus
atgtcgtcaaataatgatcttttgttgcatataatatctcaattaaatgcgcagcagcaagcggcggctctttatgaccatactaaagggctgcaggtcatagccggccccggtacggggaagactaaagttctgacttcgagggtggcctacttgattctgcaccaccatatgcatccgcgcgatatcatagtgactacctttactaacaaagctgctaacgagatgaaagaacgtcttcaggaaatgctacgcggtacagatgtcaatgtctcagaactcctcattggtactttccacagtatttgtctaaagatactctataggtttgggcacttggtagacctacagaaggactggaggatcattgatgaaaaggaaatagatgttattttggatgacatggttgaaaaagttcccgaccaaataagggattacgcctcctcaatttcaaggaaagtcaacttgtgtatgcccaagaagaatggtgatgaatggtgcatccatccaaagcaaatcaagaaacagatatcaaggctcaaatcaaacgcaattctgcctgaagaatacgttctagactcgaaccatgacactgcgttggctcatttttatcaaatctatcaatcagagctaagcaaaaagaacactttagactttgatgacttgttgatgtacactttccgcctgttaactagagagcgtgttttatcgaacgtcaagcatgttttagttgatgaatttcaagatactaatgggattcaattagacttgatgtttctctttgccaagggtaatcatcatctctcgagaggaatgaccattgtgggagatcccgaccaaagcatatacgcctttaggaatgccttggcccacaatttcttggagatgggtaggaaatgccccatcgaatactcgactattgtactagtggaaaattatcgttcatcacagaagattctaaacacaagtgaaattttgataacacagcagaacaaaggacgtcagaatagagctccacttcgtgcccaatttgatttggatttcccccctgtttatatgaattttcctgcttattttctggaggcgccttccttagtacgagaattattatacttgaaggctttaccaaatttgttcacatttaacgactttgccattctagtaagacaacgaaggcaaatcaaacgaatagaaaacgttctggtagaacatcggataccatacaagatcataaggggccataccttctgggattcaaaagaaacaagagcgatgttaaacttattgaaattgatattttctccaaatgataaacatgcaattctggcttcacttttatacccggcaagaggtcttggtcctgctactagtgagaaaatcaagaacgcgctagatacacttgccacagatgtatcatgtttccaaattttaaaagacataagtaataaaaaaattgctttggatataccgacgaagggtcgttctgttatagcagattttatctcaatgatagaaaattgtcaattgttgctagacagtactctactcggaagtcttactgatctatttgataaactttatgaactgtctgggctgaagtacgaatacttatataaggatggcaagaagaaaaccgaacaactggaaaaatctgaacctaatttattaaacgtaaggcataaaaatattgaacttctgaagaactatttcttagctctcgttaataagtcggaagcttcagataaagaaaaaagcgagagtccgaatgcgaaaagtgacagcgaagaccctgttgaagacaaagataccactccaaaggaatatctccgcaattttttcaactcattgtcgctccattcggacgcagctgaagaagaagaatcagaatccaacacaagtgcaagagtgaatcgagaaaaaaacgggttcgttacaatctctacaattcatggtgccaagggtctcgaatggccagtagtgttcattcctggctgcgaagaggggattattccttgcgtattcaacgatgataaaaaggacgaatcagaagaggacgacgaggatgaatcagataatggtaaaaaggatacgagccctaaaaagagtaaaatatgttctgtggaagattctatagatgaagagagaagaatgttttttgttgcacaaacccgtgctaaatatcttctttatttatcgaataccacaacagcagaagacggtgatagaccacgcattgcgagtcgattcttaaccacagacttagtaaaagccatgtccgatagtcaaaaattatttgagagcacgagtaatattaagaaattgtatcgtattttgaacaaaaaaccgcctgctcagactgataaactcttctccttggaccaattgcaaaaagactataaccggttcattgagaacagaagagaaagaatgatttggcagggaatacaaatgaatgacatctacggaatacaattatctaaaaacaaactctcaggtactgttaatgattttacatcagctgcagaccaattacgacttgaaacgaatcgttctatatccccgcaaaggaaacatgctccgagaatattcccacctaaagtcaatggaagttacgctcctaaaaatatggttagaagtccggaaaaaagatacgctccagaaactacatcttacggttctttagcaaagaaaaaggtgtatgcgcctcagtacggttcaacgaacagtgtaccaaatcgtcaagtatttcactccgcaactgggaataatgttccttttttaagaagggaagataggtcaatcactgatttatctccaagatcatcaacaaggtcgttaagaggcgcgtcaccaggtagaacgagtaatatatcagacaatgtagtcgcgctatcaccaacgaggcctttgaaaaaaaaatctgttaataatattcatgttccaactgcaggcacgtttagaattgaagcccaatcgaactgcgatgtacaagaacgctcaaaatactttagtaattcattaacgtctagtgagtgctctaatctttctagcacaagcgctaactctggccagtccaataacttgatacaaaatatcaaagacgagttagatttatccgacgacgaattactaaatgatatatcaatagaaaggagaagagatcttttaaccccagggattacaaagaaagcaaaatcaagatctcgaaataggcggtccaaagtagaggagggaggtgggagtgaagaagtcatagatttaaagagcgaatttgaagaagacgatagtagaaatacaactgcggctgagttattacataacccagatgacaccaaagttgacaaccgtccgattatctcgaacgcgaagtttttggctgatgcagcaatgaagaagatccaaaaagcatcaagcaaggtcaagaatgagtctgcgtcaagtcaaatggatatattctcccaactgacgcgagcgaaaaagaaatcaaaattaaacaatggcgagattatagttatcgattag

SEQ ID NO: 1363 - DNA, 2280 bp, Saccharomyces pastorianus
atgaaacccttccaaggaataacattttgtccgactgcaataaataatgaaatcttatcaaagaagatatccaagaagatcatcaagttgggtggcatattttctaaagatctgaccagacaggtcaatgttcttatcgtcggatctactactaatacgaacaagttcaaatttgctgtgaagcacagatttgacatcatattcattgacatccacgcaatcaacgacatctaccagctttggttatctggagaaaacgtattgccgcaatccggcatcgctgcgacaacgaatatcactcatgaaatgttaaaaacgctgtatcagcgattttcgttcaaatttttgcagaacttcaatatcttcattggcagaataaacgatgcgaaaaccacgtccattgattcattgattcagtccattaagaaattaggctgttcaagttacaattaccaaaattttgtgattagagatacggcctcccatgatgatgataaccaagacccggacgcgcagatatcgatctttgttacggattcgttgtctggcgcaagagttagtgccgccatcgcccaaaacttgcccatcatacatttcaaatggattctggattgccaaaggagaaatgcgctactaccttacgatccttattatcttttgccgaaactgaaagatttggcctatgattctatcggtttaaattcttgtgattgttgggataagataaattccacttttccaacaaatacaaatgatcgctccttcctacaaccacaatcgtcttccgctactccagcactcccgaaaacgtcttttctgttaaataagttcaagccgaagggtgacaagatttgggacaaggcaatgtctctacagcaggataataagacgaatttttctgtacttgcacacacttcgccatcgatggataacgaccatcaaaacactatatcgacgttgatatttagtgactgttcatttgtcatccaccaaaagttccctgccaatcatcgatcaatactaactaaaattatcgttcaaaatgggggtagggttgaaaattctcgcatggacagcgtatatgaacattcatatttcgtcattccaagtgactgcccccttgattcattcgatgatttacctggcattgctgatgacgatgacggcatagttacagaatttttcgttgagcgctgcttgtattatcagaaactactagacccaatagactcgtggtcgagaccttttctcaatacactggacttccaggtgttattttcaccaaaattattgcatcacgacgtttcatcttcgtcttttttaaatgttaccattactggattctcgggtgtggaactattacatctgactaaaattctaaacttcttaaaaccaatgggtatccattatgcagaatacctgaacatgtctactgatattctgttgatcaacttggcggcattgcctagtataccaaagactcacccgctatggtcgaatgagttcagtgacctctttactcaatttagcagtaacaacactgatgatgacagtgataacaacaaaaaaaaggattttcaaagtaatccaatcttgagaaactccatgaaaaggaaaattgagtacatcaaaaaatttcattctataccagtagttacaccagcatttatctttaaattattatccattgcgtctgaagatagcgacgaaatcttcttgaataatatcaaatggtgcattatttgcccaagaggacaaaaggacgatttcaaatgtaaaataaaaaaacaaaaccacacaaatactagttctgaaataaaatatcaaaacaatgacccgaaaattgataaaactattcttttaaaaagaagaaactcctcattatcagagcattccataaaggatactaaaaacgagttattacaaaaaattagagaaacagatagcgagaggaaaagaagtagcttaccatcgactgtcaaggagaaatccccagagagacagatgccaaatacaaaaagaattaagatagagtcaccgccaaagaatttcgttcctaaaccaattaaaagaaccactagttggggtacgatgatgtcggaaaatatatccacgaatctaccgaacgcagttctcaatgtagaacagacgacaactgctgaagagatatctcatactcaagttacatatggttcaattcaagataaaaaaaatgccttttcttcggaaaagcccataagacgacatacaagaactcagacgaaagaattgggttcttaa

SEQ ID NO: 1364 - DNA, 2559 bp, Saccharomyces pastorianus
atgcccaagaggaaatatggcaggtcttattcgctcgataatgcggataccgacagcaacaaagtgttgatagtgccgactggcccaagcgccgccaacgcagtcccggatttctccgttcggaaggctcatgcttgtgatagatgccgactgaagaagatcaagtgcgacggtttgaagccgaactgttcaaattgtggcaagatcgacttcccttgcaaaacctcggacaagctgtccagaagaggcctcccaaagggctatacggaattgctagaaaaggaaattgtgcgattgacgaatttgaatgcgaacgcgactgcgactgcaaacacgggtgcaaacacgaatgcgaatactactgccaacgcgaatactaatcttccattcatcaacgatacgttttactgttttaacaactacaatactcagtctagcaaccaaaggtttttgggtcatttgacttggaacatcctcactgagacgtttccaaactcgaaatcaatgacgttcacaaatgatcgcgaccaaagcggcttacagttacaattcttgacggatcttttgaatttgaatgcggattttaatcatttgccaaatttccttctactcaagtataattataatctgcaatttctgaaaaatttactatccgtaatcattaaagacttcttcaaaagacaaaactctctgttgccactattgtgcccttcaaacttatggaagaactcacttttggacaaaattaattcggcagcaacagacgatccaataactttactgactttggtttatatcattcagtttacctggtcttgttttgatgatttcaaactcttcaaaagcaccaaactaatcttatctttaacaaccaacagcacatcagatttgaaagttttgcaattggtgaacttgtccgttttttattttatgggcggctctattgacattggtaaaaacaaaggcttggcaacatcaaactcaaatttggacgccataatatgggccagtgatttactgaatttaaatttcaccaatattttaaatatgggactgtatataaatccaaaaaaactgatttccattccaaacaacaccaacgataataaatcaaacgaagaagaagataaaatagtagcattttggtgcttccaatttttgaactcttggtggtctttgattcaaggtttgccgaagtcaaattttttaattgaagaattccaaccaaaatcagtttcagtactaaaaattcccaaattgaaaccatttgaaattttattaaactttattgtaaattctttggatggatgtaatttattaaaaatctcttcgttgggcgtttcagatcttagtttccaatttttccaaaatgaattagacaatttcaaaaaggatttgttattttggaatctttatcataatttaagcgatcatgaaaactttaattttttaactgcaaagtcgaacgccaagccaacaatgaattcgttattcaagaatttatcaaacttgaatcacaagcttaatcaacctgatttcgtggaaattcaactaactttgttctacctgagtctcaagctaataacgtcaaaaaaaaacgatcaagacttgaataaagaggatgtttcactagaaattttgaccctgtattttttaattttgacggataactctaataacgatgacgaccaacaactacaaccacagcaattaaatctttaccatttcacgccctttaatagtattgatatcattaacttgtgtttaaataatctaaacagctggtcaatatcttataaatacaaacaaggccaaaatcatctagagtcaaataaatcgaagtttgagagcttccaaacttttctgaaccattggtgtttagtatggtattatgatgaactttctactaactcttttctacaagtccttaaaataaattttggtttattaaatttcgaaataatcaactccccacaagaaacagaacaacaacaacaacagttacacataagtctaaacaagttgagatatttgaattcagtaatgaactttaacttaaatacagcaaagtcaaacggtacatcaaaggtcaacactcaacttaatcttttacaaaattcaaacacaaactctagttctaactttcttaaagcatctccatacgactttaataagatttttatgagtaattttgaaaactatgattacgaaacagatgaaggttatgctgaagacgatgatgaggaggacagcgatagcgataacagtttacccttggagatccctttcaataagaataaaaccaagtacagtaaaaaaaacaaagaaataccgcaaagattgtctttatttcaaaacaaaaacaacaattctgtaaacttcaatccaagcccgatttcagatccaaatctaaatctaaattctcattcgccatcgactccgacgacaaggaaaaaacttctagaccatattatattagaaaacagagaaattctcaacagtgatggctccagcaaacaaaaattcaaaatccagaatatcctaaactcatccttctag

SEQ ID NO: 1365 - DNA, 1014 bp, Saccharomyces pastorianus
atgtcaaccacaacatcatcatcatccttacgccattttgtgtctatcaaagacctttctgatgaagaattcaaaattttagttcaaagagctcagcatttcaaaaatattttcaaagcaaataagacaaatgactttcaatccaaccatttaaaactattgggcaaaaccgtcgccctaatctttactaaaagatcaacaagaacaagaatttcgactgaaggtgccgctgccttctttggtgctcaaccaatgtttttaggaaaagaggatatccaattgggtgtcaacgaatcattttatgacaccaccaaggttgtatcttccatggtttcatgcattttcgcccgtgtaaatagacatgaagatatccaagcactttgtaaagactcttcagttccaattatcaactccctatgtgataaatttcatcctctacaagccgtttgcgacttattaacgataatcgaaaactttgacatttctctagattcattaaataagggaggtaactccaaactgaaagtagcatggattggtgacgctaataacgttattaatgatatgtctattgcatgtttaaaattgggtttgagcgttagtattgcaactcctcccggtattgaaatggactctgaaatagtcaatgaagccaatgtaattgctgagagaaacggtgcgacattcgaactaacgcatgactctttgaaggcatctactggagctagtatactggtaactgacacttttgtctccatgggtgaagaatttgcaaagcaggccaaactgaaacaattcgaaggatttcaaatcaataaagaattaaccgcagtagctgatccaaacttcaaatttatgcactgtttgccaagacataatgaagaagtcagcgatgacgtcttctacggtgagcattccatagttttcgaagaagctgaaaatagactatatgcagctatgtctgctattgacgtctttgtcaccaacaagggtgatttcatgcacctaaaataa

SEQ ID NO: 1366 - DNA, 2481 bp, Saccharomyces pastorianus
atgcccagtccatacggcaataaaagaacagtggctaagcttgtcagcgagctagaagatgcagagaaacttaattctagaggtagagcttacagaagagtttgtaatctatcacatagcgataagaaggtagtctcttggaaatttaatgagtgggactacggcaaaaacaatataacgttgccctgtaaagcgagaggtttatttattagcgatgatgtagaaagtccagttattgttgctagagggtatgataaattttttaacatgggcgaagtaagtttcaccaaatgggaatggatagaagagaattgtagaggaccttatgatgtaacaataaaggccaatggttgtattattttcatttctggcttggaggatggcacaatggtagtttgttcaaaacactctactggaccgagagaggatgtagatagaaaccatgcagaggcaggcgagaaacaccttttaaagcaattggcggaaatgaatgtcgatccaaaagattttgcgagaatgctatacacatacaacattaccgcagtggcagaatattgcgatgactcgtttgaagagcacatcttggagtatccccttgagaaggctggtttatacttgcatggtgtcaatgttaatgaagcggaatttgaaacctgggatatgaaagatgtttctgaattggctttgaaatacggattcaagcgcatacagtcctttgacatgaacaccatagaagatttgaagaaactctttgacgattgcactgcaagcggatcttttaaaggtcaagaaattgaagggtttgttatcagatgtcatttaaaaagtaatggaaaaccattcttcttcaaatataagtttgaagagccatatttgatgtatcgtcaatggagagaggttactaaagactacatttccaataattcaagagtattcaaattcaaaaaacataaattcataaccaacaagtatcttgatttcgtgattccaatattggattcatcccccaagattcgtgaagattacatgaaaggatttaggatcattgaattaagaacaatgtttttggagtcgtatggtatgagtgggttagaaattttaaatcatgaaaaagtggccgaattggaattaagaaatgccatagattatgataaagtggacgagcatacaaaatttttaattttccccatttcagtcattggatgtggtaaaacaacgacctcacagacattaacgaatctgttccctgaaacttggggccacattcaaaatgatgatatcactggtaaagataaatcacaactaataaaaaaatcattagaactactagccaaacaagaaatgaaatgtgtcatagttgatagaaataaccatcaattccgagaaagaaagcaattatttgaatggttagatgaactaaaggaagattatttggcatatgatacgaacatcaaggtgattggtatatcattcgcaccatatgacaagttatcgaaaattagagacatcacgatgcaaagagtaatcaaaagaggtaacaatcaccaaagtatcaaactggatgaactgggagagaaaaaagtcattggtatcatgagtgggtttttgaaaagatatcagccgttaaatatagataaatcacccgataacatgtttgatttgatgattgaattggacttcaatgagatagattcctctttaacgaatgtgaaacaaattctgaatgaaatccatagggcgtaccctatcttgatgcctgagatcccaactgatgataaaattgatgaagcatttaggaagagcttagaatacaaaccgacagtgagaaagatagtaggtaaaggcaacggaaatcaacagaaaacacctaaattgatcagacctgtttacatttcagttaatgcaagggaacatgatgaaattattaatttggtgagacagggtgttgctaataataaagatttgtcacaaaaattcgaaggattactcgcaaacgacagacttcaaaaagacttccatattacattgggccacgtgatgtcgtctcgtgagaaggaggggaagaagttgtggaaactgtatttgacgagataccatgatcaaataacagaatacaacaacaatcataaagaaaacaactctggtaataaccaaaatacatcggtgaacaccactgacaaactgaaattcaagttaagcaaattatgttgggatgacaaaataattgcaattgtagtagagctttccggaaatgaaaccgggtgcctaattgacgtgaacggcgatattgtcaatggattaaagtgtctgaataaagttcctcatattacggtatgtaaaatcgatagtaatgtcaaggcggtttattcgaacgttttatgcgagaaagtccaatccggtgaagctcaagatgaaaatgtaaaagttttgaaattgagcgatgcaaaggaattcgttggcgatgtatgtttgaacttttaa

SEQ ID NO: 1367 - DNA, 1872 bp, Saccharomyces pastorianus
atgccggcagaaattgatatcgatgaagctgacgtattagttttatctcaaggattgcagaaaacaagtaagcttaccttccagattaataaatcattgcagaaaattgcggctacgtcgagtcaatccagtcaactctttactccaattttagctagaaacaatgttttaactacattgcaaagaaatatagagagtactttgaattccgttgcctccgtaaaggatctagccaatgaagcctctaaatatgaaattatcttacagaagggtattaatcaggttggattgaagcaatacacacaagtgatacacaaattggatgatatgttggaagatatccagtctggccaagcaaatcgggaagagaactcggaattccatgggattttaacacatttagaagaactgatcaagagtagcgaagctcaactgagaatatacttcatttcaatcttaaacagtattaaaccatttgatcctcagatcaacatcaacaaaaagatgccgtttccttactatgaagaccaacagttgggtgctctttcttggatcctagattatttccacggaaattcagaaagttctactatacaagacatgcttgtcggtgagagaagtaaactgatcctcaaatgtatggcattccttgagccgtttgctaaggaagtcaccaccactaaaaatgctccatacgaaaagggcagcagtggaatgaatagttatacagaggcattattgggtttcatcgctagtgagaagtcactggtggacgatttgtactcacaatacatagatatcaaacctcaggtgctatcgcagattttgtcgccattaataagtgcctatgccaaactttttaatacaaatttgaagattgtacgaagaaatcttgaaaatgtggggttttttagttttgaattagtcgaaagcataaatagtgtgaaaaaaacacttcgaggcaaagaattacaaaactataatctattacaagaatgtactcaagaagtacgtcaagttacccaatctctatttagggatgctatagataggattttaaaaaaggcaaactccatttcaactattccttctaataacggtgttactgaagcaaccgtggataccatgtcaagattgagaaagtttagtgagtacaaaaacggttgtttaggggccatggataatattacacgtgaaaattggttacctgccaactacaaagaaaaggaatacactttacaaaatgagcaattgaactgggaggatcacaatgtatcattatcgtgttttgtgagtgactgtatagacacattggcggttaatcttgagagaaaagcacaaataacgttgatgcccaatcaggagccagatgtggctaatccgaatagcacacggaataagcacaagcaacgtattggtttctttattttaatgaacttgacgcttgtcgaacagattgtggaaaaatctgaactaaactcaatgttggctgcagaaggtcacgcaaggttagaaaggttgaaaaaacgctacgttagttatatggtatctgactggagagatttgactgcaaatttaatggacgcagttttcatcgatagtagtggtaagaaatcaaaggataaagaacaaattaaggaaaagttcagaaaattcaacgaaggttttgaggatttagtatcggggacaaagcagtacaaactatccgatccgtcgatgaaggtaattctaaaatcagaaatcatctcattggttatgcccatgtatgaaagattctatagcagatataaagactctttcaaaaatcctagaaagcacatcaaatatactcccgatgaattgacaactgttctgaatcaattagtcaggtag

SEQ ID NO: 1368 - DNA, 1470 bp, Saccharomyces pastorianus
atgtctaatgctgctttgcaagtttatggtggtgatgaaatatccgcagtagtcatagatcctggctcttacacaacgaacattggctattcaggctcagacttcccccagtctattctaccctccgtttacggtaaatccgcctcagataaagatagtaagactattttctccgagcaatctattgggattccaagaaaagactacgagctaaaacctattattgagaacggtcttgtcattgattgggacactgcacaagaacaatggcagtgggccctgaaaaatgaactttatttagattctaactctggaataccggctttgctaactgaacctgtttggaatagtacagaaaataggaaaaaatctttggaagtccttctagaagggatgcaatttgaagcctgttatttggctcctacgtcaacatgtgtttcatttgcagcaggcagacctaattgtttggtggttgatatcggtcatgacacatgtagtgttagtccgatagtagacggtatgacgttgtcaaagagtacaagaagaaacttcattgctgggaaatttatcaatcatttgattgaaaaagccatagagccgaaagaaatcatacctctctttgcaatcaaacaaagaaaaccagaattgataaagaagaaatttgactacgaagtcgaccagtcgctatttgagtacgcaaataatagagggtttttccatgagtgtaaagagaccctttgtcacatctgcccaactaaaactttggaagaggcaaaagcggaattgaatacaacaactaagaggtctatcgaaacaccttggaatgaagagattatctttgataacgaaactcgttatggctttgctgaagagcttttccttccaaaaaaagacgatattccggaagattggccacactccaactctggtgtagtagagacttggcgtaatgactatgtgccattaaaaagaaccaagccaagtggaactaataagactgacaagaaacctgtgcctacagaagaaaaggaacaagatcttgtaagtaaatctatttctccacctgccgacagtatagatactccaaatgacagtggtaaaagaccattggaagaagagacttcttctaatgatatcaaagaaataacaggcctagctgatctcgtatattcatctataatgagcagtgatgtggatttgagagccacattagctcataatgtcgtacttacgggtggtacatcctcaattcccggcttaagtgacaggttgatgaccgaactgaataaaatacttccatctttaaagttcagaatactaacaacggggcataccagagaaaggcaataccaatcatggctaggtggtagtatactcacaagcctaggaacattccatcagctatgggttggaaaacaagaatatgaagaggtgggtgtcgacagattactcaacgacaggtttagatag

SEQ ID NO: 1369 - DNA, 3663 bp, Saccharomyces pastorianus
atgtctgaagaacaaagtgttattgatacacctcctaccactgtcgacggttctgttgaaactgttaccaccatcgattcaccaagtactactgcctctaccattgctgctaccgaagaacaacctcgtttggaaaagaagccaaccccattgccatcgctgaagaatttgccctctttgggttcaaatgctgccctagctagcgttaaggtcaactggggtccaaacatgaaacctgctgtctctaactccccatcaccttccccttctggccctgcattgaatacaggtctcggcgcgaagagaatgcgttcaaagaacatccaagaagcctttacgttagatttgcaatctcaattgtcaatcactaaaccagaattatctcgtattgttcaatcagtcaagaaaaaccacgaagtctctgtcgaatctactctttccaagaacgctcgtacctttttgatttctggtgtggctgctaatgttcacgatgcaaagagagaattagcgaaaaaattgacaaaaccaatcaacgccgtcatcgaagtcccatccaaatgtaaagcaagtatcattggttctggtggtagaaccatccgtgaaatcagtgtcacttacgaagttaagatcaatgttgccaaggaagtcaatgaagactcttacgacgaagacatggatgacactatgagtaatgtttcactatttggtgattttgaatcggttgatatggctaaggctaggatcttggccattgttaaagatgaaactaagaacgccactataaaattggttgtcgaagatgaaaaatacttaccatacgttgatgtttccgcctttgcttccaatgatgatgacgacgaagtcaaagttcaattttatcaaaaatcaggcgatattgtcatttctggtcctcgtgaaaatgctaaagccaccaaagcagccattcaagattacttgaaaaagttagcctccgatttagcccaagagaaggttaagattccaactaagttccaatttttgattgatgctaaggaattgaaagaaaagtacaatgtcattgttaccttcccatctactcctgaagatgaattagtgtcatttgttggtctacgtgacaaagtgaccgaagccattacttacgctaggtcttcttccaagagctacgtggttgagtctttagatatttccaaggcccatagtaaaaacgttgctcacgcaaagaatctgataatgtactttaccaaatactctgtattaaagagtcttgaagattcccaccccaatgttaagatatctttgccatccgtccaatcgctacctgccgccgaaactgttaccgtccacattagtgcaaagtctgacgaagcaaatgacatcaaggcagctcgtaaggagttgatttcctttgtcaacaatatcccaccttctgaaaccttgaccgttacagacttagattacgagttatttggtgggtcaatcaaacactccttgttggcttctgagagtgatgttgcctttgtccaatttggtgactattatccaaatgataacaccattttgcttgttgccttaaccggtagtgaagatttcaaaccatccatcgaagagattcaggcatccttgaagaaggttaatgagtcactagaccaactacgtactaagcaaaatagcatggaaagtaacacttatgaattttctccagaagttcaggattccctctttagtccatcttctgctacattgaaattgatcttggaagatatttctgaagaagaaggtcacattcaaattaaactacatacacctgaagaaggccaattgactgttagaggtgatgaaaaggctgtcaaggtggccaataaaatttttgaatctattgtgaactccccatcaaacaagagcaaaatgactgttgatattccagccaactctgttgccagattaattggtaataaaggttctaacctgcaacaaattcgtgagaaattcgcatgtcaaattgatattccaaatgaggaaaacaacagcgccactaaagataaaaccgtcgaggttactttagttggtttagaatacaatttgactcatgctaaaaaacacatggccgccgaagctaagaaatgggctgatattattacaaaggaactaattgtcccaactaagtttcacggtaacatgattggtcaacacggtacctaccgtaaccgtttgcaggaaaaatacaatgttttcatcaacttcccaagaaacagtgaaatcgtcaccattagaggtccttctcgtggtgtcaataaggcacatgaagaattgaaggcattgttagattttgaaatggaaaacggttacaaaatggttattaatgttccagccgaacacgtcccaagagttattggtaaaaacggtgacaatatcaatgatattagagctgaattcggtgtcgaaatggatttcttacaaaagagcaccgatccaaaagttcaagaaaccggtgaagttgaattagaaattaccggttctagacaaagtatcaaggatgctgccaagcgtgtggaatctattgttgctgaagcttccgactttgtcactgaagttttgaaaattgaccacaaacaccataaatctattgtcggtagtggtggccacacattgagagaaatcatctctaaggctggtggtgaagaaatcagaaacaaatctgttgacattccaaacgcagattcagaaagccaagacatcactgttcaaggtccagaaaaatttgtcaaaaaggttgttgaggaaattaacaagattgtcaaggaagctgacaacagcgttaccaaggctctcgatattccagcagaaagaaagggtgctttgattggacctggtgggatgattcgccgtcaactggaatccgaatttagcatcaatcttttcgttcctcataaggatgacgctagtggcaaaatcactatcactgggttaccagaaaacgttgaaaaggcagaaaagaagatcttaaatgaaataattagagaaaattttgaccgagaaattaacgttccagcttctatttacgaatatgtttcagaacgtggtgctttcattcaaaaactgagaatggatttgttcgttaatgttagatttggtaacactgccaggaaagctaataaactagcccgtgctccaattcaaattccattagaaaatgttcgtggctctacagaaggtgaaaatgcagaaaagactaaatttaccgttgaggaagttggtgcaccaacatcttctgaagaaggagatatcaccatgagattgacctacgaacctgttgatttaagcagtatttttggcgaaaaagaaaaggaagtcaagaaggacgcttcaaacgactctgctaagaaggaagaagccctcgacactgccgttaaattgattgaggaaagaattgcgaaggcaccatctgccacatatgctggttatgtttggggtgccgacaccaaaagattcaatatgattgtcggcccaggtggttccaacatcaagaaaatcagagaagcagctgacgttgttatcaatgtcccaagaaagtctgacaatgtaaacgatgttgtgtacattagaggtaccaaagctggtgtcgaaaaggccggtgagatggtattgaaatctttaagaagataa

SEQ ID NO: 1370 - DNA, 858 bp, Saccharomyces pastorianus
atgaaactttcaaaaatatcgctcttaacatctgctttggcctcgaccgctttcgctgctcccgccgttgtcactgtcactgaacacgcccatgctgctgctgtggtgactgtgcaaggcgtggtctacgttaaaaacggccagactctcaccacttacgagacgttgggcgctgcttctgctactgccaacccaacctccaccgccacagctttagttgctcctcctatcgcttctgcttccagcgatgctaaagcagcttcgtctgttttgcagaactttgcccgggttaaaagcaagtctacaagctcaaccacctcgttggcatcaccttcatcgcaagcaaaagccaccagcacttctacaccagctacaaccatgtccacttcccaaaccgctgccaccacctctgcctctacttcaaatgacaacttatcagattttgcctcatccgtcttggctgaacacaacaagaagagagctttgcaaaaggacactccagccttaacatggtctgatacattggctacttacgctcaagattatgccgacaactacgactgttcaggtactttaactcattccggtggctcatatggcgaaaacttggccctgggttacgatggtccaggcgccgttgatgcttggtataacgagatctccgactatgatttctcgaacccaggtttctcgggcaacactggtcatttcacccaagtcgtctggaagtctaccacacaagtcggttgtgggatcaagacctgtggtggtgcatggggtgactacgtcatctgtagttacaaccctgcaggcaactacgaaggcgaatacgctgaaaatgtcgaacccttggcttag

SEQ ID NO: 1371 - DNA, 3687 bp, Saccharomyces pastorianus
atgtacatcaagagagtggttatcaaggggtttaaaacctataggaatgagacaattattgataatttctcgccgcatcaaaacgttatcatagggtctaatggatcaggaaaatcgaacttctttgctgctattaggtttgttttgagtgatgattactcaaatctgaagagggaagagagactgattcaccaaggttcgggtggttcggtgatgagtgcctcggtggagattgtgtttcacgatccagaccgctcaatgatattgccctctggtgtgctctcaagaggggatgacgaagtgacaattagaagaacggtgggtttgaagaaagatgactaccaattgaatgacagaaacgtcactaagggagacattgtcaggatgttggaaaccgcaggattctcgatgaataatccttataacatagtgccacagggcaaaatcgttgctttaacgaacgctaaggacaaagaaagattgcaattattggaagacgttgtaggggccaaatcctttgaagtcaaactaaaggcttcattgaaaaaaatggaggaaacagagcagaaaaagacacagattaataaagaaatggatgagttgaactcaaaactgagtgaaatggaacaggagcgtgaagaactggaaaagtacaatgaattggaacgtaatagaaaggtctaccaatttactctatacgatcgagaaatgaatgacgttatcaaccaaatggaaaaattagatggcgactacaacaatactgtatattcttctgaacaatatattcaagagctagataaaagggaagatatgatcgagcaagtctccaaaaatctatcaaatattgaagcgtctttgaagattaaaaatactacggatctacaacaggcaaaactaagggagtctgagatttctcaagaattaacaaatgttagcgtaaagataaaagatgtccaattgcaaattgagtcgaatagcgaacagagaaatttggacggttcaacactaaaagaggttgaatccaagatcaaactgaaacaacaaaagctgtccaaaatattacctagatttcaagaacttacgaaggaagaagcaatgtataaacttcaattagcgtcgttacaacaaaagcaaagagatttggttttcaaaaaaggtgaatatgctcgtttcaagtccaaagaggagcgcgactcatggatttattcagaaattgaggaattaaaatcatcgatgcaaaaccttaatgacttaggaagtaaactacaggtggaccgtacttctttgaaggagagcttattcaagattgacgaagaaattgaagagctgaccgattctattaacggaccggatatcaaaggtcaactagaagattttgattctgaattaatcaagctcaagcagaaactgaacgaaagtttggacactcgtaaagagttatggagaaaggaacagaaattacaaacagttatggaaactatattgagtgatgtcaaccaaaaccaaagaaatgtcaatgaaactatgagcagatcattagcaaatggtataattaatgttaaagaaatcacagaaaaattaaagatatcgccggaatccgtgtttggaacattaggagaactaataaaagttaacgataaatataaagcatgcgctgaagtaatcggaggtaactctctttttcacatcgtagtggacacagaggaaacagccaccttgatcatgaatgagttgtatcgaatgaagggtggaagagtaacatttatcccactgaacaaattatctttggacgctgacgttaaattcccctcaaattctacaactcaaatacaattcacccccctaataaaaaagataaagtatcaacctagatttgaaaaagctgtcaaacacgtttttggtaaaaccattgtcgtcaaagatttgggccaaggtttaaagctagctaaaaaacacaaactcaatgccattacgttggatggtgatagagcagataaaaggggtgtactaacgggtgggtaccttgaccaacacaaaagaactcgtttggattctttaaagaacttgaatgaatcgagaaaccagcacaaaagtattggtgatgagttacaagttgtcagaaacgaactaaatgatattgatgctcaaattgatcaattaaacgggaacataagaaaagtgtccaacgatagagaatccgtcttgacaaatattgaaattttcagaacatcattaaacactaaaaagaatgaaagattgattctcgaagaatcttcaaacgccattgtgttgaagttagaaaagcagaagacaaacctaaaattcgcccaagaaaagatggatacatatgaaaatgatttgcttcaggactttgatagcgaactttccaaagaagaaaaggaaaagctggaatctttaaccaaagagatcaatgtgttgcataacaaattggatcttacttcagatgcactggaaggtataactacaacaattgattcattgaatgccgaattagagtccaaacttattccacagcaaaacgacctcaagataaaaatggccgaggttggtgatgcattcattttgggtctacaggatgaactaaaagaattagatttagagaaggaaagtgtcgagaaacaatacgaaaacgctacattagaactaggcactatccaaagggaaatcgaaacacttgttgcagaagaaacaaataataagaagctgttagaaaaagcaaacaatcaacagcgtttattattaaagaaacttgacaattttcagaaaagtgtggagaaaacaatgattaagaagacaacgttggttacgagaagagaggaactgcagcaaagaattagagaaattggattacttcctgaagatgctttaatgaatgattttagtgacattacaagtgatcagctattacaaaagttgaatgatatgaatacggagatctcgagcttgaagaatgttaataagagagcttttgaaaatttcaaaaagttcaacgaaaagcgtaaagatctttcgggaagagcttcggagctagaggaatctaaagattcgattcaggacttgattgttaaattaaaacagcaaaaggttagtgcggttgattctacattccaaaaagtctctgaaaacttcgaaactgttttcgagagattagttccaagaggtaccgctaaactagtcattcatcgtcgaaatgaaagctctaatgatcaagcagatgacgttgatattgatatggactccggtaaaaatgaagatacaattaataaagagggtgaaactgtctacaccggtgtttcaatttccgtttccttcaactctaagcaaaacgagcaattgcatgtcgaacaactgtcaggtggtcaaaagacagtgtgtgccattgctttaatcttagcgatacaaatggtagatcctgcctccttttacttgtttgacgaaatcgatgctgcattagacaaacaatatagaactgctgtagccacattaatcaaagagctgtcaaccaatgcccaattcatttgtacgacgtttagaacagatatgttgcaagtagcagacaagtttttccgcgttaagtatgagaataaaatatccacagtcatcgaggtcaatagagaagaagcaatcggttttattaggggcagtaataaattcgctgaggtttga

SEQ ID NO: 1372 - DNA, 648 bp, Saccharomyces pastorianus
atggcattaccagcacacctgcagcagaccttttcgccagaagaaatacagtttattgtggagaatgagcccataaagatttttcccagaataacgacacgccaaaagatttatggaaatgacggaggggtgaaaaaccagatacccagtcgctggcagctcattacgacagatgataaggctttaaataatatggtggcaatgcgttccacagaagtggtcctttgggttgctcttcttttgaagcagcaatccaagtgtagtattgtagcaccacagtggttaacgacaaaagagcttgatagaaagataaagtatgaaaaggcccatccagatagattcagtgagttgccgtggagctggcttattttggcacgtatactcttcagtaaagctaaggacgatttccatgatcctgttcacgaattacgcggtagaattcaagatttaagagagatgaggcaggttaaagtattaaaaggtcttaaatatttgaatgagtcgcatttgcaattagacaatctcagtctgttagaaataaatgagctgaggccgttcatcactgacatcatggataagttaagagagattcattctgcatctcttactgctggtgctgaaaacgaggaagaagatttcaatatttga

SEQ ID NO: 1373 - DNA, 2652 bp, Saccharomyces pastorianus
atgcaagcggtagaaagaagaccttcgctgctctttgacgaatatcagaactccatcactaagcctaatgagacgaagaataaagaggccaagaacaacagtactgcttccccatctaaattaaagcagaaggagatctctgtggatgatatggatatgatttcattgcccacggacttcgataggcaaatggatttaggctcgcccatgtttttcgatcctgaggatgaagagaataaaattgatccgattccttcgatatcgcatcattatggaaacatcgacgatggtagtttcgttccctcatatttaccttcaaattcaaagattgatcaaaatggcaaggacctctttgctaatccatttgagttggtctctcaaatgaggaaaagatatatcactacctctaaacaagatggcgtttccaatatcaagaacgacttacaaaactggttcttatatcctaagcctttacccaagttttggaaatttgaagatgacaaacgtttacaagacccctcagactcggatttgaacgagggtggggacaatactgcggcaggaaccatcacaccgcatcatcatgggtactactacccaagttactttaccgatcactattattatgcaaagtcggatccgaaggagaaaggtaaagtgaaagtgccatatactggtgagtatttcgatttaaaccattataaagaacagtatgtgtcccatttaaacaaacaaaaggataaacaatattcctctttgtgtcctaattctagtgaagaagagccacaggaggaagaatacttgacagatgtgcctacattccaagaatttagggacgattttgcatacgtcatagaattagttcaatcccataagtttaatgacatttcacgaaagaggttatcttatttattagacaaatttgaattgtttcagtacctaaattctaaaagagaaattttagcgaacaaaaatgttccctacagagatttttataattctcgtaaggtagacagagatttatctttaagcggttgcatttctcaacgtcaacttagcgaatatatctgggagaaaataaacttagaacctgacagaatagtatatcaagacgcggaaacatcaaaaaaattcacattgtgtgatatctttcagtttggctgctctgccgatgatctgcctattgcggttgggttgaagttgattgatgacgaattcctggactggtataaaaatgtttatctaatagactatcatttaactcctaacaaatcagcaaatctgaccggtaaagaaatgaggttttttctactggccaaagtctttcttgaatttgataacttcattgaaggtgagtatcttgcagaaatttttataaaatacgttatccacatcctggaaaaatcaaagtatcaattggcccagatatccgttagtttccaattttattctgatggtaaggattggtataaaaaattttcacagtggttgttgcaatggaagctggtatcatataacgttcgctggaacatacaaattcctagaatctttcctaagttattcaaggaaaatgttgtctctaatttccaagaatttttggatctaatattcaattctttatttgatctggaaaaaaatgaaacgatggattcatcagtggatagtgataccattggtgtccagtttttcttatcaaacgtttgttctatggacttagtcattaaggaatccgatgaatattactggaaagaatttactgacgtgaattgtaagccaaagttttggactgcacaaggcgataatcctactgttgcacactacatgtattatatttacaagaatttatcaaagttgaatttcttaaggtcacaaaatcttcaaaatacaatcattttaagaaactattgttcgccgttatctagcagaacttctcaatttggcgtagatttatttttcacagaccaaatagagtcgttggtgtgcaacctactactttctaacggcgggttattacaggtggagccactttgggatacggcatcaatgattcaatatctattttacctttttcaaattcctattctagctgctccattatcgtctgtgtcgctattaaattctgaaaaatcttccaccttaaatcataaaagcattctcctcgaaagcgattatttgaaagatcaagcctccaccaagatcaacccttctagagatattactattgacgagcaaaggtcatacgaaacaaacccttttatgaaaatgtttagaatgggattaaaggtttctttgtcgtcaaagtcgattctttataatagttcctatacgttagaacctctgattgaagaatacagcgttgcagcgagtatttacttacttaatcctacagatttatgtgagttgtccagaacgagtgtgttgtctagtggatatgaaggttggtataaagctcactggattggtgttggagtaaaagaggcctcattttttgaggaaaatgtcggtggaatagatatttggtatgatacagcagaagatacttcaataaaacataatgtcccaatgattagaagaagatacaggaaagagacattggatcaagaatggagcttcattcaagatcactttggtacatttaactccatatggtag

SEQ ID NO: 1374 - DNA, 900 bp, Saccharomyces pastorianus
atgaatgttgtcaaggaactcagtgtttgtggcggccgattggtcaagttgtcgcacaactcgacctccaccaaaacgtgtatgaacgtcaatgtctacctgcccaagcaatactatgcccaggattcttcaaggagcaggcccattcccacagtggtctacctttctggtttgacttgcactccagacaacgcctctgagaaggcgttttggcagttccaagctgacaaatatgggtttgcgatggttttcccagatacctctccccgtggtgaccaagtcgcaaatgatcctgaagattcgtgggactttgggcagggtgcagggttctacctcaacgccacccaggatccgtacgcccaacattaccagatgtacgactatgtccacaaggagctaccacaaacgctggatgcacacttcaacaagaacgccgccgctaagctggacttcctggataacgtggccatcacaggccattcgatgggcgggtacggtgccatctgcgggtacttgaagggctatgctgaaagaagatacaagtcctgttctgcattcgcgcccattgtaaacccttccaacgttccctggggccaaaaggcgtttaagggttacctaggcgatgaaagggcacaatggcaagcttacgatccatgtgcgctaatcaagaatgtcaagcgtgtgggtgacgacaaggttttgatccatgtgggggacgaagatccctttttagaaaaacacttgagaccggaattgctacttgaggctgcaaagtctacttcatgggaaaactatgtccaagtaaaaaaagtgcacgggtttgatcactcttactacttcgttagcacttttgttccagaacacgctgaatttcatgccaaaaatttggggttgatctaa

SEQ ID NO: 1375 - DNA, 495 bp, Saccharomyces pastorianus
atgaatgagaacaatagcagtatagaaacgggggttccaccgccttgttcgctccagctgcctgtggaaaaagtacagaggatagccaagaatgatccggaatacatggacacttcagacgacgcattcgtagccacagcgtttgctaccgaattcttcattcaggttctgacacatgaatcgttgcagcagcagcagcgcagccaagtacctcatccttccgacgagatcacgctgtcgtacgacgacgtctccgccacgatattaaagtcgaccgatggccatctgcagttcttgaacgatgtgataccgatcacgaagaacctgaggctcctagtggaggaaaacagagttaggtacaccacgagcgtcatgccccccaatgaggtgtactcaacctatgtgatgggcgagacggccttgaaacccaacattgtcgagatcgaccttgacaatgacgaagatgacgacgaagacgtaacggaccaagagtaa

SEQ ID NO: 1376 - DNA, 717 bp, Saccharomyces pastorianus
atgacggtgggtattgctagaaagctatccagggacaagccgcatagggacgcgctgctgaagaaccttgcgtgccagctgttccagcacgggtcgatcgtgtcgacacatgccaagtgtaaagaagcctccagggtcgcagaacggatcatcacctggacgaagagagcgctcgcgacgaacaacagtgtgtcgcaagcagagctgagagcgcagatccagagccagctgtttctggcgggggacaatcgcaagctgatggagcggttgttcaacgagattgctccacggtacgtggaaagacccggcgggtacacccgtgtgctgcggttggagcccagggccaacgactcagctccgcaatccgtcctggagctggtcgatttgcctgtggcttctgagtcgcacgcggtgaacaggggcaacttgaagatgtggctgttggtgaagtcggtcattaacgatgacaccaaccacctaccccacagcgagctgacgctgcagaatctgtacaagctggcgaagttcaagccggaagcgcagttgcacagtgagttctcgctgattaaggagatcctgtttaaggaactggccttgccctacgataagacggtggaggaagaaaagacgcaggcgcttttgaaacaagtctactcttccgcgttgcccaagaagcagaggaagccctcgtcttatgtcatggttcccagaccctag

SEQ ID NO: 1377 - DNA, 2487 bp, Saccharomyces pastorianus
atgaacttgaagcagctcatgtgcctatcgtgcgcacagctattcgccatcctcctcttcatctttgcctttttccccaggaaaatcgtgctgccaggcatatcgcatcaggatccagaccaggaccgcgatcttcagcacgagaggccctttcaaaagctggtcttcgtggtcatcgacgccctcagatcggactttcttttcgattccggaatctcccatttcaacaacgtgcaccaatggctcaatacaggcgaggcctggggctacacgtcttttgccaaccctcccaccgtcacgctgccccgactaaagagtatcacaacagggtccacccccagcttcattgacctgctgctgaacgtagctcaggacgtggactccaacgacctgtcggaacacgattcctggctgcaacagttcatccagcacaacaacacgatccgctttatgggcgatgacacgtggctgaaactcttcccacatgagtggttcgacttcaccgaccccacccactccttcttcgtcagcgactttactcaagttgacaacaacgtgacgaggaatctgccggagaagctattccaaaaatgggcccaatgggacgtggctattctccactacttgggtctcgaccacatcggccataaagatggcccgaattcgaagttcatgtccacgaaacaccaagaaatggacagcatcttgaaaacaatctacgatcaagtgctagagcataaaagtgacgacgacacgttgatttgtgttctcggtgaccacggtatgaacgaactgggcaaccatggtggctcttcagccggcgaaacttccgcggggctcttgttcttgtcaccaaagttgtctcagtttgccaagccagcatcgcaagcggagaatgccttgcccatcaatggtaccctgggcggtgattttcaatatttagagactgtgcaacagatcgatatcgtccccaccatagccgctctgtttggtatgcccatcccgatgaacagcgtgggcatcatcataccggatttcctacaactacttcctaacaaactggcaagtatgaaagagaacttcatgcatctgtggaggctgtctgaccatcaagaagaagcggttcttgacgatttagccattagtgatatatattcaaagatgtacgatatccaagaaactctaactaagtccgcaacaaactataactatccgctcttgtcattagcctttgtcagtttcctcatcacaacaatcattgctacttatcaattacaacgccattccggacacactttctgcaaattgcggacatcttccctctctgtattattggtttccataatactaggtgtttccacatttgcaagcagtttcatcgaggaagaacaccaactgtggtggtggatagtaacggcgttctccgcggtccctctcttcgtgtacaaactaaacgcgtccgtaatcacacgttggtttatattgttggcatgcgttcgtttgattaagttttggaataacagtggccagaaatttattcacaccaatgttatgtcaaatatacttagccagaacccctattggaaatggtctttgaatttgttgacgttcttaacactgattatggcgtctgctcgctcccaattgttacattttatcatgtccactattttagtcggattgtgtttcatatacaaaatttcatgggaaattgtaaacggtgatcaggctgagataccactctttatgcaagatttgctgactaaaattgactttgtcccaagtgaaagtaatctgattacattggcgcgtgttttcttccaggcttgggccattgttgtcatttcaagattagtattgactaaattgaaggtcttagaccaaaggtacctaattagagatatgaaactatacgtgacaatcttgttgattttacaaacatcgtctcaaaatattggccaattcctcgttttccaaattttacaatcacaaatttgctactttttcaaaaatttccccatctcatcatcaactaataagatttacctgtcaaatttagtttcgttaattctacaaaatttctcgttcttccaattcgggggtacaaattctatttctaccatagatcttggaaacgcataccatggtgtttcttccgattataacatcgctgtagtgggactactaatgtccattgcaaatttcgcgccagcaatttattggtccatgctaccatggtcaataaattatgggccttccccgtcgcaaaataaattacaaacttttgtcaagagtaaattaccaactttcacctaccactgcatttttggaacttgcttgatgacggcatgtatccttttaagatttcatctttttatttggtccgttttcagtcctaaattgtgttattttctaggttggaatctcgcgatgggattgctaaatgggtggatacctgaattgactgttatattggctctggattag

SEQ ID NO: 1378 - DNA, 2157 bp, Saccharomyces pastorianus
atgccccaatccgatagcttagctgcattgcccatttttcaagcatcgctttcagcgaggcaaaccccacgttatatcttcagttcccacaatggaacaagattggttgtcattcaagataatataataagatggtgcagttcgctcaccgatccatcctaccaaagcttgagctttagccgtcacttggttttggacgacacctttcatgttatatcttgtgcgtctggcgatttgctctgtttctataacggtcaagagatctttgtaatggaaattccctggggctattcaaatgtagaggacgtttccattcaagacgcattccaagtatttcactactctattaatgaatcggaactcggttcaaattctttgatcaagaaagtcctatttcatccgaagagttacaataattcctgtatagtggttctaaaaaaggatgataccattacaatgttcgatattctcaatcaacataagaggccgattgttctgaacaaatgcaatagctcatttggtttagatgcacgcgtaaacgacatcacggatttggcattcagtaaagatgggttgacattgtactgtttaaacactacagaaggtggcgatatctttgcactttacccatttttaccttcagtactatctttgagtgagaaagatttgggttggatcttaaataaatcattagtgatgtacgagtctttgaattccacgacagattataaagtgaaaagaaatatcactaaacaattgcaatttgtttctaaactacacaaaaattgggattccaaacttgctaaagtccaaattgatgatgaatatcgtttgatgaagatgcaagggccctttaccataaacccctttcctaacgagttgtatgattatacagcatcaaagatcacaaccataccgattgacaatgagcagagtgaaattatttgtgtcagttttgatgacgggtctcttattttgttatttcaagatttagagatgtcaatgtcatgggatgtggacaactacgtctataataattcgttgattttgattgaacgaacaaaattacagcaaaaggagatgaagtgtctaacaacattaccagatcaattggggaaattgtacgtgactttcaaaagctctgtacatcaactggactgtacaagctggacttccgtattgagtaaatgtatcgatgaatccgatttaaatgcacttgcagatgtgaagtttgtaagtaattttgaagatatcgcaaccattgaacaactctcaaacttcgcttatatcaactggaataacaagtccagtttggctttgatatcaaaagaaaagttaactattcaaaacatatcaagtcacaaggaagagcaaagtctcaacgactctgccgcacttggtacaaacgagtactcggacaagagtgatacaggaaaacgcggttatgagataagttttacccaacccatcaacgaaattctttcgttaaatgaaagttttcaaaaagtttgtctaagcccatgtgaaagaatcatccctccagcagatcgtcaattacctttgaaaaatgaagctaatgagaaccagctagaaatctttaccgatatttccaagaaatttttacaaaaaattatcaaagcccaatctttgggtgtctctatacacaacagaatacatgagcaacagtttgaactaactcgccagttacaatctacgtccaagataatcgctaaggatgaagttttacggaagaaacttgaagcacaaactaaaaaatgggactctcaaagtagcaggcaagcaaaactaatggttagatttagcaaattaacccaaaacctttccaagattgccgaatccgataaattcaaggaacagaatataagccacggtgaaatggagtggttcaaagaaatacgtaatcaaatactgcagtttaacggttttgttcactctcaaaaatctctacagcaagatctatcatatttgaagagggaactgattcgtatcgagtctgaaaccgccagtgctgataaaaagagccaaaacgaatgggacgaactgcgcaagatgctggaagtagattcaaaaatcatcaaagaatgtaacgaagaactggtgcatgtatcccaacaactcaccactaagacacaatga

SEQ ID NO: 1379 - DNA, 1335 bp, Saccharomyces pastorianus
atgaaacaacgctttatccgtcagctcataagcaaaatgtctaccggaaaaccgaaaattgtcgctaacaagtacttcacttctaacacagctaaggatgtttggtcattgaccaatgaagctgctgcgcaggctgccaataactccaacaaccaaggtcgtgaactgataaacctaggtcaaggctttttttcgtattcccctcctcaattcgccatcaaagaagctcagaaggccttagagattccattggttaaccaatattctccaactagaggtcgcccgtcgttaatcaattcattaattgacatgtatactcccatttataatacagaattgaaagctgagaatgtggtcgttaccacaggcgccaatgaaggtattctttcttgcttaatggggctattgaatgctggtgatgaagttattgtttttgaaccattttttgatcaatatattccaaatatcgaactatgtggaggtaaagtagtgtatgttcctatcaatcctccaaaggagttggatcgaagaaataccagaggtgaagaatggaccattgatttcgaacaatttgaaaaagccatcacctccaagacaaaagccgtcattatcaatactcctcacaaccctatcggtaaagtttttactcacagcgaactaactactttaggtaacatatgtgtcaagcacaatgttgctatcatttctgatgaagtttatgaacacctttatttcacagattcatttacaagagttgccacactttctccggaaatcggacaattgactttgactgttggctctgctggtaaatcatttgctgccactggttggagaatcggttgggtcgtatccttaaatgcagaattattaagctatgcggcaaaggcgcacacaagaatctgctttgcatccccgtcaccattacaggaagcttgtgcaaactctattaacgacgcattgaaaatcggttatttcgaaaacatgagacaagaatacatcactaaattcaagatcttcacatcagtgttcgatgaattgggcttgccatacactgcacctgaaggctcatattttgtcttggttgatttctcgaaggtcaaaattccaaaggactatccatatccagaggaaatcatggataagggtaaagatttccgtatttctcattggttgattaatgagctgggtgtggttgctattcctcccaccgaattttacatcaaagagcacgaaaaggctgctgagaacttgctaagattcgcagtttgcaaagatgatgcttatctgaaaaaggctgtggaaagattgagactactaaaagactacttataa

SEQ ID NO: 1380 - DNA, 1224 bp, Saccharomyces pastorianus
atgagagaggaatcccgccgggtgtattgctacttttggctcttcggtttgatcaataatgtactatatgtggtgatactttcggcagctgtcgatatcgtgggacctactttacctaaatcgttagttctattggcggatatactcccatcgctgacaattaagttatgttccccgttctttattgataggattaagtatagctacaggatatggtccttgattttgctgagttgtttagggatgttcttagtttcttttaaaaacttgttcgtctgtctcttgggaatatcgtttgcttctctatcttccggatttggtgaagtgatattccttcaattaacgcatcattataaacaaatttcgttgaatggttggtcctcgggtactggtggtgctgggattcttggaggggcatcctatatgattttaacctcgatttttaaagtcccggtaaggttggccttgttggtatttagtatcctcccgtttgcatttttgttctacttcaaattagatgccaatggtaccagctcgatatatcaaagtgtccgacaacttgatgaagccgaggacgaacaattggagccctctactgtcacgttgacacacacaaacgcttcccaatccttatataactccaggcagcacatctttcaaacattcaaaaggcttcggagattggtacttccatacgtgcttccattaaccactgtctatttgttcgagtatttaataaatcaggcagtatctcccaccttattatttccaattgattcaaaggagaataagtccatgccctttttttttcataagtacagagatatgtatgttacctacggaacactataccagttaggtgtcttcatatcaagatcatttgggcacttgataagaatgagaaatttatacattctggccttcttacaaggttcgaatttatgcataacaattttacaatcatggttctatgtggttcattcgccctggtcggtgatgatattaatattctatgagggttttcttggtggtgcatcatatgttaatacatttttaaatattttggaacaagagaagcccgaagaaacagaatttgccatgggtgctgtgtctattgcagattcatttggcgttttcttggctgccctgcttggtttgggcctagaacctaagctttgtaagcaccaggtttctgataatagaccttggtgtagaatggaatga

SEQ ID NO: 1381 - DNA, 1629 bp, Saccharomyces pastorianus
atgataggagagggtgtgatctctcgagaaaacacacctaaaatgatgctgcaccctgttcatagcgaacagtaccttagcgtacaaccggcgatgccaactaaagatttccatacatcaagtgaaattatcagtcaaacacttgtagacacaacaagtgatgacatttactctgtcaagaatttgaaaggctcaaggaaccctgtcagccctagtatttcaaatatcggattccaatctatcttccaaacggcagatcatccacgatccaagttcagtgtggcctctaacgattccctaaaaagtaatgacgaagtgtctgcgatatcgggcaggtccaaatcatctcaaatcggagagattaaaactactgatacaaaggaatattcgaacaatttagctaaacaattatcaactgatgcaatgtctgttggtcagaaaagtttacactctacatcttccagcaactatataaaaagaaaagcatctggttttttaagtaggaggggcagggcacatacggccatctcatcagatcctgcgtcgtttctgaccactttaagcactttgcataacaattcccattcattccgcaatgtaatcaagaacttcttccaaaacaaaaaccacaggcacataggtcaagatactatagagccagccattcccaactctttgagtaaatttttgcattcttcttacggaagacacaagtcgccatcgcaatttatccatactaacgcagaacagcttgtaaactcaggaacctccgtttactctttgaatgtgaatccatcctgtgccaattccaactccattattgtagatccgttttctgaaatagatcccacgtcaccaaaccctgtctccatgttgcatgatctcttaagaaacctatcgtctttggaagccaattataaacactttaactctcaagaattgacaacacttaccaataacatttggaatatattttgtagtaatgtagcagagctattcaggacccaaagaatatggaaacttcgggcaaaaatagaagatttcaatgaagttttggaattttattgtattttaaaaaccgatccaagagtttccaatggtggcatgaatagaatcgttagtgatttggaagagtttttagtgagctcactatacaatttggaaaaccaaattgttttcaattattccaatgaagatacaataaataacgcgctgaaaaggctgggtgttatatggcgcatattttatcaagaagtgtattatgatttggcagctgtgttattaccattagatcggaccattagcgacgatggtgactccacgatgttgaaattgacaaatgaaagccgggtacatattggctgtgatttttccattggttttcttttactcaagtgttttagagactctatagttttgccttgttatgaaaacttcgtgactagcaacgatggaataagtagaagttttcaactttacattttcaatcaagaagaagaaaacagcgtcactgaaacggataagttgacattgttacagtgttttggtatattaagcactatccaaagtgcggatagaaatcaatggattattgatgaattgttgacaggcattagaatgagtatataa

SEQ ID NO: 1382 - DNA, 2004 bp, Saccharomyces pastorianus
atgagtttggtaccatatgaagaaggctcattgattttggacgaccctaattctaaatctgtagtggttgtcaatccaacctcaggaacactatcattcttccaacaggacaatggcagtgacggcccagaaagtaacgaggatctgactgcgtcctcatcagcactggacttttcctcaggggttcatcatttcaaaggcccgatagcttcttatatctgtccccaatgtggtacggaaatcaaccctgacataatgaatagaaggcaaatccatcgccgggcttccagtggtatagaacaggaaaatatcaggcttggaagccaagaaaatacaataccacttgggtttgaatttgccaattctagtttttcaaagagatatttccagttattagagagaaatcatcggcattatgtcttacaaaacgatccaaacaataaagagaggcaatatggtaaaagcaaatacttcattccagacgaattgtttattcctgggtacttccgcaaattctttaatatattatctctactgggaaatggcgcaagaggatccgtctacaaagttgtacacaccatcggcaatactgaactaggggtctttgcactaaagaaaatacccatcggaaacgatatggaatggttcaataaatgcatacgagaggtgaaagcattgagttcactcacacacaagagcgctaatctaattacatataatcatgtgtggctcgagatggattcagcagtcgggtttgtaagatctgttgatgggggtcaatctgattcaaaagaagaaattccatgcatatttatcctacagcagtattgtagcggcggtaatctagaagactgtattttaagaaatgtcttcgataaatttccagataccgaatcacctgaagaaagaaagaagaaattcagaacccgtaagaagaaccacggcaaatcagcagacattggtttatctactgagcaacttgtgtcaattataagagacatagcaagaggattacacgaactacacagtattggtctgatacacagagatttaaaaccgtccaattgtttattgctaaattcgttcaagaatgatgatgaagataatgaaacacacgaagagggaagtaactcggaacagtatttcccatctgttgtgatcggtgatttaggggaaagtcagttggaaggagagtctagattaggcactggctgtaccggtacattggagttcacggcgcctgagctaattattcagggaggaaccacatcttcaccagccttgccttcacgattgatccatacctacaatgagtacacatttgcttcagatatgtattctttgggtatgatttgctactttatcgtctttggtgaactaccctttgagcctcaactggatatcattgacctaaaagcacgcatcaaacattttagatttgatactgaaagtatgatcgcaaaacatcaagccatgaaattgaaaccagtagattatagaatctttcaactaatggatgctcttttacaaccaaataacgatgtcagacccactgcaaaagcagtggaagacatgttagatgaaatgctatcaaactctaagccaggaaaaaatttctggaaagataataatgacagcacgttaaatttcaccaccatatctgaactaaatgagaccactaacagctttactgatgattttgttgaggatgacaacatgacattatcattaccagcaccggaaggggatctaagcgccgtatcgtcagcaaaagtaaacacatcctctgttatagagaggtcagtacagttttgctacaaggtgatttctatactttcaaccattattgtttttaagtcaacgaaaacggggtcttggctttcgtacacgtcattggtaatattgggaatggtttttaaatctcccgttgatgaaagaagcagacatgtaagggctctcggtttactggcacttatagccatactcaagaaatacatctattaa

SEQ ID NO: 1383 - DNA, 1146 bp, Saccharomyces pastorianus
atgagcatatttttcaagtcgccaattgatatcgagattttgttcgataatgaggaatctcgcaaacatgtagatatcgcatcaaggtcaagcagttccagttacaaatccatgaaagagagcttgcccgtttatgaagatggcgaatccttgggcgggattgtcaccttgagagttcgggatggcaaaaaggtagatcacttaggtataaaagtgtccgtcattggatctattgacatgataaaatcgcacggtagtggtaattcttcctcgaagaaatctacatcttccacctcatcttccacctccaataatggttcatcagatatacggaagaattccgttgaccagtttttgtgccagagctatgacctttgtcccgctggtgagttacagcattctcaaagctttcccttcttgtttagggatttaagcaaaagatacgaatcttataaaggcaagaatgtggatgtagcatattttgtcaaagttaccgtgatgagaaagtctactgacatttctaaaataaaaaaattgtgggtctacctttataatagtatagccacggcaccaaatgccctctctacaaatgggccacaagcaaacttcaacagcgctagtgccgatggtgaagacggggctagtaataagaacgacgcaacgccgaaaaaggatggcccagttgaagccgcagatgataatcaagtcttgccggcaccacattccaccaatgaacccaaaccagttaaattagacatcggtatagaaaactgccttcatattgaattcgaatatgccaaatcacagtatagcttgaaggaagtcattgtaggacgtatatattttcttttaacgagactaaggataaagcacatggaattgagcttgatcacaagagagtcctctggcttacaaacctctaatgttttgacagattcaacggccatccggtatgaaatcatggatgggtctccggtgaaaggtgagaccattcctatcagattgtttttgagcgggtatgacttaacgcccaatgtgagctgtaattactttaacgtcaagaactatttgagcctggtcatcatcgatgaagacggaagaaggtatttcaagcaatcagaaattacattgtaccgtacccgatga

SEQ ID NO: 1384 - DNA, 999 bp, Saccharomyces pastorianus
atgatcagaattgctattaacggtttcggtagaattggtagattggtcctaagattggctctacaaagaaaggacatcgaagttgttgccattaacgatccatttatcaccaacgattatgctgcttacatggttaagtacgattctactcacggtagatatccaggcgcagtttcccatgatgccaagcatatcatcattgatggtcacaagatcgcaactttccaagaaagagacccagctaacttgccatggggttctttgaagattgatgttgccgtcgactccactggtgtcttcaaggagttggacagtgctcaaaagcacattgacgctggtgccaagaaggttgttatcactgccccatcttccaccgctccaatgtttgttgttggtgttaaccacaccaaatacactccagacttgaagattgtctccaacgcttcttgtaccactaactgtttggctccattggccaaggttatcaacgatgccttcggtattcaagaaggtttgatgaccactgttcattccatgaccgccactcaaaagactgtcgatggtccatcccacaaggactggagaggtggtagaaccgcttccggtaacatcatcccatcctccactggtgccgccaaggctgtcggtaaggtcttgcctgaattgcaaggtaagttgaccggtatggctttcagagtcccaactgtcgatgtctctgttgttgacttgactgttaagttggaaaaggaagccacctacgatcaaatcaagaaggccgtcaaggccgccgctgatggtccaatgaagggtgttttgggttacactgaagacgctgttgtctcctccgacttcttgggtgacactcacgcttccatcttcgatgcttccgctggtatccaattgtctccaaagttcgtcaagttggtctcctggtacgataatgaatacggttactccgccagagttgtcgacttgattgaatatgtcgccaaggcttaa

SEQ ID NO: 1385 - DNA, 3210 bp, Saccharomyces pastorianus
atggattctaccgatcttttcgacgtgttcgaggaagccccggctgaactccctacggataattatgaagaaaaaaatgccaataccaatgtggaagatagcctggatatccttcaggaaaagaaacatgacctcgaagaagaagaagatcttaatggcgataacaagaaaattagagccaataagagtaaaacggaagataagagcaaaaagcctgttgtgccagttttagcggattcgttcgagcaagaagcctccagagaagtggatgcatccaagggactaacgaattctgaaactttacaggctgagcgagatggtaaagtcagattatcgcatcaagttcgtcatcaggtagcattaccaccaaactatgattacacgcctattgctgaacataagagagttaatgaagcacgtacttacccatttacgttggatcctttccaagacaccgcagtctcgtgtatagatagaggtgaatccgttttagtttctgcacacacttcggctggtaagactgttgtcgctgaatatgccattgcacaatctttaaaaaacaaacaaagagtcatatatacttctccaatcaaggctctatcaaatcaaaaatatagagaactattagctgaatttggcgatgtaggtttgatgaccggtgatattacaatcaatccggatgcaggctgtttggtcatgaccactgaaattttaagaagtatgttgtatagaggtagtgaagtcatgagagaagtcgcttgggtcattttcgatgaagtccattacatgagagacaaagaaaggggtgtcgtgtgggaagaaacaatcattttattgccagataaggttcgttacgtgttcttatcggccactatcccaaatgcaatggagtttgctgaatggatctgcaaaattcattctcaaccatgtcatatcgtctataccaacttccgtccaacacctttacaacattatctgttcccagctcatggagatggtatttatttggttgttgatgaaaagagcacttttagagaggaaaatttccaaaaggcaatggcttccattagtaatcaagtaggtgatgatccaaactctacggactcaagaggtaaaaagggacaaacatataaaggtggttctgctaagggtgacgcgaagggtgatatctacaaaattgtcaaaatgatttggaagaaaaaatacaacccagtgattgtattttcattcagtaagcgtgactgtgaagaactggctctgaaaatgtctaaactagactttaattctgatgatgaaaaggatgcgctgactaaaatcttcaataatgccatcgcgttgttaccagaaaccgacagagagttgccccaaattaagcacatcttgccattgttacgaagaggtatcggtatccatcattccggtttactacctatactgaaggaagtcattgaaattctatttcaagaagggtttttaaaggtgctgtttgcaacagaaactttttcaattggactaaatatgcctgctaagacagttgttttcacatctgttagaaaatgggacggtcaacaattccgttgggtttcgggaggtgaatacattcaaatgtccggtcgtgctggtcgtcgtggtttggatgatcgtggtattgtcattatgatgatcgatgaaaagatggagcctcaagtagcaaaaggtatggtcaagggtcaagccgatagattggattcagctttccatttaggatataacatgattctcaatttgatgagagtagaaggtatttctccagaattcatgttggaacactctttcttccaatttcaaaatgttatttcagttccagtcatggaaaagaaactcattgaattgaaaaaggagtccgatgatattgaagtcgaggatgaagaaaatgtgaaagaatattacgagattgagcaagctattaagggttaccgcgaagatgttcgtcaagttattacacatccagcaaacgttttaagtttcctacaaccaggtagattagttaaattatccgtcaatggtaaggacaactatggctggggtactgttgttgattttgccaaaagaattaacaaacgtaatccaactgctgttcatacagaccatgaatcatatattgtcaatgtggttgtgaataccatgtacatagactctccagttaatttgttaaagcctttcaacccaacattcccagaagggattcgtccagctgaagaaggcgaaaagagcatatgtgctatcattcctataacgttggattcaatcaaatctattggtaatttgaggttatatatgcccaaggatatcaaagctagcggccaaaaagaaaccgttggaaagtctttgaaggaagtgagtcgcagattcccagatgggatccctatgcttgatcctatcaaaaacatgaagatcgaagatgttgactttttgaagctgatgaagaagatcgatgttttgaacgcaaagctgtcttctaatcctttgactaactctatgagattagacgagttatatggtaaatacagcagaaagcatgatttgcaaaaagacatgaaacaattaaagcacaaaatatcagaatcacaagctgtcatccaactagatgaccttcgtcgccgtaagagagtgttacgtcggttgggattctgcactcctaatgacattattgaactaaaaggtagagttgcatgcgaaatttccagtggtgatgagctattattaacagaattgatctttaatggtaacttcaatgaattaaaaccggaacaagcagctgccttgttatcttgttttgcatttcaggaacgttgtaaagaagcacctaggttgaaagcagaattgtctgaacctttgaaggccatgagagaaattgcagccaagattgccaagatcatgaaggattccaagatcgaagttgtggagaaagattacgttgaaagtttcagacatgaattgatggaagttgtttatgaatggtgtaaaggtgctacatttacgcaaatttgtaaaatgactgacgtttacgaagggtcgttgatcagaatgttcaagaggttagaagaactggttaaggaactcgtggacgttgccaacactatcggtaactcctctcttaaggaaaagatggaaactgtcctgaaattaattcatagagatatagtttccgctgggtctttgtatttatag

SEQ ID NO: 1386 - DNA, 1905 bp, Saccharomyces pastorianus
atgttgtctttgaaaaagggaatagcaaaatcacacatactgcaaagagcgttttcctctttttctgtcattcgtcaagttcaggaactcaagagcggaccggatttagatgccaaatatcacataattgaccatgagtacgactgtgtggtcgtgggtgctggtggtgcgggactaagagcggcatttggcctagccgaggcgggatacaagaccgcctgtatatccaagttgtttcccacaagatcgcacactgtggctgcccaaggtggaatcaacgctgctttgggaaatatgcatccagatgactggaaatcgcacatgtatgacactgtcaagggctccgactggctaggagaccaagatgccatccattatatgacacgcgaggcacccaaatcagtaattgaactggaacactacggtatgccattttcgagaactgaagatggaaaaatttatcaaagagcgtttggtgggcaatcaaaagattttggtaaaggcggacaggcctatagaacatgtgctgtggcagataggacaggccatgcaatgcttcacacactgtatggtcaggcgttaaaaaataatacgcatttcttcattgagtacttcgctatggatttgttgactcacaacggcgaagttgtaggcaccatcgcctacaacgaagaagacggtaccatccacagatttaaggcgcacaaaaccatcattgccactggtggatatggaaggtcttacttctcttgtacctctgcccacacttgcacgggtgatggtaatgccatggtgtctcgtgctgggttcccgttagaagatttagaatttgttcagttccatccttcaggggtttatgggtctggctgtttgatcactgaaggtgcccgtggtgaaggtggctttttactaaattccgaaggtgaaagattcatggagcggtatgcccccaccgccaaggacttagcaagcagagacgttgtgtccagagccatcaccatggaaataagggctggtagaggtgttggaaaacacaaagatcacattcttttgcagttgagtcatttgccaccaaaggtgcttaaagaaaggttgccaggcatttctgagacagcttcggtatttgcaggcgtggatgttacacaggagccaattcccgtcttgccaacagttcattataatatgggcggtattcctactaaatggaccggtgaggcattgacaattgacgaggacactggcgaggacaaggttatcccaggcttaatggcttgcggagaagctgcttgcgtatccgttcatggggccaacagattgggcgctaactcgttgcttgatttggttgtttttggccgcgccgttgcaaacactattgctgacacattacaacctggcttgccccacaaaccattaccttcaaacattgggcacgagtcaatcgctaatttaaacaaagtgagaaatgccaatggttcaaaaaatacctcgcaaatcagattgaatatgcaaaagacaatgcaaaaggatgtttctgttttcaggacgcaagaaacattggatgaaggtgtcagaaacatcaccgaagttgataagacgtttgaagatgtacacgtttccgacaaatcaatgatctggaactcagatctcgtggaaactttggaattgcaaaatttgctaacttgtgccacacaaactgccgtctctgctgcagcgcgcaaggaatctcggggcgctcatgcaagagaagactaccccaacagagatgatgaaaactggagaaagcacacactatcttggcaggaaggaacaacagcacctgtcaaaatcaaatatagagatgtgattgcgcatacattagatgaagatgaatgtgcctcggtcccaccagcggttaggtcctattga

SEQ ID NO: 1387 - DNA, 666 bp, Saccharomyces pastorianus
atgagattccagtttttcatacacttttactacatcatcatcgtatttgcaagtagtaatacagcgcaacattttaaagacacaggggtcaggttgattacatcgatgaaagatttggacaataatacgacacatgcagaactggtagcagaaaaaatcccaattattgaggagcagttacacaatgtcagcacaaagtatgagcatcatgtttttattctgaaggggctagaagcagtcttaaaccgcaaagtagaaagtttgaccattaatgggactgaatcgctcgatacagaatttgaaaaagtggaaaagtcacttgatatggccttgaatatctcgccgttcgaatatattagaaaattcaaggagctgtccaaggaaaaggtggtcgaagccctagaggacctcaacagagaacagaatcgggtgattataagcggtaatagagaagaagaagaagaagaagaaaaggcggcaaaagaaaaacgcaagcgtttagataaaataaaaagaattttgacggtaagtctattagaactaggtctagctcaaggcgttgctgatttatgcgcattggcgcccttcgcatgtcttcttggggtaacagttggaagtgttggatttatattttggttggcattgatatataaagctattcagtag

SEQ ID NO: 1388 - DNA, 1272 bp, Saccharomyces pastorianus
atgacagacaaaagcagggaggactcaacaactaaggctaaggacaaagtcagagggaatccagagaagccaccatattggtttgagatcattgtttctgatccgcagaaaagaacaggagacccgggctcttcatctggttatgtgagttatcaaatatcaacaaagaccaacaacacgtcattttatgacaatcgtggcaactcagaatctatcattgtcgttcatagaagatacagtgacttgctgctacttcatgatattttactgaatgaatttcccacctgcatcatcccaccgttacctgataagaaggtttttcaatacatagcaggcgatagatttagtcaaagatttacacaaaaaagatgccatagcttacagaatttcctaagaagggtatctttacatacggatctttctcaatcaatggcttttaaaacctttttggtgagtaaagactgggaatctcatcgcaaagtgcttcaggatagtttacaagttaacaaagatgaagtcactgatgccttcatgaatgccttcaaaacagttcacaagcaaaatgacgagttcacagagataagagaaaaaagcgataaactagatcgaactgtaacgaaaatcgataaactatttcataaagttgtaaagaaaaatgattcgatgtctgaagattatactaagctgggcaccaacttgcaggaactacaagaactagtcacaggtgaaaatgaggaacttgctgagaaattgaagattttcaacgaaggggtaacacaattgtcctacggtttacaagaccttacgaaatatctagattacgagtacattgttgatttgaaagacctcgaacactacatcgatagtatgcgacaactgatcaaactgaaggaccaaaaacaaatagactacgaagagctgagtgattatctaacaaggtcaataaaggaaaaaaataatttaatctctggttacggtggaagtaatttttttgctaataaattagaggaattagcaggcataaatcaggaagcttcacgcagagaaaaaatcaataaattagaaagcaagataacatccttaacgggcgaattagagaatgccaaaaaggtagcagacggatttgaacaagaatgtttgaaggaaatagaccattttgaaaacgtgaaaaccaaagaaatcaaggaatctcttggatcactagcagaccatcatatcgaattttacgaaagaattctagaagcatgggaaaaagttgatgacagtttatga

SEQ ID NO: 1389 - DNA, 753 bp, Saccharomyces pastorianus
atgcagcatgtcgagcatatgaatactgcggtccgtttggccaggtacgcactcgatcacgacgaaacgccggtagcttgcatcttcgtacatacaccaactggacaactaatggcctacggcatgaacgatacgaacaggtccttgactggggtggcccacgctgaattcatgggaatcgaccaaattaaggggatgctggggtcccgcggagtcgttgacgtgttcaaagacattactctgtacgtgactgtagaaccatgtataatgtgtgcgtctgcccttaagcaattgggaattgggaaagtggtgtttggttgtggtaacgagaggttcggcggtaatggtactgtcttgccggtaaatcatgatacgtgtactcttgcgcctcgggggaatgctgcaacaggctacgagagtgtacccgggatcttgcgaagagaagccataatgctgctgaggtatttttatgtaagacaaaatcaaagagctcccaagccacgatcgaagagtgatagagtactggataagaacacgtttccaccgatggaatggtcgaagtatattgacaaagagtcattcatagcaaattttggcgaagactacaaggcgtattacgaaaatggggctgatttgcttggtgataatgtagattgggacttgattgaatctcatcatgataatattattgagaaactggatagccagtgcgaatccttcaaattaaatgtgcacaagaaatctagagtttaa

SEQ ID NO: 1390 - DNA, 2052 bp, Saccharomyces pastorianus
atgtttttcaacagattaaacgccggcaagttgctggtaccactaaccgtggtcctgtatgcacttttcgtggtgatattacctttacagaattctgttcattcctcgaatgtcttggttaaaggtgctgatgatgtcgaaaactatggaaccgttattggtatcgatttgggtaccacttattcctgtgttgctgttatgaagaacggtaagactgaaattcttgccaatgaacaaggtaatagaataactccatcttacgtggcttttaccgacgacgaaaggttgattggtgatgctgcaaagaaccaagtcgccgctaacccacaaaacaccattttcgacattaagagattgattggtttgaaatacaatgacagatctgttcaaaaagatattaagcatttgccattcaatgtggttaacaaagatggcaaaccagccgttgaagtcgctgttaaaggtgaaaagaaagtcttcactccagaggaaatttctggtatgatcttgggtaagatgaaacaaattgctgaggattacttgggcactaaggttacacacgcagttgttactgttccagcttacttcaatgacgctcaaagacaggctaccaaggatgctggtatcattgctggtttgaatgttttgagaattgttaatgaaccaactgcagccgccattgcctacggtttagataaatctgacaaagaacatcaaatcatcgtctatgacttaggtggtggtactttcgatgtctccttattgtctattgaaaatggtgttttcgaagttcaagccacttccggtgatacccatttgggtggtgaagatttcgattacaagatcgttcgtcaattgttgaaagctttcaagaagaagcatggtattgatgtttccgataacaagaaggctttagcaaaattgaagagagaagctgaaaaggctaaacgtgctttatccagtcaaatgtccactcgtatcgaaatcgattctttcgttgatggtattgatttgagtgaaactttaactagagctaaatttgaagaattaaacttggatcttttcagaaagactttgaaacctgttgaaaaagttttggaagattccggtttggaaaagaaggatgtcgatgatattgtcttggttggtggttctactagaattccaaaggtccaacaattattagaatctttctttgatggtaagaaggcctctaagggtattaacccagatgaagccgttgcattcggtgccgctgttcaagcaggtgtcttgtctggtgaagaaggtgtcgaagatattgttttgttggatgttaacgctttgactcttggtatcgaaaccactggtggtgtcatgactccattgatcaagagaaacactgctattccaaccaagaaatctcaaattttctctactgccgttgacaaccaaccaactgttatgatcaaggtttacgaaggtgaaagagccatgtctaaggacaacaatctattaggtaagtttgaattgactggtatcccaccagcaccaagaggtgtcccacaaattgaagtcacatttgccctagacgctaatggtatcttaaaggtttctgccactgataagggtaccggtaaatctgaatccatcacaatcactaacgataaaggcagattaactcaagacgaaatagacagaatggtagaagaagctgaaaaatttgcctccgaagatgcttctatcaaggccaaggtcgaagccagaaacaagttggaaaactacgcccactctttgaagaaccaagtcaacggtgatttgggtgaaaaactagaagaagaagacaaggaaacattattagatgcttctaacgacgttttggaatggttagatgacaacttcgaaaccgccatggccgaagacttcgatgaaaagtttgactccctatcaaaggttgcttatccaattacctctaagttgtacggtaacgctgatggctctgctgctggtgattatgacgacgatgaagatgaagatgacgatggtgattatttcgaacatgatgaattgtag

SEQ ID NO: 1391 - DNA, 591 bp, Saccharomyces pastorianus
atgtcacagtcaatatcgctgaagggttcaacaaggacagttacggaatttttcgaatatagtatcaattccattttgtatcaaagaggcgtatatccagcagaggattttgtaacggtaaagaagtacgatttaacactactaaagacacacgatgatgagctgaaggattacattcggaaaattctcttgcaagtccacaggtggcttctgggtggcaaatgcaatcagttggtattgtgcgttgtggacaaggatgaaggtgaagtagtggaaaggtggtcctttgacgtgcaacatttcccaagcaatgaccaagttcaagaggataacgtggatctgagtacaacgcagacacaaatcagagctttgatcaggcaaatcacctcgagcgttacctttctaccggagctgacaaaagagggtgggtacacttttacagtactagcgtacacagatgcggatgctaaagttccgttagaatgggcagactccgacagtaaagaaatacctgatggtgaaatagtccagttcaaaaccttttccacaaacgatcataaagttggcgcacaggtaagctataagtactag

SEQ ID NO: 1392 - DNA, 3486 bp, Saccharomyces pastorianus
atgagcgaacccgaggtgcctttcaaagcggtggctcagttcccttacaagtcagattacgaagacgatttgaattttgaaaaagatcaagaaattactgtgacctctgtcgaagacgcagaatggtattttggcgagtaccgagactccaatggcaacaccgttgaaggtatctttcccaaaagttttgttactgtgacccaagcgcctgagaccgcaaaggaagctgaatcgcctgcgattgcagctcccacacagtcacacaccaccgagcttcatgtagaatcggaggcttctactgagcccggtgaacctgaaacaaaaacagaagctttgccatctgtacctgtgccagcggcagtttgccatgatctgcccacaaataacgaaagaagtgttcctatggactctccgaaattgaaggcgcgcttatccatgtttaatcaagacatatctgagcaagctcctctaccaggagcgagtcactttgatttggagaacatacctgtgaagaagacagttgtggctgatgcccctaaattctacgtcccccctggaatcccagccagtgataagtccgatttagaaaggaaaaagtttttaaaggaaaatgaaggaaagaatgttcctgagccaattaatcgagctcaagtggaaagtggggaacttgagactgaaaatgatcaattgaagaaagatcaacctaaaatgagtctgaaagaaagaattgcgctattggaagaacagcagaaattacaagccgcaagagagaaagaactgttgaaaaaaaaagctaaacaagaacaagatcaggaaagagtaccaggtaacggaagtgaacccaatatagaaactgaaggaaatgaagaaccaaatgaaaaaaccggacctaaatctgaacccgaacttgaaaccgaacatgttcatgaatcttatgtggaaccgctagcacacaaagaaagcgtacagacctctattagtgtgggtgcagacatgagtgatacagagagtgagcaagttatagatcaatacaaggaggaatacgagaaggatgaagcccagtacccgcaacgggatgaaccaaacagggagagaattgctgaagagaaagagatagaacatgctagcgaagaagaagaggaggaaaacgaggaagatgaagaggatagtgaagaaaatcgcagagcggcattgagagaaagaatggctaaactttcaggggctggtagatttggtgcacctgttggcttcaatccatttggtatgagctctggagttggcagtaatgcatcagaagaacccaaaaaagccaaaaagaaagaagtcaagcatcaagaagcccaacaaatagaagagctgcccaccgctatacctgttatgccttttgctgatccaaactctaatccattctttaaaagatcaggaccaacagaggaacgcgaatctccagaagaaaaaacgttggacccacacgtcgtagagaacgaaccgaagcgggagcatggcacgcacgtctataaggatctagccgtgggtgaccatgcacattctaataactttgacagtgactctgaagaagacactgataacgatcatgactttgaagatgcgatcgacggcctgaaaagaaattcacttgtggggcaaggttccctaggaagcaatgttgagccaaccagctcaacctccggacaagaaatttatcctcaaataccccctacgccccaccatgctacagggattgtaccaaattccgtgagcctggagaaacaaaaaacgatcgatgaattaccagtctctcccccaagaccaggagtcgcccgcaacgagtcgataaaaactttcactaattcccttccagggcaacatagaaaggcatctgaaaatgaacataatgacccactttcaaccgaaccacctccattaccaacagctgctccaaatatcccgttctccatgccaccagctccaattataagccaagattcagctgcagagaatgtgctaccatctccttcagcatctccttctcctccttctcctccagcacctccagcacctccagcacctccagcaccatcagcaccatcagcaccatcagcaccatcagcaccatcagcaccatcagcaccatcagcaccatcagcaccatcagcaccatcagcaccatcagcaccatcagcaccatcagcaccatcagcaccatcagcaccatcagcacctccagcaccatcagcacctccagcacctccagcacctccagcacctccagcacctccaacaccatcagcattttctaaacataacaaaatagaagagcaagtacatgttcctagaccatcgggtcctcctccacctcccgtacctgcggaatatcagacgatgcccaacaaagcggctccgccacttccaaatgctccgccagtcccacatagtgtctctggatatacagtcaacccaccgaatgcacatgaggtcacaacacgtactgcccctcctccccctcctccacatgttgcaacttctccacctctggcaccaggtgcaaaatcacccccctccactcaactcccacctcatacagagagggagccaccagcattacctcctatcgtacctttagcgaaaaacagcacaatagaatccttccatcagtccacttctcctaacatgagctctgtgagaaggtcaacgacacatgacctgggcgatatgtccactaatacaaaaatagattttaatccgcaggaaaggtggtggattaacaaaactgtgccttccgctataagcaatttgaagttgaagtttttaatggaaatcgatgatcatgtaatttctaaaaggttacaccaaaaatgggttataagagatttttatttcttgtttgaaaactattcacaattgagattctccttgactttcgacaatgcaaaccccgagaaaacagtaacaactttccaagaacatttgccaccaccggctgaagcacaatcagcacagctactggatgaatacgctcaaaagttcaatgtaagaattctagaaaaatcacattcgttaataaactcacacattggggccaaaaactttgtgccacaaattctatccgagttcaaagacgaaattatactccccataggactaagaacattcggtgcgactatattaagttttaaacctgaagatggaactgaaaatataacgaaaagcttacgaaagattaggcctggtgacataattgtaattagaaaggctaagtttgaagcacataagaagatcggtaaaaaagaaattgtcaacatcgggatagacgcttccatcccatactcaagtgttgtgaccgattacgattttaccaaaaataaatttagagtcatcgaaaatcaagagggaaagatcgttcaaaatagctacaagctaagtcatatgaaaagcggaaaattaaaggtttttagagttgttggtaggggatatgtagggtggtga

SEQ ID NO: 1393 - DNA, 2055 bp, Saccharomyces pastorianus
atgaatcacacgaatgagtataggcgggaagaggcaggagcggctaatgaacaatttctttataacaagactgttaaatctgcgtatgcagacgtgctgaaggacaagatgaatagagagcggacgattgatcttcatatcgggaaaagatccctcgctgacggtggcgagacagataactacctggataaggaggatgattccacgtatgagatgttcaagaaaaatcttgatgttcccataaactgccgtggaaacgaagatgataatgacgacgacgatgattatgacgatgatgaactgtactttgaggacgatgaagaggaaaccgatggttttagcgatgaggattatactgacgaggcagacaagagctttattgaggatagtgaatcagatgactacgaattggaaggcgattcggagtttgaaggaaacagagagggcccggatgcaaccaacaggttgtcatgggggaagtgtattgtatacggtggtgttctcttcatgatctatctttttggcttttttttgatgacattcgtgaaaaataatactgacagcatcttatctggtgctacatcaacaccaggtaaatcattcgccaatctacaaaaacagataaatcatttatatagcgaattgagtaaccgcgacgagaaacaaaattctgaactggacaaaacaataaaagttatcatttcccaattcgagaagaacatcaagaaactgctaccttcgaatttagttagttttgaaaatgacattaattccctaacagaacaggtgcagacaatctccacctccatgagtgagtggcagaggcaaagtcaaaggtttaccgttgataacgttactcaatggcaagatcaactgattaaacaactagacacacacctccctcaagaaataccagtggttattaacaattcttcctcggttttgataatccccgaattgcacaattacttgactacattgctttctgatgtcattgagtcgccagggattgccaccacaggcgattctgataaaccttgggagtatgatttaaatcattacgtaaaggagattctatcaaacgagttgcagtacatcgataaggattatttcattcaggagatgaacaggagactgcaatcgaacaaacaggaaatttggcaagaaatcatccataaattagaatctcagcaacagcaagttcaacataggtccgattcaccgcagcagtattcgagtatattgatgaaacgattaatacaccaaatttacaattctaaccaacatcaatgggaggacgatttagattttgccacttacgtccagggaacaaaactattgaaccatttaacttcgccgacatggaaacaaggcaacggagtgcaaccagtagaattattgtctgattctaaacaaagctcctcgacctactggcaatgcgaaagtgaacctggatgttcgtgggctgtaagattcaaaactcctctgtatttgaccaaaatgtcatatttgcacggccgtttcactaacaacttgcatataatgaactcggcaccaaagataatatcgttgtacgtcaaattatcccagactaatgagatcaaggcattgcggtcattggccagccaatatagtttcggacaaccacacaagagagatcaaaactacatcaagattgcccaatttgaatacaggttgacggattccagaatacgccagcaaatacctctaccaccgtggttcattcaattgaagcctctcgtgcgctcagtagtctttcaagtagacgaaaactatgggaacaagaggtttacgtctctgagaaaatttatcattaatggtgtgacaccacaagatttgcaaattattgagaacaatgagttccctgttttattaggggacgtcccggagtacggtgttgctcaaaacatcaacgaaggcaaacggaatgctttactatcaacgccctcatacgtgtcaccacctagcaccagcgccaagttccatcccgcttccaatgtcccatcctttgggcaggatgagctagatcgataa

SEQ ID NO: 1394 - DNA, 486 bp, Saccharomyces pastorianus
atgaaagttctcgaagaaagaaacgtatttctaagtgactatgaagttttgaaatttttaacagatttagagaagaagcatctttgggatcagaacagccaggttgcccttaagaaaaaccgctcaaggggtaaagaaaagaggccgtacaatcaccctgaattgcaaggtattacacgtggtgtagtcaattttctgaacataaacaaaaattacatcaaccaagaagacgagaatgaagatcatgaaaacaatggagcaaaagacgctgagaaatcacccataagcaaaatgagcgatgaaagttttggagaattaatgggcagattaaattccttcaaattgtttaaagcagagaaattacaaattgtcaatcaacttcccgcgaatatggtccatttttactccatagttgaagagtgtgattcaagatttgatgaaaagacaattgaggaaatgctagagataatttctggctactcataa

SEQ ID NO: 1395 - DNA, 2001 bp, Saccharomyces pastorianus
atgggaaatacaaagacaagaggtagaagacatcaagagaaacaaaagaaggacgaatttgagcctagttcaactgctgtaaagaatcatattctggatgaagaacaggcttacactgacgattcagggaacaaagaagatcagccacaaatgtttttcggggtattagatagagaagagctggaatatttcaagcaagcagaatcaaccttacaattagatgctttcgaaacacctgaggaaaagtttcaatttgttacaagcattatcgaagaagcaaaaggtaaggaattaaaattggttacatctcaaattacttcgaagctaatggaacgtatcatcttggaatgtgatgaatctcaattaaagagtatttttcagtctttcaatggtgctttctttggctcgtcatgtcataaatatgcttcccatgtcttagaaactctgtttgttaggagcgccgctttgctagaaagagaacttttaacaccaagcttcgataccgatgaaaaagatggacctcacgtgaccatggagaatatgttcctcttcatgttgaacgagttgaaacctcatttgaaaatgatggttaaccatcaatatggatcgcatgtgttaagactgctaatattaatcttgtcttccaaaactttacctaactcgactaaaactaactcctcactgcgttctaaaaaatcaaaaattgcaagaaaaatgattgacattaaagataacgacgacttcaataaagtctaccaaacaccggaatctttcaaatctgagcttcgtgacatcataacaactttatataaaagctttaccaatggtgctgaagcacgctcagatgtttcccaatcaatagtaaccaaattcagagaatattgtgtagataaaatcgcttctcctgtgatccaattaattattcaggtcgaaggtatttttgacagagaccgttccttttggagactggttttcaatacagcagacgaaaaagaccctaaggaggagtctttcgttgaatacttactgtctgatcccgttggatctcatttcctggaaaatgtgatcgcttctgctagattaaaatacgttgaaagactttaccgtttatatatgaaagatcgtattgtaaagctagccaaaagagatacaacgggtgcctttgtggttcgggccctattagaacagttgaaggataaggacgtgaaacagatattggatgcggtggttcctgatttgagtatgcttttaaactcaaatatggattttggtactgctatcatcaacgcaagtaataaacaaggcaattatttaagagatgacgtaattgctcaattggtgcaaaaatattatccagaaaagtcagaaacgaagaacatcttagagagctgtttatcattgagttcgtccactttggggaataccagggatgactggccgacggctgatgaaagaaggcgatcgatttttttggaacaattaattgactatgacgacaagttcctgaatatcacaattgatagtatgctagccttgcctgaagaacgcctcatgcaaatgtgttaccacggggtgttttcacatgtcgttgagcatgttctacaaactaccagggtggaaacaatcaaaagaaagttactgttgaatatactgtgtaaacagtctgtaaatttatcatgcaatgcgtatggctctcatataatggacaaattatgggaatttaccacgaagttgacactatataaggagcgcattgctagcgcattagttagagaaacggaaaaagttaaaaatagtacttatggaagacaagtctggaaaaattggaaattggaactttatgtcagaaaaatgtgggattggaaaagattaatcaaagagcaagaattcgaaattttcccagattctaaaccattacaaccaaaagcagaaaaacattcaagagagagggataattcaaaagaaagaagtactttcaaaaagcaaaagcaacatagataa

SEQ ID NO: 1396 - DNA, 1707 bp, Saccharomyces pastorianus
atgtcactgagattgccacaaaaccctaacgcgggattgtttaagcaaggttataacagttattccaacgccgatggacaaattaacaagtcaattgcggccatccgtgaattgcatcaaatgtgtttgacttcaatgggtccctgtggtagaaacaaggtcattgtcaaccatctgggtaaaattattattaccaacgatgcagcaactatgctaagggaactagacattgtccatcctgcggtgaaagtccttgtaatggccactgaacaacagaagatcgatatgggtgatggtaccaatttagttatgatcttggcaggtgagttattaaatgtctctgagaaactgatttcaatgggtttatccgctgtagagattattcaaggttacaacatggccaagaaatttattttgaaagaattggatgaattggttgttggtgaaattactgacaaaaacgataaaaatgaacttttgaaaataataaaaccagttatttcctctaaaaaatacggttctgaagatatactaagtgaactcgtttctgaagctgtatctcatgttttaccagtttctcaacaggctggggaaacgccttactttaatgttgactccatcagagtagtaaagatcatgggtgggtctctttccaattccaccgttattaaaggtatggttttcaatcgtgaacccgaaggtcatgtgaaatcattatccgatgataaaaaacataaagttgccgttttcacatgtccacttgacatagccaatactgaaaccaagggtactgtcctgttacataatgcgcaagaaatgttggacttttctaagggtgaagaaaagcaaattgacgccatgatgaaagaaattgccgatatgggcgtagaatgtattattgcaggtgcgggcgttggcgaattggcgttgcattatttgaataggtatggtattttagtcttaaaagtgccaagtaaattcgaattaagaagattatgtcgtgtttgtggcgctactccattacctagattgggtgctccaactccagaagaattaggtttagtggaaaccgttaaaactatggaaataggtggcgatagagtaactgtttttaaacaagaacaaggcgaaatctcaagaacttctacgattattctaagaggtgccacccagaacaatctagacgatattgaaagggccattgacgatggtgtagcagctatcaagggtctaatgaaaccatctggtggtaaattgttgcctggagctggtgccactgaaattgaattgatttctaggataaccaaatatggtgagcgaacacctggtttactacagttagccataaaacaattcgccgttgcttttgaagtggttcctcgtactctagcagagactgctggtcttgatgtaaatgaagtactaccaaacttgtacgcagcacacaacgttagtgagccttgctcggctaatgaggaccatttatataaaggtgtggatatcgatggtgaaactggtgaaggtgtaaaggatattagagaagatggtatttacgacatgcttgccaccaagaaatttgctatcaacgtcgccacagaggctgcaactactgtgctttctattgatcaaattattatggccaagaaagctggtggtccaagagcgcctcaaggtccaaaaccaggaaactgggatcaagatgattaa

SEQ ID NO: 1397 - DNA, 315 bp, Saccharomyces pastorianus
atgtgctccaggggaggttcgaactctcgaccttcagattatgagactgacgctcttcctactgagctactgaagcatacaaaggatgttggggaagaaaaacaaactttacatcaaatatttgcggattccatggttattaaaggatatagcaccgggtatacaggacatactagaagttctccaggggatcttgtaatccacaaaagagaattgatattttcacataatattgtcattattgtttccccaatttatatgatatcattcattattctgttacactatcagtcctggcatttcagcatctattaa

SEQ ID NO: 1398 - DNA, 972 bp, Saccharomyces pastorianus
atgcctagcacgtttgaatcccagctttttttttcgagaccgtttctgtctaaaaggcaaattcaaagagcccaaaagaatacaatatcggactatcgaaattacaaccagaaaaaacttgccgtgttcaaatttctaagtgacttgtgtgttcagctgaaatttccacggaagactttagaaacagcagtatacttttaccaaagataccacctctttaatcgcttcgagaccgaggtttgctacactgtagcgacaagctgcctgactttgggctgtaaagaagttgagacaattaaaaaaacaaatgatatatgtactttgtcgttacgattgaggaatgtggttaaaatcaatacggacattttggaaaattttaaaaaaagggtatttcaaatagaacttcggatattagagtcatgctcattcgattatagagtcaacaattacgttcatattgatgaatatgttataaaaattggtagggagctatcctttgattataagttgtgcaatctggcttggataattgcttatgatgctttgaagctagaaactattttagtcataccccaacattccattgcattggccattttgaaaatagcatatgaattactagataacaagaattggtcaagtaaaaggtattctttatttgaaacagacgagaaatccgtaaatgaagcttattttgatatagtcaatttttacatcaattcattcgatatgtgcgatctacaacgtcatttaccggctgatttgctgccgattggcgttgaaaggtttatggaactgaaaaaaaacgcaggaccagaatctggattgccgcaaataccagatcacctgttgaatgccgatccttatatcactattactagagataataatgtccaagaaagaagatatgtactttcactggagctaattaatggcgagtccagcataaatagttctacaagacatgcatag

SEQ ID NO: 1399 - DNA, 6105 bp, Saccharomyces pastorianus
atgtcatcaaaacctgatactggttcggaaatttctggccctcagcgacaggaagaacaagaacaacagatagagcagagctcacctacggaagcaaacgatagaagcattcatgatgaggtaccaaaagtcaagaagcgtcacgaacaaaatagtggtcacaaatcaagaaggaatagcgcatatagttattacagcccacggtcgctttctatgaccaaaagcagggagagtatcactccaaatggtatggatgatgtaagtatttcgaacgtggaacatccaaggccgacagaaccgaaaatcaaaaggggtccatatttactgaagaaaacattgagcagtctttcaatgacgagcgcgaatagtactcatgatgataataaagaccacggttacgctttgaattcatccaagacgcacaactacacatctactcataaccatcatgacggtcatcatgatcatcatcatgttcagttttttcccaataggaagccatcattagcggaaaccctattcaaaaggttttcagggtcaaacagtcacgatggcaataagtcaggaaaggaaagtaaagttgctaacctttccctttcaacggtaaatcctgcacctgctaataggaaaccttctaaagactccactttatctaatcacttggctgataacgtgccaagcactttacgaaggaaagtgtcctcattggtacgtggttcttccgtccatgatataaataatggtattgcagataaacagattagaccaaaggctgttgcgcaatcagaaaatacattacattcatccgatgttcccaatagcaaacgctcgcacagaaaaagctttctgctaggctccacatcttcttcaagcagtagaagaggttcaaatgtcagttcaatgactaacagtgacagtgcaagtatggcgacgtcgggtagtcatgttctccaacataacgtatctaatgtttctccaactactaaaagtaaggacagcgttaacagcgaatccgccgatcacactaataataaatccgagaaagtgactccagaatataatgagaacattccggaaaattctaactctgacaacaaacgcgaagcgacaacgcctactatagaaacacccatttcatgtaaaccatcccttttcaggctagatacaaaccttgaggatgttactgatattacaaagacggtgccacccaccgctgtcaattctacactaaattctacacacgggactgagactgcctcacccaaaacggtgatcatgcctgaaggtcctaggaagtcggtgtcaatggctgatctctccgtcgctgccgcagcacctaatggtgaattcacatcaacttccaatgatagatcacaatgggtagcacctcaaagctgggatgtggaaaccaaaaggaaaaaaacaaaacctaaagggagatcgaaatcaagaaggtcaagtatagatgctgatgaacttgatcccatgtcaccggggccaccttcaaaaaaagactctcgtcatcgtaagaaccgacactctcgtcatcatcacgatcgaaaggataacgaatcaatggtcactgcgggtgacagtaactcaagttttgttgatatatgtaaagaaaacgttccgaatgatagcaagaccgcactcgatactaaatctgtgaaccgcttaaaaagtaatttggctatgagtcccccaagtatacgatatgctccatcaaatttagatggggactacgacacgtcttccacttcctcatctttaccgtcctcatctattagttcagaagatacatcttcctgcagcgattcctcttcgtacactaacgcgtatatggaggccaaccgagagcaggataataaaacaccgatcctgaataaaacgaaatcgtataccaagaaatttacatcctcttcggtaaatatgaattcaccagatggtgcccagagttctggattattactacaagatgagaaggacgatgaggtcgagtgccaactggaacattactataaagatttcagtgatttagatccaaagaggcactatgctattcgtatattcaatactgatgacacttttacgactctctcatgtactccagcgactaccgtcgaagagataatacctgcacttaaaagaaaatttaacattacagcgcaagggaattttcaaatttccctgaaggtgggaaagttgtcaaaaattttgagaccaacttcgaaacctattttaattgaaagaaaacttttacttttgaatggttatcgaaagtcagacccacttcatattatgggtatagaggatttaagttttgtttttaagtttcttttccatcctgtcacaccttctcactttactcctgaacaagaacaaagaataatgagaagcgaatttgttcacgtagatttaaggaatatggatctgactacacctcccatcattttttaccagcatacgtcagaaatagaaagtttagacgtttctaataacgcaaatatattcctacctctggagttcattgaaagctcgattaaattattaagtttgagaatggttaatattagagcatctaaatttccttccaatatcactaaggcgtataaactagtatctttggaattacagagaaacttcataagaaaagtaccgaactcaatcatgaaactgagtaatttaacgatattaaaccttcaatgtaatgagcttgaaagcctaccggctggatttgttgaactgaaaaatctgcaattgctagacttgtcttcaaacaagttcatgcactacccagaagttattaactactgcaccaatcttttacaaatagacctatcatataataaaatccaaagcttaccacagtccactaagtacctagtaaagcttgcgaagatgaacctttctcataacaaactaaattttataggcgacttatcggaaatgacaaatttgaggacgctgaacctaagatataacagaatatcatcaattaagacaaatgcgtctaacttgcagaacctttttttaacagataatagaatttcgaactttgaagacactttgccgaaactaagagcccttgaaattcaagagaatccaatcacttctatatccttcaaagatttttatccaaaaaacatgacaagtttgacgttgaacaaggcacagttatcgagtattcctggagaattactcaccaaactatctttcctcgagaaacttgaacttaatcagaataatttgactagactgccacaggagatatccaagttgactaaattagttttcctttcagtggcgagaaacaaactagagtatattccacccgagctatctcaactgaaaagtttgaggacattagatctacattctaacaacataagggactttgttgacggtatggaaaaccttgaactaacatcgctaaatatttcatcgaatgcattcggtaactctagcttagaaaattctttttaccataacatgtcatatgggtcaaagttatctaaaagcctgatgttttttattgctgcagacaatcaatttgatgatgctatgtggcctcttttcaattgctttgtcaatctgaaagtgctaaatctttcttacaacaatttttcagatgtatcgcacatgaaacttgagagcattaccgaattgtacctctccggtaataagctcacgacattgtcgggtgatacagttttgaaatggagctctttaaagactttaatgttgaatagtaaccaaatgttatctctgcctgcagaattatcaaatctctcacagctaagtgtatttgatgttggagcaaatcaattaaagtataatatatcaaactatcattacgattggaactggaggaataataaagaactaaaatatttgaatttttcaggaaatcgaaggtttgaaataaagtcatttataagtcacgatattgatgctgatttgtcagatctgacagtattacctcagttaaaggtactaggtttaatggacgtaactttaaatactaccaaagtaccggatgaaaatgtcaatttccgtttaaggacaactgcatcaataataaatgggatgcgctacggtgttgctgatacattaggtcaaagagactatgtgtcatctcgtgatgttacctttgaaagattccgcggaaatgacgacgaatgcttactatgtcttcatgatagtaaaaaccaaaatgcagattatggccacaatatatcaagaattgttagagatatttacgataaaatactgatcagacaactggaaaggtatggagacgaaacagatgataatataaaaactgcacttcgtttcagttttttgcaactgaataaggagattaacggaatgctaaattctgttgataatggtgccgatgttgccaatctttcatatgcagacttgctaagtggcgcttgctctactgtgatatatatcagagggaagaaactcttcgctgcaaatttaggtgactgtatggctattttatccaaaaacaatggtgactaccaaacgctaaccaaacaacatctcccaacaaagcgggaagaatacgagaggatcagaatatctggcgggtatgtcaacaatggaaaattagatggtgttgtagatgtgtctagagcagtgggtttttttgatttgcttccccacattcatgcttctcccgacatatctgtcgtgacattaacaaaagcagacgagatgcttattgtagcaacgcataagttatgggaatacatggacgtggatacagtttgtgatatcgcgcgtgagaatagtactgatccactccgtgccgcagctgagttgaaggatcatgccatggcttacggctgtacagagaatattacaattttgtgccttgctctttacgagaacattcagcaacaaaatcggttcactttaaataaaaactctttaatgactagaagaagtactttcgaggatactacattaagaagacttcaacctgagatttctccgccaacaggtaacctagcaatggtcttcactgatatcaaaagctcaaccttcttatgggagctattccctaacgcaatgaggaccgcaataaaaactcacaatgacattatgcgtcgtcaactacgaatttacggtggttacgaagtaaagacagaaggagacgcctttatggtggcatttcctacgccaactagtggtctgacatggtgcttaagtgttcaattaaaactcttggatgcacaatggccggaggaaattacctcagttcaagacggctgccaagttacggatagaaatggtaacattatctatcaaggcctatcagttagaatgggtattcattggggctgcccagttccagagcttgatttagtgactcaaagaatggactatttggggccgatggtcaataaggcagcaagggtccagggcgtcgctgacggtggtcagattgcaatgagtagtgatttttactctgaattcaacaagataatgaagtatcatgagcgagtagtgaagggcaaggaatctctcaaggaagtttatggtgaagaaattatcggagaggttcttgaaagagaaattgccatgctggaaagtattggttgggcattttttgactttggcgagcataagctaaagggactcgaaaccaaagaactcgttactattgcgtatcctaagattcttgcttccagacacgaatttgcatctgaagatgagcagtcaaaattaatcaatgaaacgatgttgtttcgtttaagagtcatttcaaacagactggaatctataatgtcagctttaagcggcggatttattgaactagactctcggacggagggaagttatattaaatttaaccctaaagttgaaaatggtattatgcaatcgatttctgagaaggatgcgttgttattttttgatcatgtaattactagaatcgaatccagtgtggcattattacatttacgacaacagaggtgttcaggactggaaatttgcagaaacgataaaacatctgctcgaagcaatattttcaatgttgttgacgaacttttacaaatggttaagaacgcaaaggatttatcaacttga

SEQ ID NO: 1400 - DNA, 612 bp, Saccharomyces pastorianus
atggtttcgataagaaggtatttgcgagtgccgaatgagttgaaaccttcccagatcttcaaacaagattctctctctccaagtaagattggacttcaaattgttcttttacagattttttattacaccacagcgatcgttcttttttattgttgggcgaagctagcgggatatgatctcaatatcaaggaatggctgttttcttgggagaatatcgactttacgaacgcatacggtttatcaatctcactgttatggcttctggattcattaatatgtgtttttttcttaactgttatcgttggacggagtaaactcgcatgggattttgctatcactatacatgccatcaattttattgtggtgttcctctatactcggaaatttccttctttttcttggttttttcttcaaattttatcatctttaatactaatatttttggggacatggacaacaagatggagagagcttagagacaccttttttgagggcttggttgatcctaatgaaggagaagttggattggttacgcctagtcagcagcatagtaatcattcagaattggagcaatcaccaatacaactaaaagacttagaaagccaaatatga

SEQ ID NO: 1401 - DNA, 612 bp, Saccharomyces pastorianus
atggtttcgataagaagatacttgcgcataccgaatgaattaaaaccgtctcagatctttaaacaagattctctttctcctagtaagattggtcttcaaatagtccttttacaaattttctattatactactgctaccattcttttctattgctgggggaaactagcaggttacgatctagaaatcaagaattggcttttctcttgggagaacattgagtttacgaacgcttatggtctttcactatcgctgctgtggcttttggactcattagtatgtgtcttctttttgacagttattgttggtagaagcaaactggcatgggactttgccattaccatacacgccattaattttatagtggtatctttctacacgtgggaattaccttccttttcgtggtttttccttcaagttttgtcatcattaatactgatatttttgggaacatggacgacgaggtggaaagagcttagagacacttttttcgagggtttagttgactctaacgagggacaaagccaaccgaccgcatcaagtcaagagcatagtgatcacacactactaggccaatcacaaatacaactcaaagatttagagagtcaaatataa

SEQ ID NO: 1402 - DNA, 357 bp, Saccharomyces pastorianus
atgtcgttcagcggaaaaaaatttaggtctagaagacagcagctagtatatgaagcatctttagcggggcgatacaaaaaagcattgagtaagcacccctttcttttttttggtttaccattttgtgcaacaatagtattgggttcgttttggttgtcaagctttacagcgatcaagtacgagcaaggcgatcgtaaagttcaggaaattaatgaagaggatatcttgaaaataaggaagaatcaaagggaatttgatattaaagaagaatattatcgtttacaaggtctttctgaagaggattgggagcctgtgcgcgtcgctaggttaaaggatgaatctgagaatgtctggtaa

SEQ ID NO: 1403 - DNA, 357 bp, Saccharomyces pastorianus
atgtcatttggagggaaaaaattcagatcgagaaaacagcagttagcgtatgaagcatcgttagcaggacgatataaaagatccctgagcaagcaccccttcttatactttggtttaccattttgcgcaacaatagcactaggctctatttggttatcaagctttacagcaatcaaatatgagcgaagtgatcgtaaagtccaggaacttaatgaagaagatatattaaaaatgaagaatagtcaaagagaattcgacataaaagaagaatactaccgtctacaaggtctttcagaagaggattgggaacctgtgcgtgtgactagattaaaggacgaatcagaaaatgtttggtaa

SEQ ID NO: 1404 - DNA, 1431 bp, Saccharomyces pastorianus
atgaggcaggtttggttctcttggattgtgggattgttcctatgttttttcaacgtgtcttctgctgcccaatacgagccacctgcgacttgggagaatgttgattataagaggacaatagacgtgtcaaacgcttatatttcagaaacaatcgaaataactatcaaaaacatagcaagcgaacctgcgactgaatacttcacagcctttgagagtggcatcttcagtaaagtttcctttttttcagcctattttaccaacgaggcaacttttttaaatagccaattacttgccaattcgactacagcacctggtgacgatggtgaaagtgaaattagatacgggatcattcaatttccaaatgcaatttcccctcaggaagaagtttctttagtgattaagagcttctataataccgtaggtattccttatcctgagcacgttggaatgtcagaagaacaacacctattgtgggaaacgaacagattgccgctttctgcttacgataccaagaaggcctcttttacgctgattggtagctcatcatttgaggagtaccaccccccaaatgacgagagtttactgggaaaagctaatggaaactcttttgagtttgggccttgggaagatattccgagattttcttcaaacgaaaccttagcaattgtttattcccacaatgccccattgaatcaggtagtgaatttgagaagagatatttggctttctcattgggcttccacaatacaatttgaggaatattatgaattaacaaacaaagccgcaaaactgtctaaaggattttcaagattagaattaatgaaacagattcaaactcagaatatgagacaaactcactttgttactgtcttagacatgctcctgcctgagggagctactgatcattatttcactgatttggttggccttgtttccacgtcgcatgcagaacgtgaccatttctttataagaccaagattcccaatctttggaggttggaactacaattttactgtcggttggactaataaattgtccgatttcttgcatgtatcctctggctcagacgagaaattcgttgcttctatcccaattctaaacggcccaccggacactgtatatgataatgttgaattatcggtatttcttccggaaggggccgaaatattcgatattgattctccagtcccttttacaaatgtttctatagaaacccagaaatcatactttgacctaaataaaggtcacgttaaattaactttcagttacagaaatttgattagtcaagttgccaatggccaagtcttgataaagtacgactacccgaaaagctcttttttcaagaagcctctgtctattgcttgctatattttcaccgcactaatgggagtttttgtcttaaaaactttgaacatgaacgtaactaactga

SEQ ID NO: 1405 - DNA, 1428 bp, Saccharomyces pastorianus
atgaaaggtgcttggttttcctggatagcaggattattcctattttacaacgtgtctttggctgcacaatatgtaccacctgcaacttgggaaaacgttgattacaagagaacggtagatgtatcaaatgcttacatttctgagacaattgaaataaccgtcaaaaatataggtaatgaaccggcaactgagtactttgctgtttttgaaagtgatattttcaataagatttcctttttctctgcttatttgagcgacaaggcctttttcttgaatagtcagctgtttgtcaattctactacggaaaacagcgatgaagagagtaatgatactagatacgggattattgaatttccaaacgcgattcctcctcaggaggaaatttcctttgtgatcaagaatttttacaataccgttggtgttccttatcccgagcatattggaatgtcggaagaacaacatttactatgggaaacaaacagattgccactttctgcgtataataccaagaagggttctttaaaaattatcggtagttcttcgttcgaagaattccatcctccaaatgacgagagtttaatagggaaaactaccggcaaggttttcgagtttggaccttgggaaaatattcccaaactctctaacaaagaaaggttggcggtcgtttattctcataacgcaccattaaatgaagtcactaatttgaaaagagatgtttggctttcccactgggcttctaccacccaattcgaagaatactacgaattaactaacaaagctgcaaagttaactaaaggattttcaagattggaattgatgaagcaaatccaaaatcaaaacatcagagaaactcactttattaccgtcttagacatgttactacccaatgatgctactgatcattattttactgatttggttgggcttgtttccacctcacatgcagaacgtgaccatttttttataagaccaagattccccttgtttggaggctggaactataatttcacagttggctggactaacccattgtccgatttcttacatgtatcttctgactcaagtgagaaatatgttgcttctatcccattgctcaatggcccattggacactgtatatgacaatgttgaattatcaatatttcttccagaaggtgcaaaaattgtcgatatcgattctcctgtcccctttacaaaggtttctgtagaaacgcaaaaatcatattttgacctaaataagggccatgttaagctgactttccaatacaggaatttgattacgcaagttgccaacggtcaagttttgattaaatatgattactcaaagaattcgtttttcaaaaagcctctatccattgcttgctacatttttgcggcattgatggggttcttctttttaaaaacgttgaatctaagtttaacaaactaa

SEQ ID NO: 1406 - DNA, 1809 bp, Saccharomyces pastorianus
atgcctgagcaagaaccattgagtcccaatggccgtaagcgctctgaggttcactatatctcaatcccattgaacagaggttccgcattctcaccagatgattctgtatcacagtttcagtctgacgggttcatgacacgtaggcaatccatattggaccatcctgtgggctcatttaagggagttaattctttaagtcgatttgcgacttcgttgaggagagccaattcgtttcgtaatatcgagctaaatgcggataatgaaagatcctttttcaaagagagtaacgatgaaacctacgatccggatactttagcaccagctttggacggtagaagattatcagtaactttaaataatgctggtcgcctgcgcattactaatttggctaacaacgatagagttagtacagccagcatggctattcacgatgatgattatgggtccatccaaaattcaacaattggggattctgggtcaatattacgccctactgcctccttaacagaaatgatgagtggtggagcggggagaaggtttacaaataatgacatggattcaattgtagtgaagagagtggagggtgtagatggtaaggtagtaactcttcttgctggtcagtcgaccgctccacagaccatattcaactcaatcaatgtactgattggtattgggctcctggcgttacctcttggtttgaaatacgccggctgggttataggacttactatgcttgcaatcttcgccttagcgacattttgtactgctgaacttttgtctaggtgcctagatacagatccaactttgatatcttacgcggacttgggatatgcagcatttggtacaaaagggcgcgcactaatttctgctcttttcacacttgacctactgggtagtggggtgtccttggtgattctcttcggagattctttaaatgctctatttcctcaatactcgaccacttttttcaaaatagtttcattttttatcgttacacccccggtttttataccattgagtgttctatctaatatctcgcttctgggaatcctttcaacaaccggaactgtgctagtcatttgctgctgcggactatacaagtcgtcttctccaggttcattagttaatccgatggaaacgagcatgtggccgatagatctaaagcatctctgtttatctataggtttattgagtgcctgctggggaggacatgcggtttttcccaacttaaagacagatatgaggcatccagataaatttaaagactgtttgaaaactacctataagataacatcggttacggacataggtactgcagttattggctttttgatgtttggaaatcttgttaaagatgaaattactaagaacgttttgctgacggagggatatccaaaattcgtttatggtctgatttcagcgcttatgactatcattcctatcgcaaagaccccattgaacgcaagacctatcgtttctgtattggacgttctgatgaatgtgcaacacatagatgaagcggccagcgccataaaaagaagagctgcgaaaggccttcaagtattcaataggatctttattaatgttgtcttcgttttgatagctattaatttccctgaatttgataagattatcgcatttctgggggccggtttgtgttttacaatttgcctaattttgccgtgttggttctatttaagattatgcaagacaacaatcaaaccatgggagagagtggcttgtcacgtaaccatatgtattagtgtcgtgttgtccacattaggtgttggtgctgcaattatttcataa

SEQ ID NO: 1407 - DNA, 1812 bp, Saccharomyces pastorianus
atgcctgagcaagaaccgtcaaatcccaatggtcgcaaacgctctgaggtacactatatttcgattcctttgaatagaggttcagaattttcaccagacgatgctacatcgcagtttcaatctgatgggttcacgactcggaggcagtctatcctagaccaaccagttggctctttcaagggtgttaattctataagtcgattcgcaacttcattgagaagagctaattcgtttcgtaacatcgaattaaacgcagataatgaaagatcgttcttcaaagatactaacgatgaaacgtacgacccagatactttggcaccggctatggacggcaggagattatcggtcaccttaaatagttctggtcgtccacgcatcagcaacgcggcaaataattttgacagaattagtacagctagtatggcaatccacgatgatgactacggatccatccaaaattctatgattggcgattctgggtcaatactacgccctactgcttctttaactgaaatgataagcggaggtgcagggaggaattatgcgaataatgatatggaatcaatagtggtaaaaagagtggaaggcgtagatggtaaggtcgtgactttacttgctggtcaatcaaccggcccacaaaccatcttcaactcaattaatgtgttaattggcattggacttttagcattaccactcggattgagatatgccggctgggttttgggatttaccttactttctattttcgctttaggaactttctgtacagctgaacttttgtccaggtgtttagacacagatccgactttgatatcatatgcagatttgggctatgcagcatttggttctaaaggccgtgcgttgatttcagctctctttacgcttgatctacttggtagcggagtgacccttgtgatcttgtttggagattctttaaacgctttatttcctcaatactctaccacttttttcaagattgtttcattcttttttattacacccccagttttcataccattgagcgttctctctaatgtttcacttctgggtatcctttcaacaacaggaactgtattggtcatctgttgttgcggactatacaaggcatcttcaccaggctcattgctcaatccgatggaaacaaacatgtggccattggacttcaagcatctttgcttatctataggattgcttagcgcatgctggggaggacatgcagttttcccaaatttgaagacggatatgagacatccaggtaaatttaaggactgtttaaaaacaacttataagataacatcggtcactgacataggtactgccgttataggttttttaatgtttggtaatttggttaaggatgaaattaccaagaatgttttgctaacggagggatatccgaagttcgtatatgctctaatttcagcacttatgacaattattcctattgccaaaactcctttgagtgcaaggccgattgtttccgtgttagacgtttttatgaacgtgcaacagatcgatgaagcggacagccctatgaaaagaagaatttcgaaaggtcttcagctattcaatagaattttcattaatgttgttttcgttttaatagctataagcctccctgaatttgacaagatcattgcgtttttgggtgcaggcttgtgtttcgcaatttgtctaattttgccatgttggttttatttaaggatatgcaagactaccatcaaaccttgggaaagaatggcctgttacataacaatatgtgccagtgtcgtgttgtctacattgggagttggtgctgcaatcatttcttag

SEQ ID NO: 1408 - DNA, 1620 bp, Saccharomyces pastorianus
atgaaagagttcgatgagagctactttttcaaatgcttaacagctaaccgccattcaataatgttacgttctcttcattctgcggctacgttatctaacaagaggttttactctctcatatctcattcaaatagaaagaacataatcaaaaagcttctacgtcacccttctttcgatccaattcgtcatcatttgcctgaagatataaccaccattgacccatactctctatcgcagaatgttatcgaaagtttaaacaaattagaggttcctaaaaaggatgcggccatggtacacaatatgatgatagaaaacttaagtgatcttgactacggcgttgcaacaattcactcaaataatttgcgtgatcttgatttaaaaccttcacttcccgccatcaaacaaattattaggaataatccaggaagagtacaaagctcttgggaactttttacacaatacaaggcctcaatggaaaatgttcctgatgaactgatggaagtggtcttagaaaaaattatcaagtttgacaaggcagaaaaggttgatggaaaaaagagtctgacttatcaagacctcgttagatgtctttatttaatcaaccatttttcttcaaattataatttgccttcagagctcgtggaacctatccttatttacatagtggacaacggaattcccaatgttttaggttctgtactcaaatataaaataccgctgagcttttttgataagtatgtcagtgaaatgacacaataccaaatttgtgaactttatgatttttattcgcttgataatatagtagctgatccattagtactacacaagtgtctaactgttctgggcgaaaacgagaaaattcagcaaactgaagaagaaaaagaaattattagcaagttggaggaagaaatagaaattgttaaatcacaatgtcatgataattggagcctcgaatttccgaattggagtgtacgcaaaactgcaacttcattcgaaaaattatttttagagatccaaaaaagaaacatagacaagaaggatttcgaattagctcacaagctgttaagattaattggcgctttcaaaggtaaagtttctctattttttaaattatacgacgaatatctcttaaaattcaaaaataatgaggacgacttaatgtttgaagcgtttttaacgctctgctgccagggttataaaagcagtaatgaaaaaatgctacaatacgctgaagcttttattaaagaagactttgattccaaactagagagtaaaattcaaagtgtgttaattgttgctaacgcgaaagcaaatattgatctatctctcaaaatttacaattctaatatatctactgctaaacgagagaaagataagtacacagatcttgctgaaagtgacgtattaactgaatcgctcattttagcattcttatccagagatgatgctgattttgccagggtcatctttgatggcgcactaggagaaaagctgatatcagggccgactgctgcaaaaaaaataaaaaatctcttagcccagtatggagaagcgttagaaacaaaaacaagcaaacaagttatgcagactaagatagaacattatatggaaagcatataa

SEQ ID NO: 1409 - DNA, 1953 bp, Saccharomyces pastorianus
atgttcacttttctcaaaattattctgtggcttttttccttggcattggcctctgctataaatatcaacgatatcacattttccaatttagaaattactccactgactgcaaataaacaacctgatcaaggttggactgccacttttgattttagtattgcagatgcgtcttccattagggagggcgatgaattcacattatcaatgccacatgtttataggattaagctattaaactcatcgcaaacagctactatttccttagcggatggtactgaggctttcaaatgctatgtttcgcaacaggctgcatacttgtatgaaaatactactttcacatgtactgctcaaaatgacctgtcctcctataatacgattgatggatccataacattttcgctgaattttagtgatggtggttccagctatgaatatgagttagaaaacgctaagtttttcaaatctgggccaatgcttgttaaacttggtaatcaaatgtcagatgtggtgaatttcgatcctgctgcttttacagagaatgtttttcactctgggcgttcaactggttacgattcttttgaaagttaccatttgggtatgtattgtccaaacggatattttctgggtggtactgagaagattgattacgacagttccaataacaatgtcgatttggattgttcttcagttcaggtttattcatccaatgattttaatgattggtggttcccgcaaagttacaatgataccaatgctgacgtcacttgttttggtagtaatctgtggattacacttgacgaaaaactatatgatggggaaatgttatgggttaatgcattacaatctctacccgctaatgtaaacacaatagatcatgcgttagaatttcaatacacatgccttgataccatagcaaatactacgtacgctacgcaattctcgactactagggaatttattgtttatcagggtcggaacctcggtacagctagcgccaaaagctcttttatctcaaccactactactgatttaacaagtataaacactagtgcgtattccactggatccatttccacagtagaaacaggcaatcgaactacatcagaagtgatcagtcatgtggggactaccagcacaaaactgtctccaactgctactaccagcctgacaattgcacaaaccagtatctattctactgactcaaatatcacagtaggaacagatattcacaccacatcagaagtgattagtgatgtggaaaccattagcagagaaacagcttcgaccgttgtagccgctccaacctcaacaactggatggacaggcgctatgaatacttacatcccgcaatttacatcctcttctttcgcaacaatcaacagcacaccaatcatctcttcatcagcagtatttgaaacctcagatgcttcaattgtcaatgtgcacactgaaaatatcacgaatactgctgctgttccatctgaagagcccacttttgtaaatgccacgagaaactccttaaattccttctgcagcagcaaacagccatccagtccctcatcttatacgtcttccccactcgtatcgtccctctccgtaagcaaaacattactaagcaccagttttacgccttctgtgccaacatctaatacatatatcaaaacggaaaatacgggttactttgagcacacggctttgacaacatcttcagttggccttaattcttttagtgaaacagcactctcatctcagggaacgaaaattgacacctttttagtgtcatccttgatcgcatatccttcttctgcatcaggaagccaattgtccggtatccaacagaatttcacatcaacttctctcatgatttcaacctatgaaggtaaagcgtctatatttttctcagctgagctcggttcgatcatttttctgcttttgtcgtacctgctattctaa

SEQ ID NO: 1410 - DNA, 2103 bp, Saccharomyces pastorianus
atgtccgatcaaaaagtttttgccagatataaagcaaatgaaatcgtcacagatctgcaacattttggagtaaaaaagtttaaatcgaatataacaagaaggaaaaatgctctgagaaaaattatcgccaatttggttctaggaaactatggcgaaatgtcccttctgttttctgagctcttgaaattttggcaaattgaagatgatctagaagtgaaaagaatttgccatgagtatattagggtgatcggcgcattaaaacctcagcaggccagagaggctttgccatttataatggacgatttcaaaagcagagatgaaaagttacaaataatggcactaagaactctggtattagtcccggtgaaagagctatctgatcaggccttcgactgtatcatttcattggtaaatcacaagtctccacctgaacaagtgacgaggacagcaatttacgcactgttggatttagatgaaattgatcatgaaagggtattggggttatcaagcattctacatgacattgtaaaagcacagtcgagctctccagaagtcattgtagctgcattacatactttatattccattcacgaaaaaaacgctaacatggaacccttcaggattcccttggaactcgcttttgacatgctagaacttttacccgaattaaatgagtggaataaggctactgttttggaagttttgacgacttcggttgtgccgcagcattatttggatacccatgaaatgatcgaactagctttaccgtacctgcaacaagtaaacacatacgtagtgttgaactctttaaaattcatcatgtacttgttgaattatgttgacgtcatcaaagaaactctagccgaaaagctatctaactctgtaatagctttgttagataagccgcctgaattacaatttttagtattaagaaacgttattcttcttttattgagtagggagtcatctctactcaggctagacatttcgtattttttcatcgagtacaatgaccccatatacatcaaagacacgaaattagagtgtttatatcttttagctaacaaggaaacattaccaagaattctagaagagttggaacaatatgctacagatattgatattcaaatgtcaaggaaatcagtcagagccattggtaatctcgctgttaagctagatgaagactctgtacacgattgtgtcgctgttctactagatttgttagaattcggtgttgattatgtcgtccaggagattatttcggttttcagaaatattttgaggaaatatcccaataattttaaagcaaacgtaacagaactagtcaaacacactgaagttgtacaggaacctgaatcaaaaaacgctatgatctggataataacgcaatattcggatgtaattccaaactacctggagttatttagagttttttcctcaaacatgtttaatgagacgctagaagtgcaattttccattctgaactcagcaataaaattcttcatcagaaatcctacaaaggaaactgaagaactttgtatggatttattaaaaggatgcaccgatcacgaaaataatcctgacttaagagataaaacactgatgtattggagattgctgtcattaacgagaacgtctcgtatatcaaacgcgataacttttgaatctttaaaatcagtactggacggagagttgccactaatagaaatgaacacgaaattagatcccaccgttttggaggaattggagctaaacattggtacaatagtatcgatttacttaaaacctgtttctcatatctttagattgaataaaaccaaactgctaccacaaagtcctattttgaatccaaacaaagacctcttgccagttgtaggtaactcatttcctccaactggagctaatagggaccgtcaaaattcagaaagccagtcctcgacgaagtccagaaagactgccatgatggatgattatgataagcccgctgaaaaaattaatcagttgaaaggtaagcgtaaatctagttcaaacaacccctcaaaactatcacggaaaccctcaactttattaagaaaactctctatgaaacggcccttttcgtga

SEQ ID NO: 1411 - DNA, 2103 bp, Saccharomyces pastorianus
atgtccgaccaaagggtttttgctagatataaagcaaatgaaattgtcactgacctacagaattttggagtgaaaaagttcaaatccaatacaacaagaaggaaaaatgctctgagaaaaattatcgcaaatttgacgctagggaactatggcgaaatgtctcttctattttctgagcttttaaaattttggcagattgaagatgatttagaagtgaaaagaatttgtcatgaatatataagagtgatgggcgtaataaaaccccaacaggctaaagaggcattgcctttcataatggacgatttcaaaagtagagacgaaaaattgcagatgatggcattgaggactttggtattagttcccttaagggagttctccgaccaagctttcgactgcataatatcgttggtaaatcacaaagctccacctgaaaatgtcacaaggatggcaatctacgcattactagatttggatgaaattgatcatgaaagggtcttaggtttatcaagcattcttcatgacattgtaagattgcaatcaagccctccggaagttgttgtagctgcattacacagtttgtattctgttcatgagaagaacgctaatatggaagcatttggaatttctttagacctagcattcaatatgctagaacttttacccgaattaaatgaatggaacaaagcaactgtattggaaattctaacaacttctgttgtaccgcagcattatttggacgctaacgaaatgatcgagttggccttaccataccttcagcaagtcaacacctatgtagtgttgaacactttgaaattcatcatgtacttattgaactatgttgatgtcatcgaagaaagtctagccgaaaaattgtctaattcggtgatagctttattagacaaacctccggagctacaatttttagtattgagaaatgtcatccttcttcttttgagtcgggaatcatctttgctaaggctagacatttcatacttttttatcgaatacaatgatcctatatatatcaaggacacaaaattggaatgtctatatcttttagctgacaaggaaacattgccaagaattttagaagaactagaacaatacgctacagacatagatatccaaatgtcaagaaagtcagtcagagccatcggtaacctggctgttaaattagatgaagattcagtccatgattgtgtcgctgtcctgctggatttgctagagttcggcgttgattacgtcgttcaggaaattatgtctgtttttagaaacattttaagaaaatatcctaataattttaaaaaaaatgtgaaagaattagtcaaacatacagaagtggtacaagaacctgaatctaaaaatgcaatgatttggataatcacacaatactcggatatcatccctaattacctggacttattcaaagttttttcttccaatatgtttaatgagacgttagaggtgcagttttcaatcctgaattcagcaacgaaatttttcatcagacgccctacaaaggaaacagaagaactttgcatggatttgttgaaaggttgcaccgatcaggaaaacaatcctgatttaagagataaagcatttatgtattggaggttgttgtcgttgacaaaaatggctgatacttcgaacacgctaacttttgaagctctaaagtcagtgatagatggagaattgccactaatagaaatgaacacaaaattagatcctactgttttggaagaactagaactaaatattggtacaatagtatcaatttatctaaaacctgtttcccatattttcaggttgaataaaacaaaattattgccaccaagccctgttctaaatccaaataaagacctcttaccagtagtcaacaattcattctcgccgaccggagccaatagaaaccgccaaaattcagaaagtcagtcttcaacgaagtctagaaggactgcgatgatggatgattatgataaacccgctgaaaaaatcaatcagttgaaggggaaacgaaaatctagttctaacaacccctcaaaactctcacgaaaaccctcaactctgctaagaaagctttctatgaagaggccgttttcatga

SEQ ID NO: 1412 - DNA, 282 bp, Saccharomyces pastorianus
atgcataatactggcaagagatactcagaaactgccaaaaaagtggcagcaggaagagcaagaaaacgtaggcaagcttacgaaaaggaccaactagagaaacaacaactagaagctcaagaagctcagaggtgggaagaaggtgcgagaacccctaaccagaagaagctgattatggaacaaaaaaagacagagaagctaagagccaaaaaggaaagagaccaattactagccgccgaagaggaagctttaggtaagggaggcaggggaaaaagatactga

SEQ ID NO: 1413 - DNA, 282 bp, Saccharomyces pastorianus
atgcatagcacgggaaaaagatattcagaaacagctaaaaaagttgctgcaggaagggccagaaagcgcagacaagcttacgagaaagaccagttggagaaacaacaattggcggctcaagaggctcagaaatgggaacaaggtgcaagaactcctaatgagaaaaagctggcattggagcaaaaaaaggcagagaagttgagagccaagaaggaaagggaacttttattagccgccgaagaagaagtgttgggtagaggcggcaagggaaagagatactga

SEQ ID NO: 1414 - DNA, 1464 bp, Saccharomyces pastorianus
atggacgcattgttaacaaagttcaacgaggatagaaatctccaagatgaaaacctgtcccaaccacgaacgagagtaagaattgttgacgacaatctttacaacaaatcgaatcctttccaactatgctataaaaaacgtgactacggttctcagtactaccacatttatcaataccgtctaaagactttcagagaacgcgtcttaaaagaatgtgacaagagatgggatgcgggctttaccttgaatggccaattagttctaaaaaaggacaaagtgttagatattcagggaaaccaaccatgttggtgcgtaggatccatatattgcgagatgaaatataaaccaaacgtactggacgaagtgatcaatgatacatatggtgcaccagatttaactaaaagttatactgataaagagggtggttctgatgaaattatgctcgaagatgaaagtgggagagtgcttctagtgggagattttattcggtctacacccttcatcacgggtgttgttgtaggtatactgggtgtggaagctgaagccgggacatttcaagttttagacatatgctaccccactcctttaccacaaaatcctttccctgcaccaattgctacctgccccaccaggggaaaaattgctcttgtttctgggttaaacctcaataatacatcacctgataggctattgagattggagattttgagagaatttttgatggggagaatcaataacaaaattgacgacatttctctaattggtagattactgatatgcggcaactctgttgacttcgacattaaaagcgtgaacaaagacgaattgatgatttctctaactgagttcagtaaatttctacacaacattttgccatctatatctgttgatattatgcccggaaccaatgatccaagtgacaaatctctaccgcaacagcctttccacaaatcattgtttgataagtccctagaatcatacttcaacggttctaacaaagaaattttgaatttagtgaccaacccatatgagtttagctataatggcgtagacgttctagccgtttcaggcaaaaatatcaatgatatttgtaaatacgtaataccatcaaatgataacggagaaagtgaaaacaaggtcgaggagggcgagagtaatgatttcaaagacgatatagagcatcgactggaccttatggaatgtacaatgaaatggcaaaacatcgcgcccaccgcacctgataccttatggtgttatccgtacactgataaggatccatttgtattggataagtggccccacgtttacattgtggcaaaccagccatattttggaacaagagtagtggaaataggtggtaagaacataaagataatatctgtccctgaattcagttctactgggatgataatattactggatttggagacgttagaagcagagacggtcaagattgacatttaa

SEQ ID NO: 1415 - DNA, 1470 bp, Saccharomyces pastorianus
atggatgccttattaacaaagttcaacgaggccagaactgtccaagacgaaggtccgtcccaaccattgaagagggtaaggattggagacgatggtcttcgtaacgaatcgaacccatttcaattgtgttataaagaacgcgactacgggtctcagtactatcacatgtaccagtaccgtttgaagactttcagagaacgtgttttgaaagaatgtgataaaagatgggatgctggttttaccttaaatgggaagttggtccaaaagaaagataaagtactggatattcaaggaaaacaaccatgttggtgcgtgggatccatatactgtgagatgaagtataaaccgaacgtgctggacgaggtaatcaatgacacctatggcgcgccggacttaacgaaaagctatactgataaagaagagggctccgatgagatcatgttggaagatgaaagtgggagagtgcttctggtcggcgatttcattcggtctacgcccttcatcacgggtgttgttgtggggatactgggtatggaggctgatgcagggactttccaggttctggatatatgctatcccgctcccttattgcagaatcctttacccccgcaaaacgctacttcccagactaagcgcaaaatcgctcttgtttctggattgaatctgaataacgactcacctgataggctacttaggttagaaattttgagagagtttttgatgggaaggattaatagcaaaatcgacagcgtttcccaaattggtagattattgatatgtggaaactttgttgatttcgacgtggaagttgtgaccagagatgaattaacaacttctcttactgaattcagcaaatttctacacaatattttaccttccatctccgttgacataatgcctggtactaacgatcccagtggcaaatcgttacctcaacagcctttccataaatcattatttgacaattcactggactcttacttcgatgactctaataaagaaattttaaatctggtgacaaacccctataaattcagttataacggtgtagacgttctcactatttcaggtaaaaacatcaacgatatctgtaaatacataataccatcaaatgagaatatcaaagacggtcaagacaaggaagcaaaagacgaagataacgaagatttcaaggacgatatagaacatcgactggatctaatggaatgtaccatgaaatggcaaaacatcgcacctactgcacctgatacgttatggtgttatccatataaggatgaggatccattcgtactaaacgaatggccacacgtttacgttgtgggtaaccaaccgagcttcggaacaaggctaatggaaataggtggtaagaacataagaatagtatctgtgcctgaattcagttccactggggtggtagtgctactgaatttggacactttagaaatagagacagtcaagatagacatctaa

SEQ ID NO: 1416 - DNA, 915 bp, Saccharomyces pastorianus
atgtccacttctcattgcagattttatgaaaacaaatacccagaaattgacgatatcgtcatggttaacgtccagcagattgctgaaatgggtgcttatgttaaattgttagaatatgacaacattgaaggtatgattctactaagtgaattgtcccgtagacgtattaggtcaatccaaaaattaattcgtgttggtaaaaatgatgtcgccgttgttcttcgtgtcgacaaagaaaaaggttatattgatttgtccaaacgtcgtgtttcttccgaagatatcattaaatgtgaagaaaaataccaaaaatctaagactgttcattccattttaagatactgtgccgaaaaattccaaattcctttggaagaactatataagaccattgcttggccattaagtcgaaaatttggccacgcttacgaagctttcaaactatccatcattgacgaaactgtttgggaaggtattgaaccgccatcaaaagatgttttagatgaattaaagaactatatctccaagagattaacaccacaagctgtaaagattagagccgatgttgaagtgtcttgttttagttacgaaggtatcgatgccattaaagacgcattaaaatcagctgaagacatgtccacagaacaaatgcaagttaaagttaaattagtcgccgccccattatatgttttgaccacccaagccttggataagcaaaaaggtattgaacaactggaaagcgccattgaaaaaattacagaggttattacaaaatacggcggtgtttgcaacattaccatgccaccaaaggctgtcactgctactgaagacgctgagttacaagctctattagaaagcaaagaattagataatagatctgactctgaagacgatgaggatgagtcagacgacgagtaa

SEQ ID NO: 1417 - DNA, 915 bp, Saccharomyces pastorianus
atgtctacttctcattgcagattttatgaaaacaaatatccagaaattgacgacatcgtcatggtcaacgtccaacagattgctgaaatgggtgcttacgttaaattattggaatatgacaacattgaaggtatgattctactgagtgaattatctcgtagacgtattagatccattcagaaattgattcgtgttggtaaaaatgatgtcgctgttgttcttcgtgttgacaaagaaaagggttacatcgatttatctaaacgtcgtgtttcttccgaggacatcattaaatgtgaagaaaaatatcaaaaatccaagactgttcattccatcctaagatattgtgctgaaaaattccaaatctctttggaagaactatacaagaccattgcttggccattaagtcgaaaattcggtcatgcttacgaagctttcaaactttccatcattgatgagactgtttggacaggtatcgaaccgccatcaaaagatgttttagatgaattaaagaactatatttctaagagattaacaccacaagccgttaaaatcagagcagacgctgaagtgtcttgtttcagttacgaaggtatcgatgccatcaaagaggctttgaagtctgctgaagatatgtccacagaacaaatgcaaattaaagttaagttggttgccgccccattgtacgtcttaaccactcaagccttagataaacaaaagggtattgaacaattggaaagcgctattgaaaaaatcaccgaagtcattaccaagtatggcggtgtttgtaacattacaatgtcaccaaaggctgtcactgctactgaagatgctgaattacaggctttattggaaagtaaagaattagaaaacaaatctgactctgaagatgacgaggatgaatcggatgacgaataa

SEQ ID NO: 1418 - DNA, 1017 bp, Saccharomyces pastorianus
atgtcaatacgtccagcaacacatgcaggctcatggtattccaatagagcccaagaattatctcaacaactgcatacatacttgatcaaaagtacccttaaaggcccaattcacaacgccagaattatcatatgtcctcatgccggttataggtattgtggatccactatggcctactcgtacgcatcgttggatttgaaccgtaatgttaagagaatatttatcttggggccgtcgcatcacatctatttcaaaaaccaaatattagttagtgcattcagtgagctagagacgcccttgggtaatctgaaagtggatacagacttgtgtaaaacattaatacagaaggagtatcctgagaacggaaagaagctgtttaagccaatggatcatgacactgatatggctgaacattccttagagatgcagctccccatgttggtggaaactttgaaatggagagaaatttctttagatacggtgaaggtaattcctatgatggtttctcataacagcgttgatgttgatcgttgcattggtaatatcttgtcggagtacattaaggatccgaacaacttattcattgtaagcagtgatttctgtcattggggccgcagattccaatatactgggtacgtcggaagcaaggaagagttgaatgatgccattcaagaggaaacagaagtggaaatgttaactgctaggagtaaactttcacatcatcaagttcccatttggcaatccattgaaataatggacagatatgcgatgaaaacgctaagtgatactccaaatggtgaaaggtacgatgcttggaaacaatacttggaaatcaccggaaacaccatatgcggcgaaaagccaattagtgtgatactaagtgctttatcgaagatccgtgatgccggtccttcaggcatcaaatttcagtggcctaattattcacagagttctcatgtgacaagtattgatgatagtagtgtcagttatacttcaggttatgttactataggataa

SEQ ID NO: 1419 - DNA, 285 bp, Saccharomyces pastorianus
atgtctgcgcttttacaagatatacagagaaaactgatcttccccatagattttcccagccaacagaaaacggagaactttcaacagttatcactcacaatcggagctgttatagcatgcatattgggattcgctcaacaatcgttgtatgttctattggttacgtatggcataagttgtgtgattactctactatgtgttttaccagcttacccatggtataataaacagaaattaaggtgggcacaaccaaaaattgaaattaatatcgaccagtatgattaa

SEQ ID NO: 1420 - DNA, 783 bp, Saccharomyces pastorianus
atgagtagaacagaacctagtgaagagacagcatcgtctctgcagtctgaattttcattcaacgagggaatatcagagaacaataagaaaaatgttgtattgttaaaccaaatagtcccattcatcctgaacacgtctcattacatgacagatctaatgtatattttatactacctggcccagaatcaggacaacaaacgtccaaatgcagacggtacatgtgtgtcgcataaggaagaacttttagcattgaagagtgatctttgcgaattaatttacgatttaaggacaggtttccgtttgttattggatagttgtgagttagatcattttgaaacacctgggaagtgtcgacatttgattgagaaggttttagttacatctatttatggagtaaatggactaatatctcaagaattaagcagattaaacgtcgatttcaaagaagagtttgttttacaactgcagaactgcttgctggggttcgtcaatctttataaatttttgaataaaattcccatgaacaaacaacaatctcagatgaacgatttacaaatgaaaatactagttaatgtgctacagaatgaattgttacccatttggaagttccagctggacctgcttaattgcaaactgttcaatgagctttctaaagataaaaacatggtaaaaatgtatagggaagctacgaacgatacggaaattgacgttagcaagggtgaaccatttatcaaatatgttaattggttaaaagaccaaatcattggcgaaatgactgtgtaa

SEQ ID NO: 1421 - DNA, 600 bp, Saccharomyces pastorianus
atgttgaaagaagttgtttactgcggagtttgctcatacccacctgattactgcgaattttcaggtaaattgaaacgttgtaaagtttggttatccgaaaaccatcctgacctttacgcacaactatacgggaccgaagagaatgcacaagaggaagtagaagccgtgaccaccaaactggctgaatccagtatcggtgaagccagagaggaaaagctggaaaaggacttattgagaatccaaaagaagcaggaaaacaaagaacaaagagagctagccaagaaactgtcatccaaagtgatcatcaagagagaggccagaaccaagaagaagttcatcgtcgctatttctgggctggaggtctttgacatcgacatgaagaaactggccaagacatttgcgtccaggttcgccactggctgttccgtgtccaagaacgtggaaaagaaggaagaggttgtcattcaaggtgacgtgatggatgaggtggaaacttatatacactcgctactggcagagaaggggatgaaagacgtcaaagtggagaccatcgacgcgaagaagaagaagaaacccgccgcagaaggcgtcgctaagtaa

SEQ ID NO: 1422 - DNA, 1758 bp, Saccharomyces pastorianus
atgggcttgttaacgaaagtagccacgtcgagacaattctctacaacgagatccgttgccaagaaactaaacaagtattcctacatcatcactgaaccaaagggccaaggtgcctcccaggccatgctttacgctaccgggttcaagaaggatgacttccaaaagcctcaggttggtgtcggttcatgctggtggtctggtaacccatgcaacatgcatctgttggacttgaacaacagatgttcccaatccatcgaaaaggctggcctaaaggccatgcagttcaacaccatcggtgtttctgacggtatctccatgggtaccaagggtatgagatactctttgcaaagtagagagatcattgcggactcgtttgaaaccatcatgatggctcagcattacgatgccaacatcgccatcccatcttgtgacaagaacatgcccggtgtcatgatggccatgggtagacacaatagaccctccatcatggtctacggtggtaccatcttgcccggtcacccaacctgcgggtcctccaagatctccaaaaacatcgacattgtctcagctttccaatcttacggtgagtatatctccaagcagttcactgaagaagagagagaagatgtcgtggaacacgcctgccctggtcctggttcttgtggtggtatgtacaccgccaacacaatggcctctgccgcagaagtcctaggtttaaccattccaaactcctcttccttccccgccgtgtccaagcagaagttggccgagtgtgacaatattggtgaatacatcaagacaacaatggaattgggcattttgccccgtgacatcctcaccaaggaggcctttgaaaatgccattacttacgtcgttgccacaggtgggtccaccaatgctgttttgcatctggttgccgttgctcattccgcgggtgttaagttgtctccagatgatttccaaagaatcagtaacaccacaccattgatcggtgacttcaagccttccggtaaatacgtcatggctgacttgatcaacgtcggtggtacacaatccgtgattaagtacctatacgaaaacaacatgttacatggtaacaccatgactgtcaccggtgacactttggcagaacgtgccaagaaggcaccaagcttgcctgaaggccaagagatcatcaaacctctttcccatccaatcaagaccagcggtcacttacaaatcttatacggttcattggcgccaggtggtgccgtgggtaaaattaccggtaaggaaggtacttacttcaaaggtaaggcccgtgtctacgaagaagaaggtgcctttattgaagctttggaaaagggcgaaatcaagaagggtgaaaaaactgttgttattatcagatacgaaggtccaagaggtgctccaggtatgcctgaaatgctaaagccttcttctgctctaatggggtacggtttaggtaaagatgtcgcattgttgactgatggtagattctccggtggttctcatgggttcttgatcggtcacattgtcccagaagccgctgaaggtggacctattggtcttgtgaaagacggtgacgaaatcattatcgatgctgacaacaacaagattgatttgttgatctccgaacaggaaatgtctcaacgtaagcaaaactgggtcgctcctccacctcgttacacaagaggtactttatccaaatatgctaagttggtttccaacgcttccagcggttgtgtcctagatgcttga

SEQ ID NO: 1423 - DNA, 1050 bp, Saccharomyces pastorianus
atgagcgtttccaagatggccatgtctaacctggagaaaatactagagcttgtcccgctgtcgcctaccagctttgtaacgcggtacctgccggcagcgcctgtagggtccaagggcacgtttggcgggacgctggtgtcgcaatcgctgctagcgtcgttgtacaccgtgccactcaacttcttccccacttcgttgcactcgtacttcatcaagggtggcgatccgcgggccaagatcacgtaccatgtgcagaacctgcgcaacggccggaacttcatccacaagcaggttagtgcgtaccagcacgacaagctgatctttacctcgatgatcctgtttgccgtgcagcggtctaaggagcacgactcgctgcaacactgggagaccattcctgcgttgcaggacaggcagccggactctcacgagtacgaagaggcctcgtcgctctttgaaagagaggtcttgagcccggagaagctcagccgctatgcctcgctgtccgacaggttccaagatgcagctgagatgagcaagtacgtggacgctttccagtacggtgccatggagtaccagttccccaaggatgtgttctactctgcaagacacacggacgagctagactacttcgttagggtgagacagcccatcacgacagcagagcaggcgggcaacgagtcgtccctgcagacccaccacccgcaccggattccgaagagcatctccccagcaaacgacgcccgctacaactacgtggccttcgcgtacctgtcagactcgtatctcctgctcacgatcccctacttccacggcctgccgctgtactgccacagcttcagcgtctcgctggatcacacgatctacttccaccagctgccccacgtgaacgactggatccacctcaaagtagccaacccgcggtcgcactgggacaagcacctcgtgcagggcaggtacttcgactcccgcacgggccggattgcagcaagcgtctcccaggaaggctacgtcgtctacggtgccgaacgtgacatccgggccaagttctga

SEQ ID NO: 1424 - DNA, 534 bp, Saccharomyces pastorianus
atgtttaacactactccaattaacattgacaaatggttgcaggaaaatgcagatcttttgaagccaccggtgaataattattgcttgcacaaagggggttttacagtgatgatcgttggtgggcccaacgaaagaaccgattatcacatcaacccaacccctgaatggttttaccaaaaaaagggatctatgcttctgaaggttgtggacgaaagtgatgtggaaccaaagttcattgatattactatcaatgaaagtgattcttacttattgcctgggaatgttcctcacagtcccgttaggttcgctaatactataggtatcgttgtggagcaagacagacctggcggagaaaatgataaggtaagatggtattgttcgcattgtcgccaagtggttcatgagagtgagctccaaatgctagatttgggcacgcaagtgaagcaagccattttagaatttgaaaatgacgttgaaaagagaacgtgtttccattgtaacactctaaactacgcccgtccccaatccaattga

SEQ ID NO: 1425 - DNA, 1182 bp, Saccharomyces pastorianus
atgagtgatgattcggaggtgtatttggatatatctattgataaaaagccagttggccgtatagtttgcaagatttttcgtgaaaaggctccaaagacaactgagaatttttatagactgtgtgcaggtgatgtcaaaagtcctctaaatgatcagaaatggctgagctacaaaggaaatggctttcatcgagtcgttaagaactttatgattcaagcaggtgacattgttcttgggacacagaaggattcctctccctcttctgttgggaaaggtggctgttcaatttatgccacagaggaggaggtaaaaggcaatagtgagtctttctgttacgggaattttgaagacgaaaacttgggggagtttcttgaacccttttctctagggatggccaacttgggttctccaaacacaaacaattctcaatttttcattactacatatgccgcacctcatttgaatggcaagcattctatttttggacaagttattcatggaaaatctgtggttcgtactgtggaacacttcaaagtagattctgatggagttcctgaatcggacattagaatcgacgactgtggagtgtgggatgaaagcaaaggcataccactatataatgcttctaatgacccaattgggggcgacgtatatgaggaatatcctgatgacgatacacattttaatgaggacgattttggtaacgcttttaaagctgcaaatacaattaaagaatctggcaccctcttgtttaaaaagaaagactatgagaatgcattcttcaaatatagaaaatcattaaattatattaatgaatatatgccagagcctgatttagataaagaaaaaaatgaagagtttactgatttgaaaatgaaggtttatttaaatctatcattggccctctttaacttagaaagatatgatgattcaataacatatgccacttatttattggagatgtacaatgttccgaacaaagatcgagccaaggcatactacagaagaggcaatagttatctaaagaaaacaagattggatgaagctttacaagattatagactttgtaaagaaatgaatcctgatgacaaagttatagagcaaagaatagaatatgtcgaaaatatcatggaagtgaaaaaagagaagacgagaaggaatatttcgaagtttttctcctga

SEQ ID NO: 1426 - DNA, 4071 bp, Saccharomyces pastorianus
atgtcactgaactttctgccagggcgtcctaacgatactccccagacggcgtgccaagcaacatggcaaaagcataccctcttcgcatactgttctgggaataacttaatcatcctctccaataagttcaccaggctgcagaccatatacacacaagcggactgtaccgcagtcgatatcaacagccagaatgggtttattgccctatctttccataatagggtcctcatctacaagcctattcatcaaatcatgcagaaccccaagtggactcagtgttgccagttgtttcatgacgatactccggtgaactgcctaagatggtcttccgataacgaactagccattgggtctgattttctctcattttggaaaattaaggataattttgggatatatcaacctattttacaatggaatcaaaagcaacctaaacccgtttacaatgtaatcatctcacaggactcgcaattaatagttagtgttgggaaatacgattccaacgccaagttatggaagcgtatttccatggttggagagcaagtcattttcaatctaaccatgctggctcacccgaagcccataactgcaatgagatggaggcatgagcctgatctgacaaacagaaagaacacaccttcgcggacactttatacattgtgcgaagataaagtactaaggatatggtcttgttttgaaatggacaagaaccatactgtgcagctatggggcgaagtacctctttcccctacgcagaaattttgcgtagtaatagataattggataataagacacagcctcaacaaggaagctttagaaagttacaatatatccaaatcagatattgttattctaggttcaatggttggggaaatggaaattatagctttacacaatctttcccaagacccgccaaaaccaatgaccaaagaaactatatcacataagataattgataaagcaactatgctgaacgacacaaaatacgtatacttccccgaagtacaaccctacgatgatttgaaagacaaaatatcgtttttggttcatgatttacaaggtatgataagacatttgctaatcgatcttctgcaactcataagcagcagagacgggcatatatccgtcgatttggaacacaaatttacagggcataacaaatctgtccaaaaattggtgaggagtagcgatggagaagcgttattgactacttctagattctcagaaaactgtgtctggtacccacaaaagttgagtcacggggtttctttgcggttacagaatattatacgtaccgagtctccaataaaatttgcagttgtacatgaactgggtaaactggtcatttgtttgcttgaaaatggggtcttgcaagcctgggaatgtccaacaaaccgaaaagaggacagtgaacagaagcaatcgtatttgcgtgcagaaactacattggaagagaataaatcaattcatccaatagtcatgttaaacacacccgagttaaagcatagtcatgagcgtcattttattgcgttgattttctctgatgggtcaattaaggcctttgaagtttctttgacacgcggtatttttgaagtcaaatccgatgctttggacattcacggcgacgacatttataggatctctatcatcgatcctgtccatcaaacgttctttagtaacaggcctcttatttccttagtaactaagaagggtcttactaggacatataaagccattgtcaattacgatgacagacacgttcaatggattaaggcttgtgaaattaatacaggaataataaaccccacatgcattagaggatcttctacaggtaaactgtgtatcgtcaactctacaggtaaagtgatgtcgttgtgggatttgaatagagcagttcttgaatatgaagaaacatttggtgatgctatcgaagatgtagattggactagtaccgaatatggccaaagcatagtttctgttggatttacaggatacgctttgttgtatactcaattgagatatgattacaccaataatacacctagttatttacctatagaaaaaattgatatcacagctcacacggctcataatataggtgactctatatggatgaaaaacgggacatttattgttgcttcgggaaatcaattttacatcaaggataaatctttggatttaaaggatccattcacataccaatctattggttcaagaaaaatactatcgaatgacatacttcatttaagtagcgttttgaatggcccactaccagtgtatcatccccaatttttaattcaagctatttatgccaacaagttacagcttgtcaaagagttgctgttgagattgtttttagcactaagaaagttggatttcgaatcacaggatgtgtctaatttagactctaatttaggtatgaatcccttgaagttctttattgctaaagacagagactatccgacagaaacgttccctgatccataccccaacttcaacaagacagtatctgcagcactttccgagcaattgacgaaaatcactcttccatatttgacacgtcaccaacagattacacttatcacagtcatcgaagccgtggatgaggtaactaaagatgaaaatgtggtggattacaacggcgttagatttttaatgggtgtaaagttatttttatcccacaaaaatgttcaaaagagtattctgatgagagacgtttcttgggctttgcattcagataacaaagaaataatattatcatttattgaccaccacataacttcatggaatcgtgcgtgcgaatacaagatagcttattggatcaaagaacaagatttagtaaagaaatttgaagatattgcaaaatatgaattttccaaagatgacaagagagatccaagtcggtgtgctatattctaccttgcgttgaagaaaaaacagatactattaagcttgtggagaatggctattggtcatcctgagcaacagaagatgattaggtttatcagtaacgattttagtgtacctaggtggagaactgcggcgctcaaaaatgccttcgttctgctgagtaagcataggtatatggatgctgcagtgttttttctcttaacaggctctttgaaggattgtgtcaatgttctttgcaagcaagtcggggacatggatatggctatcggtgtatgtcgtgtttatgaaggtgataatgggcctgtgttgggagagctattaaccacacaaatgttgcctgagacaataagggagaacgatagatggaaagcaagctttatttattggaaattaaggaaacaagaagtagctattaaagctttgatgactgcaccaatcgatttagaaaacaattctgaggttgttagcaaagaaacctgtgttaacagatcatttctcgtcgaagatcccgctctcctttatttgtacaatcacttgagaaatagaaacttaaagtactttattgggtctcttaatgttgaagccaaaattgaatgtactttgattttaagggttactgatattctttgccgtatgggttgcaactacttggccgcttcacttgtgaagaattggaagttcattgaaagaaattccgttcctgtccaaaaattactagagagtcccgccaaagacagaacttattctgttattggtgctatgacagctgaaccaacgtcaacagctaggatgaggcctagtctttttgataaatttggttcctctaacccctcagaggcggagcctttcaaagccagtactacattaccaagtaacttgttagatgacttttcgcaaccaccgccaaatatctcttcaccaacgtccctcgatcaagattcttcttcggcacccagaagtctattggatgattttgcatctcctttctcttcccagcacaaagagaacgtagctccaagcatgttagatggctttacagagaaaacagaaaactctgaaaatgtgaatgggaaaagtttacagagcaacttctcatcagaagagccacagaatccaagaaaatcggctgtgaccaaaaacttactggacgactttatgtga

SEQ ID NO: 1427 - DNA, 327 bp, Saccharomyces pastorianus
atggttgctagctgtaaggatcagaaaagggctgttgccatctgtttgcagaggtcgccctgcgtgatgatagagaggcacaaccctcaagagtgtctagacaatccagacctgaacaaggatctgcctgagctttgtatagcccagatgaaagcatttttggattgcaaacgaggaatagtggacatgaccaagcggtttaccggtaacgcacccctctcaactggcaagtacgatcagcagtacgaaaacctgtgcacggggaaattcaatcccagagaagaaatggagaagttgagaatgctggatagcaagaagaaggactga

SEQ ID NO: 1428 - DNA, 2679 bp, Saccharomyces pastorianus
atggtctcgttttttgggaggcccaatgagaagaaacgtagtgggggagaggttacacccaaggagctggtgtcacattctgtagctcacacaaggagggcggtgtcccaaccaggacggcctgtatcgaaacgttccttagccgctaaggtagaagagaggcagtgttcaagtgccaagaacaagaaagagatctcttccgcgcatgcggcgggaaaggatgatacatcatctccagttcttctcaattgtctttgctgtggagttttgctacggtttcctgcctcgataaggaaatttcagtgcagtgcatgccaggtgactgttgctatagaggaacccggcgttagcagtggattggaacccggtgtgcacgttccgtgcagcttagacagcttgcaaagagtggtaaaaaggtgccacgatgatctacaacggctaaaaaaaagtgagattttggataaagatagaaaactatcaactttccaaccggtaacaacctatttgcaggaccggtttcatgacgttgacattctaaacgagtcgttcttgatacacgacacgaaacgacacgagaagctactaaactatgaagctcttcaaaaattttacagtctattgtcgactctgcccacaaggaaaccatattatagcatgctttgttgttgtaacaaccttttgaaaagagtgacagtttatgaaagtaaagatttgcaaatatccaaatatcagtggctgcttattatattgaacatacccacgatacggagctgcctgattagagataggaagtgcaaaaatgcatttgaaactccgcaaataagagcattgtcttacgaattggttaagcggtgtataggttatttatctaatttatcgacgaaaacttctcaactgttgattcaggcactacggcgactttcgacaaatgattttttatatcaagtggaaattttgaacttatatatcaatttccagttttcccgactcctttccaacgaaatggcaaactgcaacgtgaacaacaataaaaaaccagaggatgagatgcgttcccgtcttcgtcgacatcataccactggacacgagttcctcagtacgaggcccgtaagtgcagtactagatgagaaaagggactctgactttacacatcctaccaatacgaagataaaattcaaagtttatcaatacgaagacaattggcatattacttctgcgacacgactaatgctggtctattacatagctaatactagaaggaacgaccatagagccttgtcaattcaaagcttttacaatataaccttggattttgtcgattataaacaagacttcgatcattggcggggattagctcaaaagaccaaaatgaatcaattgattgaagaatggggaaactccaagacccaaaaaaagttctcattctgcaaatatccatttgtcttgtcactcggcattaaaatttctaccatggaatatgaaattcgtagaatcatggaacatgaagctgagcaagcctttttaacttccctagataaaggaaagtcggtcgatgtttatctcaaaattaagatacggcgtgaagttatttctcatgattctttaagatgcatcaaggcacatcaaggtgatttattaaaatcattaagggtagaatttgttaatgaacctggtatcgatgcgggcggtttgagaaaagaatggtttttcttattaacaaagtcattgtttaatccaatgaatggattattcgtttacattaaagaaagttcgcggtcatggtttgctatcgatcctccaaattttgataaatcaaaaaaaagcaactctcaattagaactatattatctgtttggagtagtcatagcattagctattttcaacagtactatcttagatctacagtttcccaaggcattttataaaaaattatgcttagagcctttaagttttgaagattattctgaattgtttccagaaacaagtaggaacttgataaaaatgttgaactatacagaggatgatttcgaagaagtcttttctttaactttcgaaaccacatataaaaataataactggattattagtgacaataaatcgacaagggaatatgtaacggtagaactatgtgaaaacggtaaaaacattccgataactcaaaaaaataaacatgattttgtaactaaatgggtggagttttatttagaagagtctattaaaccacaattcaacagattcatttccggttttaaaagagtcttcgcagaatgtaattctataaaactattcaattttgaagaattggaaaggttagtatgtggggatgcagaacagactaaatttgatttcaaatcactgagatctgtgacgaagtacgtcggtggattttctgatgactctaaaattgtccgttggttttgggagattatagaagactgggactatccattacaaaaaaaattactacaatttgtaactgcgtctgatcgtatacctgcaacaggtatttccaccatcccatttaaaatcagtcagctaggcacacatgatagtaacgatttgccattggcgcacacatgctttaatgaagtgtgtttgtggggctattcatcgaaaaaaaaaatggaacaaaaattactttgggcggttaatgaatctgaaggttatgggttccggtag

SEQ ID NO: 1429 - DNA, 2331 bp, Saccharomyces pastorianus
atgccaacaacttatgtaccaataaaccagtcaattgaagatgatgaagatggcattgaaaccagtagattcactaatattccagaaacccaaaactttgaccaatttgttacaattgacaagattgcagaggcaaatagaccgttatcaatagactctgatagggactttcttaattcaaaataccagcattatcgagaggtcatatgggaccgtgcgaagacatttatcacattgagtaccacagccattgtcattggctgtatagccggttttttgcaggttttcacggagactttggttaattggaaaacaggtcattgtcgaaggaactggttattgaataaatcattctgttgtagcaatgtagtcaatgaagttagttcggcaagcaatgcgctactgaaaagacaagaatttgaatgcgaagcacaaggagtttggacaaattggagtggtcacatcttccctttcattatcttcatggttttgtcggtcttatttgcccttattagtacattgttggtaaaatatgttgctcctatggccactggttcagggatctctgagattaaggtatgggtatctggctttgagtacaataaagactttctaggtttgttgacattggttgtgaagagtgttgctcttcctttggcgatttcctcggggttgagtgtaggaaaagaaggaccgtcggttcattatgcaacctgttgtggttttttgtttacaaaatggttacttagagataccctaacatattctacacaatacgagtacttaacggcggctagtggagcaggtgttgcagttgcctttggtgctcctatcggtggtgtactttttggtttagaagagattgcctctgctaatagatttaactcctctaccttatggaaatcttattacgttgccttggtagctataactactttgaaatgtattgatccattcagaaacggtagggttattctctttaatgtaacgtacgacagagattggaaagtacaggagattcccattttcatagccttaggagtttttggtggtttgtatggaaaatacattagtaagtggaacatcagctttattcattttcgcaaaatgtacttatcttcatggccagttcaagaagtgctttttttagcgacactcactgctttcatttcttattttaatgaattcttgaaattagacatgacagaaagtatgggcatattatttcatgagtgtgtcaaaaacgacaatacatcgacctttggacacaggttgtgccaattagacgagaatacgcacgcttttgagtttttaaagatttttacctcactgtgttttgccactgttatcagggcattattggtggtggtgtcctatggcgctagggttccagcgggtatttttgttccttctatggccgttggtgccacttttggacgtgcagtcagtttgctggtagaaagatttattagcggtcctgccgttattactcctggtgcttatgcttttttgggggccgctgccacattaagtgggataactaacttgactctaaccgtcgtggtaataatgttcgaactgaccggtgcctttatgtacattatacccgttatgatcgtagttgcaataacaaggataattctaagcacctcaggcatttctgggggtattgccgatcaaatgattatggtcaatggtttcccatatttagaagatgagcaagaggatgaattcttagagaagtacactgcagagcaaattatgtcttcaaaattgattactattaatgaaacaatttacctctctgaattagagtctttgctatacgattcagcgtctgaattttccgtgcatggatttccaataacaagagatgaagacaagtttgaaaaggaaaaaagatgcattggttacgttctgaaaaggcacttggccagtaaaataatgatgcaaagtgcaaacagtagtaaagctcaaacaactttggtatacttcaacaaaaccaacgatgacctaggccatcgtgaaaactgcataggatttaaagacattatgaacacatcccccatcaccgtaaaaccggaggtatcgacgtctttgttatttcgtatgtttaaagaactaggttgtaaaacaattatagttgaggaaagtggaatactaaaaggtttagttactgctaaaggtattttgaggtttgaaagaacgaagtatagagaaattcatggcgcaaaattcacatataacgaagcgctggatagaaggtgctggtctgtcatccattttataaccgaaagattctcttacaaccgaaataataacaatatttaa

SEQ ID NO: 1430 - DNA, 3516 bp, Saccharomyces pastorianus
atgggcgagcttgcggaagaactacccattccagacaatgctcaagacttgtcgaaattgttacgttcaataaacaccaaaccataccaaattgcccagattgtctcaagatttgataaattgaaagtttacttcccaaacaaagaagtctttgtcttagaactgcttatagataggcttaataatggaaatttagatgatttcaagactagtgaacatacttgggttattttcaaaagactgttggaggcaattagtgattcaatatcaataaaaaaactattgaaaaaactgaaaacagtttctgttatgataaagacctttcaattgtggccgaaggacaaactgaacagcggtcgcggttcttttgtgagtgcatttttttctattaatagttatttaatagtcaatttctctgttgaggaatccttccaacttttggaacaagttataaacgggttaagttcattctcaacacccgaaattgccctgtcatatctacaagacgcctgcagtctaactcacattgacaacattattgcaacggataacaaaattgctgcttgttattgcaaacacatgctactgccaagcttaaagtatttttcacaggttgaacagcctacatcttcaagaaaaacttccgtttgcctgtccggttttatgagcaaattccttctacaaccacgtgtagactatatgaaactaaacgaaaagttcgttcaagagaatgcatccgaaattagcgatgaaatggcttattattattttagtagttttgtagaattcctatcgaaagacaattttgctcaactagaagctatctttaccgttctcgctgccaaaaatcctggtttaaagtgccgatttctggctcttctatctgattcaaagaaaaccgtttctcaagagtttttagagaacctgttatttgaaaccttatcatcaagtaacggacatgaatcattatcgttaataccaactatcctgaaattagatattgaaatttccataaaacatacttcccgcttacttgagttggtttatttgaaacattctaccgatgctctcttttcttatcaaatttgggatttaataatccagtctcacgcgaacgcaagagaattaccaatcttctttaacaaaataaatgaatattccgaaaaaaagcctgattcttattttttgttgaatgatcaagtatatgtcaagtctgttacgaagcagttatttacgttatctacaatgcaatggaaaaatttactgcaaaatttacttgaccaagttaatcgcgattccactaatagggttcccttatacctgatacgcatatgtttagaaggactatcagaaagtgtttctcacacaactcttaatgaattaaagcctatattatcccaggtatttattttggagtctttcgataacaatcttcaatgggacttgaaataccatataatggaagtctatgatgacattgtccctgaagaggaattaaagaaaattgaccacatattttcctccaatatttttgatactacaccagaacatcttgaagagctattcttttattgtttcaaattaagagagtatatctcttttgacatttccggtgtaatcttgaagttcatgcgtcattttgaaaatctggatcatgaaaccaaatcaaatttatcgttttctatcgtgtcaaaatttgcaactttagtcaacaacaacttttcgagagacgatatttcttccttggttgatttgttattaacagattcgactaaactgtgggaattattaaacaatgatgacattttcgaagaggcaaatatcacacatgctttggtaaataagctcgctttatcatgcgacaagggttttgcgttagacgcattgatccaaatccctattcaatgtatcaacaaaaacgtaagggtcgcacttatcaacaaacttacgagtgaagctgcctgtttagatgttagtgccaagaaatgtatccttcatctattagcaagcccaactttcaagtcaaatatcgaaatggatttctttgaattatgtgagaaaacagtaacgactcccgaaatagctattttagaaagcgaagaagtacaagttggaggtgaagaatccgttttcgaaaaagtctggactaaccatttatcacaggcaaaagaacctataagtgagaagttcttaaataacggatatgatgttattaagaagacgatgttatcgcccaatggcgaggagaaaataatccttgctagttttgttgtcgcaaaatttttgaaacaaaatactaaacatagggcggttcaagacataatcgtcaactatgccgtaaagatcatagaagattattcgcaacagtttgaccctaaggcaatcccccttctcagaacctctatggccagattatatgagatagcagcattcggaaaatgtgacatttccaagcataaagcaacaattctaggatcattctctaaaatcatgcttcggtaccattccgacaaaatacgtcacccaaaagaagagcaggaaatgtttttgcttcattcactcttggtcgaggataagttagaatacatttttgcggagtacttgaatattagccacacagttaaatgcgattttgctttagagttttgcttaataagaagtcttaaacaaggccctgatgcccttaaccgccttattttgaatagcgcccaatcattctccaccatcaatgaaatttgtgctgaaaaatttattacaatttttatcataatgttgaaacagatcacaagggacaacaatcttggacatcatctttttgtagttgcgatgctagaagcctataccagttgcaacgtcaaaaagtttggccacaggtcttacttacttttgtttaacgctgtcaaggaatttttggtctcaaaaccttggctctttacgcaatactgcattgagatgttgcttcctttctgcttaaagtccataagcttactaaccagcaatgagccatactttgaaattgatgaatgctttgtcagcatcatcgaagttatagaccatatactgttagtccacaggtttaagttgtctaatcgtcaccatttaataaactccgttctttgccagcttttagaaatactagcaatgcatgacggcaaactctctatggggccagcggatgccgtatctagactaataacaaactattgtgagccgtataatttctcaaatgctcaaaatgggtcgaagaacaacttaagctcaaagataagtttgatcaaacaatccattagaaaaaatgttcttgtggttctaactaagtatatccaactgtctattactatacaatttagttctaccatcaagaaaaacttacagcctggtatttatgcaatatttgatatattatctcaaaacgaactaagtcatttgaatgctttcctagacacacctgggaggcagtatttcaaatcactctaccttcaatacaaaaagagtggtaaatggcgcgaagattaa

SEQ ID NO: 1431 - DNA, 1050 bp, Saccharomyces pastorianus
atggaccagcaaacttcatcttttatcaatgacaaactatttactgaggtgaagcccgtacttttcacagatctaatacatcatttgaaagttggcccatccatggcaaagaaattgatgttcggatactacaaacgtaccaccaatgctaaattcaactgtgtagtaatgtgctgctataaagatcaaaccatcaagattatacatgatgtcaccattattccagaccaagatttaatagtcgattgcttcatttatgctttcaatccaatggatactttcataccgtactacgatatcatcgatcaaaagggttgtctgaccattaagaatccgtatgaactcacggtttctgaatcatcgagggctgtagagaggactaagaccttggaagagaaacctaaacagttggttaggcccacagtaagatcaaaaaccacaccagaagaatctgctagtaagaaatccaaatctaaagacatgggcctcaggtccactgctctactggctaggatgaagaaggatagagacgataaagaagcctcgagacaaaacgaactacgtaagagaaaagaggagaacatgcagaagataaacaaaaaaaacccagaaagagtagctcaaatggagcaattaaacaacctatttgtagaagacgacttagaagatgaagagctggacgagaacacacgacccaaatcgcctgaaaaagctgctgtcaatgacaacgataagaatagtaatgatttagaagacctgttagaaacaacagcagaagattcgctcatggaagtgcctaaagcaaagcaaacagaatgctcagtaatagagataccaaaagagcctaaacttgaagaagagtcctcttcgtttattgacgaggacggctatatagtcacaaagagaccagccacttctaccccaccaaggaagtcatctccagtggcgaaaagagccttatcttctaaacaacaagaaacaccatcaacaagtaaaagatcaaaaaagcaaggtactttagaaagcttttttaagaaaaaatccaaatga

SEQ ID NO: 1432 - DNA, 423 bp, Saccharomyces pastorianus
atgatagacttgaaagtctcaccgctaacaaagatcatttctctttcagggttcctggcactggggttccttttggtcatactaagttgcgcattattccataattactacccattatttgacatcttgatctttttactggcccccattccaaatacccttttcaatacaggtaatcagtaccatacatccgacttcatgtcggattcgtcgaacactggccaggatctagctcattttctgacagggatgctggtgacaagtggtgtggcgctgcctgtcgtcttctaccattgccaattgatcggccatctaagctgcatcatgtgcatgaccggtggtcttatcatatattccagtattgttattttcaagtggtttttcaagaaggatttcaatgaagatgactcccttttcggttaa

SEQ ID NO: 1433 - DNA, 1968 bp, Saccharomyces pastorianus
atgcttgctgctaaaaacatactaaacaggtcgagcctgtccaactccttccgcgtcgctgcgcgtttgcaatctaccaaggtgcaaggctctgttatcggtatcgatctgggtaccaccaactctgccgttgctctgatggagggtaaggtgcctaagattatcgagaacgctgaaggttctagaaccaccccatccgtggtggctttcaccaaggagggtgagcgtttggtcggtattcctgccaagcgtcaagccgttgtgaacccagaaaacactttgttcgctaccaagcgtttgattggtcgtcgtttcgaagacgtcgaagttcaaagagacattaagcaggttccatacaagatcgtcaagcactccaacggggatgcttgggtggaggccagaggccaaacctactctccagctcagattggtgggttcgtcttgaacaagatgaaggaaactgccgaggcctacttgggtaagacggttaagaacgccgttgtcaccgtccccgcctactttaacgattctcaaagacaagctactaaggacgcaggtcaaattgtcggcttaaacgttctgcgtgtcgttaacgaacctaccgccgctgctttggcctacggtctagaaaaatccgactccaaggttgttgccgttttcgatttgggtggtggtactttcgatatctccattttggacatcgacaacggtgtcttcgaagtcaagtccactaacggtgacacccacctaggtggtgaagatttcgacatctacttgttgagagaaattgtttcccgtttcaagacagaaaccggtatcgatttggaaaacgaccgtatggccatccaaagaatcagagaagccgccgaaaaggcaaagattgaattgtcttccactgtgtccactgaaatcaacctaccatttatcaccgccgacgcctctggtccaaagcatattaacatgaagttctccagggctcaattcgaaactttgactgccccattggttaagagaactgtcgatccagtcaagaaggccttgaaggatgctggcttggccacttccgacatttccgaagtcttgctagtcggtggtatgtccagaatgccaaaggtcgtcgaaaccgtcaagtctttgttcggcaaggacccatccaaggctgtcaacccagacgaagctgtcgccattggtgctgccgttcaaggtgctgtcttgtccggtgaagtcaccgacgttctattgttggatgtcaccccattatccttaggtattgaaactttgggtggtgtctttaccagattgattccaagaaacactaccatcccaacaaagaaatctcaaatcttctccactgccgccgccggtcaaacttctgttgaaatcagagtcttccaaggtgaaagagaattggttagagacaacaagctgattggtaacttcactttggccggtatcccacctgctccaaagggtgttccacaaatcgaagtcactttcgacatcgacgccgatggtatcatcaacgtttctgctagagacaaggccacaagcaaggattcctccatcactgttgccggttcttctggtttgtctgaaaacgaaattgaacaaatggttaacgacgcagaaaaattcaagtctcaagatgaagccagaaagcaatccattgaaaccgccaacaaggctgaccaattggccaacgacaccgaaaactccttgaaggaattcgaaagtaaggtagacaaggctgaagcccaaaaggttagagatcaaatcacctcattgaaggaattgatcgctagagtacaaggtggtgaagaagttaatgctgaagaattgaagaccaagaccgaagaattgcaaaactcttccatgaaattgttcgaacaattgtataagaacgactcaggcaacagcaacaacaacaacagcaacaacaatgctgaatccggtgaacctaagcaataa

SEQ ID NO: 1434 - DNA, 474 bp, Saccharomyces pastorianus
atgtctgacgaagaacacacctttgaaactgccgatgccggttcctctgccacctacccaatgcaatgttctgctttgagaaagggtggtttcgttgtcattaaaggtagaccatgtaagattgtcgacatgtccacttccaagaccggtaagcatggtcacgccaaggtccatttagtcactcttgatgtcttcaccggtaagaagttggaagatttgtctccatccactcataacttggaagttccatttgttcagagaaacgaataccaattattggacatcgacgacggtttcttgtctttgatgaacatggatggtgaaaccaaggatgacgtcaaggccccagaaggtgaattgggtgacatcatgcaaactgctttcgacgaaggtaaggacttgatggtcactatcatctctgccatgggtgaagaagctgccatttccgtcaaggaagctccaagatctgattag

SEQ ID NO: 1435 - DNA, 330 bp, Saccharomyces pastorianus
atgactgaattcaaagccggttccgcaaagaagggtgctactcttttcaagaccagatgtctgcaatgccacaccgtcgaaaagggcggcccacacaaggtcggtccaaacttgcacgggatcttcggcagacactccggccaggctgaagggtactcttacactgacgctaacatcaagaagaatgtgcaatgggacgaaaacaacatgtccgattacttgaccaacccaaagaaatatatccctggtaccaagatggccttcggtgggttgaagaaggaaaaggacagaaatgacctgatcacctacttgaagaaggtctgtgaataa

SEQ ID NO: 1436 - DNA, 1590 bp, Saccharomyces pastorianus
atgaaggagaatggtatagataatggtgtggataaatggatagataagggggggagtgacagtgatcatcgtaacaattataacaacagcttaatgaaaaaagcggtgatgaataatgaacaaattgatagaacgcaggatatcgataacgctaaagagatgctaaggaagatatcgagtgaaagcagctcgcgcagaagctcgctgttgaataaggacacatctcttgttaatggcaattcaggtaacggcggcggtacaggaattaatgcgacaagagggagttcgaagagtagcaacacacactttcagtatgcctcgacggcatatggcgtaagaatgctgagcaaggatatctccaataccaaagtcgagttagatgtggaaaacttgatgattgtcacgaaactgaatgacgtgtcattatatttcttaacaagagaactggtggagtgggtattaatacatttcccgcgtgtgactgtttatgttgactctgaattgaaaaatagcaagaaatttgccgccggtgagctgtgtgaagatagcaagtgtagagaatcacggatcaaatattggacgaaggatttcatcagggagcacgacgtttttttcgatttggtggtgactttagggggtgacggtacagtgcttttcgtgagctccgttttccaaagacatgtgccacccatcatgtcattttcgttgggatcgctagggtttttaacgaattttaaattcgaacatttcagggaagatttgccgcggataatgaatcacaagatcaagactaacttgcggttgaggttggagtgtaccgtttatcgcagacaccgcccagaagtggaccctcatactggaaagaaaatatgcgtggtggaaaaactaagcacacaccatatcttaaatgaggtgaccattgatcgtggtccaagtccgtttctctccatgttggaattgtacggggacggctcgttaatgactgttgctcaagccgacgggctaattgctgcaacacccacggggtcgacggcatattcgttaagtgccggcgggtcgctagtgtgccccacggtgaacgcgattgcactaacgcccatttgcccacatgcgttaagcttcaggcccatcatcctgccagagagcataaatctaaaggtgaaagtctcgatgaagtctagagccccagcatgggcggcttttgatggtaaggatagaattgagctgcaaaagggagactttataactatatgcgccagtccatacgcttttcccacggtggaggcctccccagacgagtttatcaacagtataagtcggcaacttaactggaacgtgagagaacaacaaaagtccttcacgcacatcctgtcgcaaaagaaccaagagaagtacgcgcatgaggcgaacaaggtcaagagccagactgaaccattggaagtgatcagagacaaacagccagtggaagttcatgcccccaaagagaacgggaccgacgatgagagcgacgatgagagcgagaactgcgaagcttgtaaattgaaaccttcaagcatggccaagccttcgcaagcaagattctccgtctga

SEQ ID NO: 1437 - DNA, 726 bp, Saccharomyces pastorianus
atgagtaggaacgtggacaaggctaactccgtattggtgcggttccaagaacagcaggcagagtcctcaactggatataaagactattcacgctacaagagacccaagaacgtttccaagataaaatctataaaggaggccaacgaatggaagcgacaagtaagcaaggagatacaacaaaaaagcacaagaatatacgacccgtctttgaatgaggtgcaaatcacagaactcaacgacgaactgaatgatctgttcaaagagtggaagagatggcagtggcacatcgaccacaagcttctggagaaaagaacaaagaggaagacgctagaagacagccatctgctgacaaacgcagggaagataatacacgggaagagatattttgggagggctttggaattgcccgaagtgaaagaatgggtcaaacagcaggagactcagaagcagaatcacacggatatcgtgaacacgaaactcgtaccgaaaaataagaatgacttttactatcttggtaacgttacaactgctataacggattttgaagccaactggacgcctgttttaaaagctcattacaatttgcctgtgaatgagcaaaaaaaagaactagaagaagaaagaggaaaatataaacaagacacgcatgtgcccactcttgctgatatggagcagtggctggtgcagagaagaaagaaaaaattgttagatgaactgaacctttag

SEQ ID NO: 1438 - DNA, 1506 bp, Saccharomyces pastorianus
atgataaggtcagtaaggagggttttcatttacgtatcagtattcgtattgatactgattttgaaaagacaattaagtaccaccgatcaaatgtcgatgaaacagccagtagtggtcattggttctgggctagcaggtctaaccacaagtaaccgtctcgtaagcaaatttaaagttcctgtggtgctgctagataaggctgattccataggtgggaactctatcaaagcatctagcggtattaatggtgctcaaacagacacccaacaaaaactaaaaattatggacactcaagaattgtttctagaagatactatgcactccgcaaaggggaggggaattcccttactaatggacaagttgaccaaagaatccaggggcgctataaaatggttacagacggaattcaatttaaaacttgatcttcttgcacagttggggggtcattctgctccaagaacccacagatcttctggtaaactgccaccagggtttgaaatcgtgcaggcactatcgcagaaattgaaaggtatttcttctgaagattctaatcttatgaagattatgctaaaaagtgaagttgttgatattgagctgaataatgacggccatgtcactggtgtaatatacttagatgagaatggcacccgaaaaatcctgaagtctcaccacgtcgtcttttgttcaggcggtttcggtttctctaaggagatgctaagagagttttcaccgaatttgattcacttgccaaccactaatggtaaacaaacgacaggggatggacagaaaattctctctaaattaggcgctgaactgattgatatggatcaagtgcaagtccaccccactggctttatcgacccaaatgatcgcgaaaataattggaagtttttagctgcagaagcactaagaggtttaggggggatcttattacaccctaccactggtagacggtttaccaatgagttgaacaccagagatgcggtgaccatggacatacagtctaagtgtccaagaaacgataacagagctcttttggttatgagtgaaaaagtttacgataagtatacaaataacatcaacttttacatgtccaaaaatttggtcaaaaaagtgcccattaaagacttgattcaaaactatggcctacagactacggcgcaagacttggttaacgaattgaagaactattctgatgttaataccaaggatgaatttgatagatcattaattaccaacgcctttgatggaaatattgcacccgaaacttctgtgtatgtaggtgagattacgcctgttgttcatttcaccatgggtggtgtgaaaatcaatgaaaactctcaagtgattatgaagaattcagagaaggtattgtccaaaggcctatatgccgcaggtgaggtatctggcggcgtccacggagccaatagattgggtggatccagtttattggagtgtgtcgtctttggtaagacagctgctgacaacatagcaaaattatattaa

SEQ ID NO: 1439 - DNA, 1713 bp, Saccharomyces pastorianus
atgtatcgtagtaggaatagaccaaaaagaggtggtgaagatgaagttaagggtccaaactctgcattaactcagttcctgagagaagaagggatcagcgctgaaaatatcaaacaaaaatggtaccaacgccagtcgaagaagggcgaagatggaaaaggcggaaagagtgaaaaggagcaaagtacgcaggacgatgactcgactacacaggtttcgcaaaaggaagtaattgaagaagaagaggttgatgacttggaacttggcagtggttctgaaacaggaaaggccgagatcgcttatgatgctagaatgaatctggttgccgcagatagtgacgaagaagaatatgaaactaacagtgcgtcggccaccccagtaaatttgagtccagctaagaaccaggagtccttaataaagaagagacaaaatactgcgaaaatcattcaaaaccgccgtaaaaaacgcaagagagctgccaatttattggacagacgtgtcaataaagtgtctagcttacagagtctttgtatcgggaaaatcagtaaaaatatctccaagtggcaaaaggagacgggtgattcttcgaagttggtatttaacagattaagagatgttctcggtggtgtatctaccgctaatttgaacaatttggcgaaagcactatcaaaaaatagagcactgaatgatcatactttacaacttttcttaaagacagatctaacaaaactgacttttaatgactgctctaaggtttctttcgatggctacaagacactagccatcttttcgccgcacctgaccaaattatcgctacaaatgtgtgggcaattaaataatgaatcactgctttacattgctgagaagttgccaaacttgaaagcattatatttagatggtccttttttgatcaatgaagacacatgggaaaattttttcgcaaccatgaaagacaggctagaagagtttcatatatcaaacacacaccgttttacagacaagtcattatcaaacttgttaataaattgcggttcaactctagcctctttgggattatctaggctagattcagtgtcaaactacgctttactgccgcagtacttaatgaacgacaaatttcacacactctccattgaatatccactcaatgaagaatatgttaacgatgagattgtcataaatatattaggccaagtcggatccactttgcgaaagttggttttgaatggttgtgtggaattgacggattcaatgataatcaatggtcttactgcattcataccagaaaaatgccaattggaggtcttgagtttagaagagctagaccaaataaccacggactctttggtttactttttcagtaaagtagaactaaataaactaaaagaatgtagctttagaaggtgtctacagctaggtgatatggcggttatagagttattgctcaatggagctaaagatagtctaacaagcttgagtttcaactcactgaaagagttaacaaaggacgcttttgtaacattaacctgtcctgacttgacatacatagatctagggtttgtgcgttgtgtagacgactcaattattcaactattgggtgagcaaaatcccaaattatccgtaattgatgtgtttggagataatctggtcactgaaaacgcaaaaacaagacctggacttacactaataggaagacaaagtgacagtatataa

SEQ ID NO: 1440 - DNA, 1737 bp, Saccharomyces pastorianus
atgtcaattagacctcttacgctaaatggcttggatgatccggagacttcttttgaggaattgaatacaacacttccgcgatttcaatcccacgaaacatcaacattgagagatagcgcgccaccattgagcacatcaacgtatttaccgactccatcatcaataggtacttccgacactggaacggttttttcaaacagcgctgatgcattctggtctgataaacaaggtgacaatgatcaagatatggaagtagaacaggatgacgaatttttgaatgatttccaagaatttcaaaacaagaaggatgattttgatgatgctataaagacaaattttcatttacgaaacaagtgtgggtctactcccttcaagaacgttgatttcgtaaacgaatttgataaaaaactgaattttgaactagacaaaccaagattaaagcagcccagatcgatgatggagctaaagtcaagaaggaaactgtcaaacagtgtatcttcaaaaaatttgaaaggcgggaattcagtgagattcaaaaaatccatgccaaacttagcgttatttagttcaacgatccgagaagaagaagaagaagaagaagaaggtaaaggggaggaacaacaagaacaggattatgaagatgatgatacacagggtacaattttggcgagattcagttctgatgacgagggtggatttttaacaggattcggagaattggaagacgaacctctcgatcaaacattttccctaagccgtggacaagaccttaaacggcccccattcttaaaaaggaagtctgcttcatcgttgccattaaagatatcgcctactcagtatgacatagtaaaacatgacgaactactaacgcccggtctccatagccggcaacgggaatggaatactcaacaggaactagattcttttagagaggaacgaccagttagacgttatcccagccacaatttacaacttcatggaccagctaaaatcaaaacaataaaacaacagattgatcacaacactccgatgaagaagggttcaatggtatataatcctcagactatgaagtgggaaggaaatgaaaatgtattaaacaaattcagcgatgtggatacagcgaacaggaaagctttactaataaagaataagctccagcgagatgctgatgatcatactgcaaaacaaaaaagatattccgatctacagaactcaagatccgcttcaaggaatcaaaaggttgtcggtaatatggtcctcgatgaacaaaatttgagatgggtaagtatatctgaggatgaagccgacccttttgcaggtattccggagataaatccaccaccagtgagaacaactatgaagaaacgcagctcttctccattcttacgttcccaaagccaactgagcccatcaccttcctcaaatggtaataatggtgggtatcaaagtacggcagctcaggtaagactacgaaaataccattccatgaggtcactaaatgctccacccgaagatttggcgctgaacacaactttccacttgagctcaaaaacactggaaaaattttatcacgaggagaatagatggaacagaaagttggcatcttggttcataccacaagacgagaccattaccggcgtcgacgaagaaactatggatgaaagcaccattggtggcaagagaaaatcttacatgtacgaaataaggaatatggtaataaactcgacaaaagattaa

SEQ ID NO: 1441 - DNA, 1500 bp, Saccharomyces pastorianus
atgttcaaccatgattggaagtactccattaattcaaaaacctttgacgatcttgatattgagttatttcgaaaccataggtttaaaactgttttgaactacataataggcgttattggatggaacggactgaaagtggctctcttcgtatctgacgtttacacatgtatcaaactactagcattcaactcgtggtcaaataacataattcgtccttacttatcctttgaaatatcaaagtggttatttagtggttgcattcttgcatctatcgtgctactggtatgggaatccatagctggaataaggatatataagacaggaaatatatcgttgacatatgttaacaatttttctagaaatctaaattccgtgctcaattattctaaattttgcgtttacaatatgatcgaacggaaggggtttcgacagaaaatgacatttttcacttttttccaactaaaagattgtataagattaatcttcacagacacaccaagacaagtaattaacggtcttacattatggtcggtgcttgtaaccgttaataagagcgaagatttgggcgatctggaatcatttagtggtttaatcaataaattgaaaaacatcggaaaaaccaatcacgaagaagcagtgatactgtcattaatgctcttttcgtttattgtttggacattatttgtgttcaaattcttagtggctatcatttgctcaatatttgtttactataagataattaacgatcaaaaatacggcgggttgcgtgaatatatctgtgttactgttagcgaaaacattgacgaacttgttgaaagacaaagaaaaaaggaaaatgagagcacaatttataagacaggccttcttgaatcccaaacctttagtgattttaatgaattagaaaataaactcgagtcatcttttaatgaaacctcgtacacttccaataacgattccacgatagagttagtggagaggagaccagaatataatagtcaaaatgcgtttgaatatgttccaataatgaagaaagtagaaacaacggaatcgtttgtcgacaatggtaatgcgcaacatgcaactagattctctgcgattttagacccaccgaataccaatacgtacaacaccagtaatataaaaaaaagtctcgagacgcaagatagaaacttttcagacgctcagagatatgaagattcgagcgtcctcagtgggctcaaccagaagtcgtctactaccaggctactacaatctacaacctcgacagaagttcacatgtcattagactcaacaccaaatacaatgaatttccaaaagtcgaataatgaaactcggaggcccaagccacctagtttacagacaagcgggatggtaaagtcaagcactgtttcagaggacaatgagagaatatatactccaatgaaggcatacttcagggaaactggtcttccgaggaaaggtctactagaagatgaagattatacatatcactacacctaa

SEQ ID NO: 1442 - DNA, 486 bp, Saccharomyces pastorianus
atggctcaggctgtagttaagtgtggtatatgccacgagagtgatggcaaatataaatgtcctaagtgtagcatacgatattgttccttgaaatgctacaaagatactgaaaagcacattcataaaaacgttctagaaccccaaaccgaaacggaccctagttcagagtccaataataacaacagtgctatcgtaaccggtaggaaaagtttgaagacaagagcattcgatgaagtttatcaaaataacgtccaattgcaagaactattaaagtacaatacagtgaaattccatttagcgaaggtttatagaattctatcaactaccgttagcgacggaagttccggaaacatgagtagcgacctacaaaaagagttagctgtaaattaccttaacacattgcgatatggtggtatacattataatgaggctatcgaagaattttgccaaatactattagatagattaaatgacgttaaagaataa

SEQ ID NO: 1443 - DNA, 444 bp, Saccharomyces pastorianus
atggctgttcagtttatactgtgctttaacaagcaaggagtagtgcggttggtgaggtggttcgatgtgcacaattcagattcgcaacatagtcatgacgccattgcgcagatatataggctcatctcctccagggaccacaagcaccagagtaattttgtagagttctccgattcgacaaagctcatatatagaaggtacgctgggctctatttcgtcatgggcgtggacctgcttgatgacgagcccatatacctttgtcacatccatctgttcgtggaagttctggatgcatttttcggcaacgtctgtgagctggatatcgtcttcaacttttataaagcctacatgattatggacgaaatgtttattgggggcgagatacaggaaatctctaaggacatgctgttggaaaggctaagtattttagataggcttgactaa

SEQ ID NO: 1444 - DNA, 2454 bp, Saccharomyces pastorianus
atgacgaggaacagcaaagacaaagaggtacataaaagtccctcggtcagcactttaaaactattggggaagcgtctgttcaattcgaacagtcacactgacaattcttcattattactcagtgctgaacaattgggtaatggtaggagtttaaggaaacgaccaacgtctccatccagcggcggcgctagtagcggtgccaattcaccttcctcttctgccggtgctcggaatagatctgcttctttgcataggaagaaaaacaatgtttcagttgggctctcgagtggacctgtgtcctcgcataagtcttccgtcgcgttgcaagacctaatcaaacataacaataatccttacttaaactctccctcggatatcttgggcacaggtactggcattgcctcgacaagagatagggatagatctgctatagaaagggaaaaagaaaaagagagggctagagacaaggaaagaaacacgcatcatgcgggcttgccgcaaagatcgaatagcatggccagtcatcactttcccaatgaaaatatcatttataacccctacggtataaacccaaaccatgctagaccagatactgcatttgccgacactctaaatatgaataaggagaatgatttaagtttttacatgcatgatgggaacgccaagatacggatgttaccgctgccaatcgccaacccgaatgatttcttacccgaagatatgaaacaatatagcgtccatttaacggataattttgtattcgacacggataataagccaatcggttccggtgggtctagtgaggtgaggaaggttaaatcgagttacaggcaaaaggatgtttacgctttgaagaaattgaatatgatataccacgagtctcccgagaagttctacaaaagatgctcaaaagaatttatcattgccaagcatctaagccacaacgtgcacatcacgaacactttttgtcttgtgaaagtacccaccacaacgtacacaactcgtggttgggggttcatcatggaattgggtgtcaaggatcttttccaattgatggaaagaacaggttggaaaaacgttccattcggtgaaaaatactgtcttttcaaacaggtggctcaaggtatcaggttttgtcatgagaacggtatcgctcatcgtgatttgaaacccgaaaatgtcttgatttccaaagaaggtgtttgcaaactgacagatttcggtatttctgattggtaccatgtggtgcctcatgactacaccagtccggtgaagacttgccagggtatgataggttccccaccatacactccaccagaagtgatgtatttcgacgccaagaagcattatcctgaaaggctccaaaaaccttataatccattggccatggattcttatgccctcgggataatgctgatcaccatgatcaacaatataattcctttcatcgattcctgtaacactgatgcgagattcagagagttcgaattgtcgtacgataacttcatcaaccaccaaaatcctcacttcagagacaagggttgccacaaggcaggtcccggtgccgaatacagtttggcaagaaatttcaaaaatactgaggctacacgtgttgcatggagattggctgaccccgaccctgccacaagatacacaatggatgatttattcgaagacccttttttccaacaaatagaaacctgtgtcgagccaaatgacgacagtttcgtgaaggcgcctgaattaagaaaatctacttctatcagtgattctacggaaaactttccagatgctcccaacgagcaagaagtcagtcatacttcgaatccattcctgaaaagagaacctttgagtactaaacctagatcaatgctggaaattgctcaatctccatcacttaaactgaagcccaaactgaagagcaaaacaaaggctaaatcacatgatatcatggataaagaaggtttaaaaatcgttacacctaaaccacaagggaaagaacagggcgaagatcaaaatgaagacaaagatgaagacgaagacaaaccaacggaaaacttttcaaccaacgttgacagtttattagaaaaggcgacaccaacttccaccaaagtcgatgacattccaagcgaagaaaattctacaacaaaggagttaaagtcaatgatcaactctaccccttccacaccaacacacaacggtccaactccggtccccgtgaaaactgccacaccattgaataaaggtatgagcgatttatcattaagatcagagacgccaatttctgtcaaggacactagcgcacccaatgtgtcttcatcaagcaactcgattagaagtttcggtagtccaaatgtgtcctccttaaagaaaaagaaggtcatccatcaccacttagatatcactaacagcgtcacgaacgtgtcatccgtgagcgctttcgtgtcaagatag

SEQ ID NO: 1445 - DNA, 378 bp, Saccharomyces pastorianus
atgtctgtcgtagggtcgttaattttctgcttggactgtggtgatcttttggaaaatcctaacgctgttttgggctccaatgtcgagtgcagccaatgcaaagccatatatccaaagtcacagttctccaatttaaaagtcatcactacaacggcagaagacgcgttcccatctgcattaagagctaagaaatctgtggtcaagacatctttgaaaaagaatgaattgaaggacggtgctaccatcaaggaaaaatgtccccaatgtggcaatgaagagatgaactaccacactctgcaactaagatctgcagatgaaggtgccactgttttctatacatgcacctcctgtggctacaagttccgtaccaacaactga

SEQ ID NO: 1446 - DNA, 1689 bp, Saccharomyces pastorianus
atggctgctcgtccacaacaacctcctatggaaatgccggatctatccaacgccattgtggctcaagacgagatgggtagaccctttattattgtgaaggatcaaggtaacaagaagagacaacacgggttagaagcaaagaaatcacacatattggcggctaggtcagtggcctccattatcaagacttctttgggtcctcgtgggttagacaagattttgatttcacccgatggtgaaatcactattactaacgatggtgcaactatcttatctcaaatggaactagataacgaaattgccaaattgttagtgcagttgtccaaatcccaagatgatgaaattggtgatggtactacaggtgtcgtcgtcttggcaagtgcattactcgaccaagccttagaattgattcaaaagggtatacatccaattaaaattgctaatgggtttgacgaagctgccaagatagccattgccagattagaagacagatgtgatgatatttctgcatcaaacgacgagttgttcagagactatttattgagggctgccaaaacttctttgggttccaagattgtgtccaaagaccatgatagatttgcggaaatggctgtggaagcagtcactagcattatggataagagccgtaatgacgtggacttcgatttgatcaaaatgcaaggacgtgttggtgggaccataagcgattccaagttgattaatggtgtcattttagataaagacttttctcacccacaaatgcctaagtgcgttttgccaagggaaggttccgacggtgttaaattggctatattaacgtgtccatttgagccacctaagcccaagaccaagcataaattggacatttcttcagtagaagaataccaaaaactacaaacttatgaacaggatacatttaaagaaatgatagatgatgtgaagaaagctggtgcagatgttgtcatatgtcaatgggggtttgacgatgaagctaaccatttactgctacaaaacgatttgcctgctgtaagatgggtaggtggccaagaactagaacatattgctatttccacaaatggtcgtattgttccgagattccaagatttgtctaaggacaaattaggtacttgttccagaatctacgaaaaggaattcggtactaccaaggaccgtatgctaatcattgagcaaagtaaagaaacaaagactgtaacatgttttgttcgtggttccaataaaatgatcgtggatgaagctcagcgtgcattacatgattctttatgtgtggtacgtaacttggttaaagattcgcgtgtggtttacggtggtggtgcagcagaagtgaccatgtcgctggctgtttccgaagaagctgacaaacaacgtggtatcgaccaatatgcattccgtggctttgctcaagctttagacaccattccaatgactttggctgaaaactcaggccttgatccaattggaactttatctacattgaaaagtaaacaactgaaagaaaacacttctaacattggtgttgattgcttaggctacgggtccaatgacatgaaggaattatttgtcgttgatccctttatcggtaagaaacagcaaattcttttagccactcaattgtgtagaatgattcttaagattgataatgtcatcattagtggtaaggatgaatattaa

SEQ ID NO: 1447 - DNA, 1350 bp, Saccharomyces pastorianus
atgtcgtatttaaacaatcccgctgttgtcatggacaatggtaccgggcttaccaagcttggtttcgccggtaacgattctccctcgtgggtcttccccacagccatagccacagctgcaccttccaatacgaagaaggcttcgggcgccggcgcatcttcaggagcaggtagcgatacatcatacttcggtaattctacgtctgccaccaactttaacggtgtaaccggtggcctgctgtccaacaacttgtccggcaagagaggtacagaggatttggatttttacattgggaatgaggccttggtggcatctcaaggaccctcttattctttgagttatcctattagacatggtcaagtggagaattgggaccacatggagaggttctgggaaaattccattttcaagtacttaagaacagaacctgaagatcatttctttttattgaccgaaccaccattgaatcctccagaaaacagggaacaagttgctgaaatcttttttgaatcattcaattgtgccggtctatacattgctgtgcaagcggtgttggctttggccgcctcttggacctcttctaaggtaacagatagatcactaactggtaccgttatagattctggtgacggtgtcactcacgtcattccagtggcagaaggttacgttattggatcggccatcaagaacattcctattgctggtagggacatcacgttgttcatccaatccttgttaagagaacgtggtgaagcagacacttctttaagaaccgcagaaaagatcaagcaagaatactgttatgtttgtccagatattgttaaagagtttaacaaatttgatagagatccttctaaattcgcacaatttgtggtggaaaatcaagaaaaaacaaggagaaaagctgtggatataggttatgaaagattcttggctccagaaatctttttcaatcctgaaattgcatcatcagacttcttgactcctttgcctacggtggtagatcaaacaattcaggcttgtcctattgatgttcgtaaaggtttatacaacaacatcgtattatcaggtgggtccaccatgtttaaggatttcgggcgtcgtttacaaagagatttgaaatcgattgtaaataatagaattgcgcaaagtgaactattaagcgggacaaagtcaactggtgtggatgtttctgtgatttcccatagaaagcaaagaaacgctgtctggttcggtggttccttgctggcacaaactgcagaattcaaaagttactgtcacaccaagaaggactatgaggaatacggtccagaaattgttagaaactttagtcttttcaacatggtttga

SEQ ID NO: 1448 - DNA, 7437 bp, Saccharomyces pastorianus
atgagaccgcatgaggagccgagttggaaaagtagagtgttgaaaactgctaacaacgatatggacatgaacagagatgtaccgctggcaccgaatttggacatgaatatgaacatgaatatgaacatgaatatgaacatgaatatgaatatgaacagggacaggaacgagtctggcctcctttctaatagatttggtgggatggtggcaggaaataccgaggacgttaattaccggccgattttggacaatattttccacgaattgactagtgattatgaggacgagcggagattggctagtagttcgttattcgatctactggtgtctttagagcacgagctgtcgatagaagagtttcagggggtctcacacgagataaacaataagatccttgagctggttcacacaaaaaaaacgaacaccagagtgggggctgttctctccatagacaccttgatatcattctatacattcactgaggaactgcccaacgagacttcgcggttggctggttaccttcgaggtctaataccttccaatgacgtgggtgtaatgaggctggctgcaaaaactttgggtaaactggccgttccgggaggcacatacacctctgatttcgtggaattcgagataaagtcctgtttagagtggctcactgcctccacagaaaaaaattcattttccagttctaagccagaccacgccaagcatgcttcactcttgataataacagcattggcagagaactgcccgtacttgctctaccagtacttaaactcaatactagacaatatctggagagctttgagagacccgcatttagtaatcagaattgatgcttccaccacattggctaaatgtctctccatcctacgaaatagagaccctcaattgactagccagtgggtgcaaaggctagctacgagctgcgaatacggctttcaggtgaatacgttggaatgcattcatgcaagcttattagtttacaaggaaatcttgatcttgaaggacccctttttaaatcaagtgtttgatcaaatgtgcctaaattgcatagcctacgagaaccacaaggccaatatgatcagagaaaaaatttaccaagttgtacccttattagcatcattcaaccctcaattatttgcaggcaaatatttgcatcaaatcatggacaattacttggagattctaacgaaagcctcgacaaagaaaacaccacattttaaagatgacaagccacagatattgatctcgatcggtgatatggcatatgaagttgggcccgatattgccccgtatgtgaaacaaatcctagattacattgaacatgatttacaaacaaaattcaaagttagaagaaaattcgagggtgaaatcttttattgtattggaaagttagcaatgccattaggtcccgtcctggccaaactgctgaacagaaatatcctaaagttcatgttcaggtgccctctttctgattatatgcaagaaactttccaaatcttgactgaaagaattccatctttaggtccaaagataaatgacgaactgcttaatctagtttgttccactttgtctggtacacagtttattcaaccgggatctccaatggagataccaccattttcgaaagaaagagccagagagtggagaaataaaagcatctttcaaaaaacgggggaaagcaacgatgataacagtgatgtaagaattattattcaagccttccgaatgctaagaaatattgaaaataaattttcgttggtggaatttgtgagagttgttgccctatcttacatcgaacatacagacccgaaagtaaggaaattagccgcactaacatcttgtgagatttacgtcaaggacaatatatgtaaacaaacatctttacactctctgaatgctgtatcagaagttttgtccaagctcttagccattacaattgctgaccctagacaagatattagattggatgttctaaaaaatttgaactcatgcttcgattcacagttggcccaaccagataatttaaggctcttgttcaccgcactacacgatgaatcgttcagtatacaatcggtagcaatggaactcgttggaaggttatcctcagtaaacccggcatatgtcattccatcaataagaaaaatattactagaactcttgacgaaactaaaattctcaacttcctccagagaaaaggaggaaactgcaagtttattatgtacccttatcaggtcaagtaaagatattaccaaaccatatattgaacctcttttaaacgttcttttaccgaaattccaggattcttcctcaacggttgcgtcaacagcattaagaaccataggtgagctatccgttgtaggaggagaagatatgaaagtttatcttaaagacttgtttccattgatcattaaaacatttcaagatcaatcaaactctttcaaaagagaagcagctctcaaagctttgggtcaacttgcagcctcctctggctatgtcattgatcccttacatgattacccagaattactgggtatattggttaacattttaaagacagagaactcccaaaatattagaagacaaacagtgtctttgataggtatattgggcgctattgatccatatcgtcaaaaggaacgtgaaattacctccacaacgaacatatcggcagaacaaaacgccccgcccatcgacattgctcttcttatgcaaggtatgtctccatctaatgacgaatattataccactgttgttgttcactgtttattgaaaattttgaaagacccatcactatcatcgtaccatacatccgtaatacaggcaattatgcacattttccaaacactaggcttaaagtgtgtttcgtttttggaccaaatcatcccaagcatcttagatgtaatgcgtacatgctctccatctttattagagttttactttcaacaactttgttctttggtcagtatcgtaaagcagcatattaggccacatgtcgattctatatttcaggctatcagagatttttcatcggttgttaagttacaaataacgataataagtgttattgaggcaatatcaaaggctttggaaggtgagtttaaaagactaattcctcttactctgacacttttcttagttactttagagaatgataaatctgctgacaggattctttcaagaagaatattgaggctattggagacatttggtcctaatttagagggttattcgcatttgattgtcccgaagatagtgcaaatggctgaatttaccagtggtaacttacagaggtctgcgattatgacaatcggaaagctggcaaaggatatcgatctcttcgaaatgtcatcaagaattgttcatgctttagtcaggatactaagtggtacaacaagcgatgaactctcaaaagttattatgaatactttgagtttattacttttacaaatgggtacatcatttgctatcttcattcctgtcatcaatgaaattttaatgaggaaacgtatccagcacacgatatacgatgatttgacgaacagaatactgaataacgatgctcttcccactaaaattttggaagcaaatactacagaaaatccatccacggatccagtggatgcggcggatgcaggtgttgcaaagttgcccataaatcaatcagttttgaagagcgcttggaattccagccaacaaagaactaaagaggactggcaagaatggagtaagcgattatctattcaattgcttaaagaatccccttcccacgcactgagagcttgttcgaatctcgctagtatgtactatccgttagctagagaactcttcaatactgctttcgcaagtatttggacggagctttatagccagtatcaagaagatttgatcgagtcgctatgcatagccttgtcttctcctcaaaatccgccggaaatacatcaaacgttattaaatttggtcgaattcatggagcatgatgataaagcattgcctatcccaactcaaaatttgggtgaatatgctgagagatgccacgcatatgctaaggcattacattacaaagaaattaaatttatcaaagagcctgaaaactccacaattgaatcacttatcagtatcaataatcaattgaaccaaacggacgctgcaattggtattttaaagcacgcccagcaacaccattcgttgcaattaaaggaaacatggttcgaaaaactagaaaggtgggaagatgcactacacgcttataatgaacgtgagaaggcaggagatacatctgtaggtgttactcttggtaagatgagatctcttcatgccctaggtgaatgggagcaattatctcaactagcgtctagaaaatggagaatatctaaattaccgacgaagaaattaattgctcctttggcagccggtgcagcatggggtttaggcgaatgggatatgcttgagcaatatattagtgtaatgaaaccaaattccccagataaggaattctttgatgcaatattatatttgcacaaaaacgattacgaggatgctggtaaacacatactaaatgccagagatttgctggtaactgaaatatccgcactaattaacgaaagttacaatagagcttatagtgtaattgttagaacacaaataatcacagagtttgaagaaataattaaatataagcaactggcgcctaactcggagaaaaaacttcattatcaaaacctttggacgaaaaggttgctgggttgccaaaagaacgttgatttatggcaaagagtactcagagtgagatcattagtgattaaaccaaaacaagatttacaaatatggatcaagtttgctaatctgtgtagaaaatccggtagaatgagactggctcaaaaggcactgaatatgcttcttgaaggaggcggtgatcctagtttaccaaacaccgctaaggctcctccacctgtcgtctatgcacaattgaaatacatctgggctacaggggcacataaagaagcgttgaatcatctgataggatttacatctagattagcacatgatctcggtttggatccgaataacatgattgcgcaaagtgtcaaactatcaagtgcaagcactgccccgtatgtggaagaatatacaaaattgttagctcgatgttttttgaaacagggtgaatggaggatagcaactcaaccaaactggagaaatacaaatcctgatgccattcttgggtcatacctgttagcgacacatttcgataaaaactggtacaaggcatggcataattgggctttagctaactttgaggtgatatcgatggtacaggaagaaaccaaattaaacggaaataagaatgatgacgatgatgacacagcgatcaacaacgatcatattcgagctgaaagcagcattctaggaagcggttcattgactataaatggaaacagatacccattagagttgattcaaagacacgttgttccagcaattaagggtttctttcattcaatatctttattagagtccagttgcttacaggacacactaaggttattaactcttctgttcaactttggtggtattaaagaagcttcgcaagccatgtatgaaggcttcaatctgatgaaaattggaaactggttagaagtgttgccacagctaatttcccgtattcaccagccagatcccacagtgagcaactcccttttatctctgctttctgatttaggtaaagctcatccacaagcacttgtgtatcctctaaccgtggcaattaagtctgaatctgtttcaagacaaaaagcagctctctcaataatagagaaaattagaattcacagtccagtcctggtgaaccaagctgagttagtcagtcacgaattaatcagagtagccgttctgttccacgaactatggtatgaggggttagaggatgcaagtcgacaattttttgtagagcataacatagaaaagatgttcgctactttggagcctttgcataagcacttaagtaatgagcctgagacgttaagcgaggtttcatttcaaaaatcgtttggaagagacttgaacgacgctcatgaatggctgaataactacaaaaaatcaaaagacgttaataatctaaaccaagcttgggacatctattataatgtctttagaaaaataactcgccaaataccgcaattacagactttagagttacaatacgtttcaccacagcttttggctgctcgtgacctggacctagtagtccctggtacatattccccaggaaaacccactgttaaaattgcaaagtttgaaccgctattttctgtgatttcttcaaagcaaaggcctagaaagttctctataaaaggtagcgatggtaaagattataagttcgttctgaaaggtcatgaagatattagacaagacagtcttgttatgcaactgtttggtttggttaacactttgttgaagaatgactcagagtgtttcaagagacatttggatatacaacaatacccagctattcctttgtcacctaaatctggtttactgggatgggttccgaatagtgacacgttccatgttttgatcagagaacaccgtgatgccaagaaaattccgttgaacattgagcattgggtaatgctacaaatggcccctgactatgaaaatttaactcttttgcaaaaaattgaagtattcacgtacgctctcgataatacaaagggccaggatctctacaaaatactatggctaaagagcagatcgtcagaaacgtggttagaacgcagaactacatatacgagatctttagctgtcatgtccatgactggttatattttggggctgggtgatcgtcatcctagtaatttgatgttagatagaattaccgggaaagttatccacattgattttggtgattgtttcgaagctgctattttaagagaaaaataccctgaaaaggttccatttagattaacgaggatgctgacatacgcaatggaagttagtggaattgaaggtagtttccgtattacatgtgaacatgtcatgagagtcttaagagataataaggaatcgttgatggcaatcttagaagcatttgcatttgatccattgatccattggggattcgacttgcctccgcaaaaacttactgaacaaactggaatccaattaccattaataaatcctagtgaactattaagaaaaggggcaataactattgaggaagcagcgaacatggaagcagaacagcaaaacgagactagaaatgctagggcaatgcttgttttaagacgtattacggacaaattaacaggtaacgatatcaagaggtttagcgagttagacgttcctgaacaggtcgataaattaatccaacaagccacttctattgaaaggctgtgccagcattatgttggatggtgtccattttggtga

SEQ ID NO: 1449 - DNA, 1062 bp, Saccharomyces pastorianus
atgtttgaagggtttggacaaaataagaagcgtaaaacaacgaagttagctacagagcagtcattggcacaacaaccatgggttgaaaagtatagacccaagaacttagatgaagtgacagctcaagatcatgcagtcaccgtcttgaaaaagacactacaatcagccaatttacctcatatgctgttttatggccctccagggactggtaagacatctaccattttagcattgaccaaagaattgtatggtccagaattaatgaaatcaaggattttggagttgaatgcttctgacgaacgtggtatatctattgttagagaaaaagtgaagaatttcgcaagattaacggtgtctaaacctagcaaacatgacctggagaactatccatgtcctccatataagattatcattcttgatgaagcagattcaatgaccgcagatgcacaaagtgctttgcgtagaacaatggaaacttactcaggcgtaacgagattctgtatgatttgtaattatgtgacaagaatcatcgacccattagcatcccgttgttcaaaattcagatttaaagctctagatgccaataatgctattgatcgattgaaatatattagcgaacaagagaacgtcaaatgcgacgatggtgttttggcaaaaatcttggatatctctgcgggagatttgagaagaggcattacgttactgcagtccgcttcgaagagagcacaatacttaggtgacggtaaaaatataacatcgattcaagtagaagaattggctggtgtggtacctcatgatgttttggtggaaattgtcgacaaagtcaagagtggtgatttcgacgaaattaatagatatgtgaacatattcatgaaaagcggttggtcaggtgcgtcggtggtgaatcagctacacgaatactacattaccaacgatagcttcgatactaactttaagaaccaaatatcttggttactgttcactacggattcgaagttgaataatggtaccaatgagcatattcaattactgaacttattagtcaagatatctcagctgtaa

SEQ ID NO: 1450 - DNA, 594 bp, Saccharomyces pastorianus
atgagcaacaacgaaattgtatttgtcactggtaacgccaacaaactaaaagaagtccagtcaattttggcccaagatgccaacagcaataataagactattcatctaatcaatgaagcactagaccttgaggaattgcaggatatagacctgaatgctattgcattggccaagggtaagcaagctgttttggccttgggtaaaggtaaaccggtttttgtagaagacactgcgttgagatttgacgaatttaatggcttgccaggtgcttatatcaagtggtttctgaagagtatgggactggataagattgtgaaaatgctggaaccatttgaaaacaagaatgccgaagccgtgaccactatttgctttgctggttccaaaggcgaatatcatatctttcaaggcattacaaaaggtaagattgtctcgagtcgtggtccaactacattcggctgggactcaatctttgaacctctagaaagtcatggtttaacgtatgcggaaatgagcaaagatgccaaaaatgctatctctcatcgaggtaaggcctttgctcagttcaaagaatacttgtatcagaatgagttttaa

SEQ ID NO: 1451 - DNA, 1170 bp, Saccharomyces pastorianus
atgggtttaagcacgattatatgtatcgggatggccgggtctggtaagacaacgttcatgcagagactgaactcccacttgcgggcagagaaaacgccaccatacgtgatcaatctagatcccgcagtgctgagagttccgtatggtgccaacatcgacatcagggactcgatcaagtacaagaaagtgatggagaactaccagctggggcctaacggggccatcgtcacaagtctgaatctgttcagcaccaagatcgatcaagtgattaagctagtagaacagaagcaggaccaattccagaactgtatcatcgacaccccgggtcaaatcgaatgtttcgtctggagtgcgtccggtgccatcatcaccgaatccttcgcctccagtttccccacggtgattgcgtacatcgtggatacgcctagaaactcgtctccaaccacgtttatgagtaatatgctgtacgcctgttccatcctatacaagacaaaactacctatgatcgtggttttcaacaagaccgacgtatgcaaagcggacttcgctaaggaatggatgacagatttcgaaagcttccaaatggccatcaaagaggatcaagacttgaacggtgacaatgggctgggttctggctacatgagttccttggtgaactccatgtcgctgatgctggaggaattctactctcaactagacgttgtgggcgtctctagtttcactggtgacggctttgacgagttcatgcagtgtgtggacaagaaagtcgatgagtatgaccagtactacaagcaggaacgtcaaagagcgctgaacctgaagaaggagaaggaggagatgaggaaacagaaatcgttgaatgggctgatgaaggacctggggctaaacgagaaggacaccgctgctgcaggcaaacccggcagcgatcacgacagcatagacgcccttagcgacctggaagaggacgccaacgacggccttgtagaccgtgacgaggacgaaggagtcgagagagaatacacgttcccaggcgaggagagaacccagggtgaggtcaacgagacctctgctccagacctacaaaaaagataccaggatgccatgcaacaagtagcaaaaacggccactagcgagactgcggaaaacatcgctaagtatattagaaactga

SEQ ID NO: 1452 - DNA, 621 bp, Saccharomyces pastorianus
atgaaggaatcagcccaagagatcattcagcaactggtccacagcgtggacttccagtcctccaagtttcaattggccatcatgtgcacgatgttcaatcccatcttctggaatatcgtggccaggatcgagtaccacacgcactcactcaccaagatgtgtggaggagccaaaaagggctgctacgtgttggcagccaccattttctcgctagggatcatcagagacatggtctacgagtctgcattgcgcgaacaatccacatgctctttgatcgtgggcgaaaactggaagaagctgggcatggccttttttggtgcaggccaggtgcttgtgttgagctccatgtacaaactgggtatcaccggtacgtacttgggtgactacttcggaatcctcatggacgacagggtcactgggttccccttcaacgtgtccaacaaccccatgtaccagggctccaccctgtccttcttgggtatggccctctacaagggaaagcctgccgggttggtcgtatccgccgtggtctacttcatgtacaagattgctcttcgttgggaagagccattcactgccatgatctactccaaccgtgagaaggccaaaaagaacatgtga

SEQ ID NO: 1453 - DNA, 1248 bp, Saccharomyces pastorianus
atgtccggcataattgacgcgtcttctgcattaaggaaaagaaagcatttgaagagaggcatcaccttcaccgtgatgatcgtgggccaatccggctcaggcaggtcgacttttataaacaccctgtgcggccagcaagtcgtggacacctcgacaacgatcctgttgcccacagatacctctacagagatagacctgcaattgagagaggaaacagtggaattggaggacgacgaaggtgtcaagattcaactgaacattatcgatactcccgggtttggtgattctctggataattctccatctttcgagataatttccgattatattcgccaccaatacgatgagattctgttggaggaaagccgtgtgagaagaaatccaagatttaaggacggtagggttcattgttgtctgtatttaataaaccccactggccatggtttaaaggaaatcgatgtagaattcatgaggcaattgggatctctggttaacattatccccgtgattagtaaatctgactcgttgacaagagacgaattgaaactgaacaaaaaattgatcatggaagatattgacaaatggaatctgcctatttataacttccccttcgatgaagatgaaatatccgaggaggattacgaaacaaacatgtacttgcgtgcgcttttaccctttgccatcatcggatccaacgaagtctacgacgtgggtggagacgttggtactattcgtggtagaaaatacccatggggcatattggacgtggaggattcttcaatctctgattttgttatcttaagaaacgcgttgttgatttctcatttgaacgacttgaaaaattacacacatgaaatattgtatgaaaggtatagaaccgaagcattgtctggtgagtctgtcgcaacagaatccatccgtccaaacctcacaaaattgaatgcttcatcgtcttcatctaccacaacaagaagaaacacgaatccgttcaagccaaatgataatattaataatggcattctcagcccaccatctgatacacacgggcaaaaagccagtaccaataacgaaacttacatgacacgcgaagaacaaatacgattggaagaagaacgactaaaggcatttgaggaaagagtacagcaagaattatcactgaaaagacaagaactgttgcaaagagaaaaggaattaagggaaatagaagccaggttggaaaacgaggctaaaattaagcaagaggactaa

SEQ ID NO: 1454 - DNA, 936 bp, Saccharomyces pastorianus
atgtctctgtctgctgctcctgttatcccccagtactcggtctctgactatatgaagttcggtctagccggcgccatcgggtgcgggtcgacccactccagtatggtccccatcgacgttgtcaagaccaggatccaactggaacccactgtgtacaacaaggggatggttgggtcgttcaggcaaatcatcgccggcgaaggtgccggtgcgttgttgaccgggttcgggcctaccttgctgggctactccattcagggtgcgttcaagttcggtgggtatgaagtgttcaagaagttcttcatcgacaacttgggctacgacactgcctcgcagtacaagaactccgtgtacatggggtctgccgccatggccgagtttttggctgatattgcgctgtgtcccctagaggccaccagaatcagactggtctcccagcccaagtttgccaacgggctggtcggcgggttttccagaatcttgaaagaggaaggtgtcggctccttttacagcgggttcacaccaattcttttcaaacagatcccttacaacattgctaaattcttggtctttgaacgtgcctccgagttctactacggatttgccggtccaaaggaaaaagtgtcctccaccaccgccactttgctgaacttgctttccggtttgactgctggtttggctgctgctattgtctcgcaaccagcagacaccttgttgtccaaggtcaacaaggccaagaaggccccaggccagtctaccgtcgggttgctagctcaattggccaagcaattggggttctttggctcctttgctgggttgcctactcgtttggtcatggtcggtactttgacctctttgcaattcggtatctatggttcgttgaagagcactttgggctgtccaccaaccattgagattggtggcggtggtcattag

SEQ ID NO: 1455 - DNA, 1179 bp, Saccharomyces pastorianus
atgataagttcaagggtcaatgctcgagtttggcaaagatctatttctatcttgagacctcaagcggccaaagcagagagcaatattgtttccaaagagagaacatatattgaagagttgaacaaggatatcgccacttctcgtttcaaactggtggatcaaaacggtcaaattgcatctataactgtacaacctgatattccgatctgcattaaaaaggattgtttggtttctatccataatttgaaccatctctccctttcttataaatggctcaatttttggtccaatttgatcaaattccgttcatttagatcttcgttatttcataagatcattgggtcctctactatggaaattctagcttcaccaaatttccaaaagtcgggaaggtcttccaattcttccaggactttgtctgtgttgaatttgacggggactaaggattggaatgtatttggcaaagattcaataattgcatttgaacaaaattccagtttggaaatcaaatcgccaatcttacccacgcctaggactctggcttcgggctcattgaagtctcgactaccaccgaaatttcaaattttgaatggcaggggtaatgtactagtgtgcggaggtggttcggtatattcaatggaattgattgacgagaacgacaaaatcctggtgaactcccggaatattttggccatcaacggtcaaagccaattggacattgccaattccgttgagagacaggaattgcatgtagaggccgcgaacatcgaggatagtggtaagagagtgcccaaacttatcacgaacccaacgttacaatccgcctacggacacaccactcggtttttcaaaagactaggtagttggtttcgaaaccaatatgaaaagagatacatttacggtatcgattcgtacttcatgaaggtgaagggcccgagaacaatactgattcaaacgcacgaaatgacgacatctaaagataatattctaagcaaaataacttccaagggccacgtcaagaggaacacagaagacgacgtcaatgacactctagaggaacgggttgccaatgatgtcaattccaagataattgaacttgccaatagaccttcattgttcattgcgactgtgtccaaaaatgggaagattgattttcaaagtacttcgaagttcacataa

SEQ ID NO: 1456 - DNA, 342 bp, Saccharomyces pastorianus
atgactgatgagctaaaacagtatgaagcattaaaggctgaactaaaaaagtctcttcaagatgggaaacaacaggaagacgcctttgacagtttacaacaagagatttacgataaagagacagagtatttttcacacaacagtaacaacaatcattccggtcatggtggaactcagacgtcaaaggcgcactactccggtaatgtcatcaaggggtttgacaccttttccaaatcacatcatagccatgcagattcagcatttagtaacaatgatcgtattttttcattaagcagtgcttcatatgtaaagcaacagcataatcaagcgcaaagcgaatag

SEQ ID NO: 1457 - DNA, 930 bp, Saccharomyces pastorianus
atgtccgaagaccaacgtattgttagtcagccgattgaactgcataagctgtccattgttgataaacattcacaggatcagaaacagcagcacgagcagccagtgcattcaggattacaatcaccaagggccaccacacctctaaaacctaaaagacttgctatacccatatcaagcccacaaagaagttctttccaaaatagtttcgtaaaccagtcgcctgttagtgacaacactagcccagtttccgccgatcaagatttaatttataaactggctgcaaaacaaagagaaattaatgaattaaatttcaagctacaagctgctcagaaagaattaaagcaattagagttgaagttcaaaaacatactaccccaaaacgaacaacaaaaattcaacagtcagaatacgaacgaatacctttccacattttctagaaagattcaacaaactttggtcgatgtcaataattcaccaaatgtgctcaagagcaaaaggagtataaacgatttcttcaacaagaccaatcgcaccgcaaacgataatgcaaacaatactatgcccacccgtaggccgaatcgttcaccgaatcgtacccaacagcgtgtacaagatacgggtcctaatcttactccaaatgcaaatgcaacacctcctccattaccgtcaagaaatacaaagggaaatttaaacacaaccgctcctgttgatgatgatacaccattttttcaaagaataattaacaagtttagtcaaatgaatacggaagaagaagaatttgacgatttcatggaaaaggggaaaagtaaaaaagataattattatattaaggaaaatttgggctatgagtatgatgaagtgcgcagtgacgatgacgatgaagaattcgagcctatgggtgacatacccattcatttatttaaaaggtag

SEQ ID NO: 1458 - DNA, 318 bp, Saccharomyces pastorianus
atggaacatccagcatttacattgggtcttttaaccgctaccggtggtctcatgggttactaccgtaaaggctccatcccatccttagtatccgggttggtattcggtagtgtgtacggtgttgccgggtacttgctgcactttaacagagacggtgggctggaaatggccctgggtgcatcgaccttgttgctcggtgcagggatcattagaggtatgccttccaggttcaccaagcctgtccccgttgttctaaccgctttaggtggggttggtagttactactactataataaatacaaggaattttacccttga

SEQ ID NO: 1459 - DNA, 327 bp, Saccharomyces pastorianus
atgtctgtagttcagaactcaccacggctgcaagagcctcaggaggagcagcagcagcagctctcgttaaaaataaaacagttgaagttgaaaagaatcaacgaactaaacaataaactaagaaaagagctcagtcgtgaaagaatcaccgcttcgaatgcatgccttacgataattaactacacttcaaacacaaaagattacgctctacccgagttatgggggtaccccagcgcaggttcgaatcattttagagaaggtttaagaaaggctcaaaaaaataatcatttgtcaaactcaaataatgcttgttgtacgcttatgtaa

SEQ ID NO: 1460 - DNA, 2907 bp, Saccharomyces pastorianus
atgaatagtcaatcagatgcgatggatgaacgatatagcatgaccaagttggaaaatagattaagaactttccaagatggggttgtacttcaaaagaaaaaattaagatggagtttcaaagtcattccataccaggcaatggccaagcttggtttctattttgatccagtgatagatcccaaaacgtcaaagttaaacaaggactgtgtaagatgctgctactgtcaccgccgaacatataacgttagagattgcagatccaggaaaaaagatgttctcgaaacgctaagcaatataacgaggagacatctaactgattcagacaataagcaagtatgcctcttaatttacttgcgaaataaactattaaaggattacagtttccatatgggtgtttcagactggaaaaacgacaaacatttcagcgaaccagacagtaaaatcatgttaaactttagaagattcacttttaaggatgattggccacatggtatctctcacaatgagcaccaactgaatatagaaaacatggttaatgcggggcttatacgttatgataccagcatagaaggactaaaggatccaaatatggataaggccctcatgagtgactcatgttactgtatttattgcaagcactccttacaaggttggtcatcgcacgatgatccgctaaggcggcattacgacatctctcaaaaaggtaattgttatttctttcaaatacgcaatcggtttgaaagaatgaggaacgataaggatagcaccattagtagttcagataccatcagccaaagttgtggggccaccaccacacaagttgaagaggaaagagatgacgttgttgcagtgaaaaccacctctcaaagtcaaaattctttagtctcatcatcttctcctggtaagaatcttcaaaacaacggtgacaatggattgaatagtcttgttattcaacatgatagaagtgtactgagtgaactaaacgacgagtactcaaagcaaaataaaataaaagagaaacagcaaatacatctggagaatggaaataccactttaagagcggacaatacaaatcaaggtgtttccgcagttgaaaatggaattagcctaactcctattgtaaaagaaagcaagcgtccaaattctcaacttgcgcaattttcatctccttcaaggaagaggaggaagttcaaaagaatatcacccagaagaattttcgatgaagaagatagcgaaaactcttttgataatagtactgtcggtttggaaaacaaagataaagatttagttatcgacttcacaagccatatcaataaagcaagagatacggggagaaagaatgcaattctggacgacagtacggacgaattcagttttagtaatcaaggacatagtacctttgatatacccgtaccgacctcctcgcatttactcagagacataggttcagacattaagattgtcacacaggacccagaaaaccctattaatgcaagttcaaactcaaaagaagcagttatgaaagaagaaaaatatttggccagtgatgacagaaacgaagatagcaacgacacgcgacttgtaggcagagatttcaacactactactcctggaaaatctggaagtatagaccagaggtcgaacgacaccaatgctaacaaaggtctctctaacgagactcgaggttcatcggtaccgcatgagttatatcaagacaaaattacggaggtaagaacagaaagcgaggaaggacagaaaaatgatgtaaacctgccaatacggcgactttcggatgcaagttatagtgatatattgaatagtaactccaataatattaccgacaatataccaaaaggagagatagatgggagcaatcttcaaacctttgatgcatctttacacaaaaaagctctgggagatgctggcgccaaggaaagatctactaaactagatagtttaccaccaaaagaaccagtaattccagcgcacagaaaattggataacattgacatagatttacatttgtcagtatcagacttctcatcttcttcgcactctgagcaatcatcaaagagctcaagcgccatctcgacaccggtagcaagtccgaagataaatgtcacacgtagcttgcatgcggtcaaagagctctctggtctggcaagaaaacaattcaatgatttggaattcgctaataagcaggacaccactaaaatgttggagtatgtgtctgtgaagaatgaaactactggagaagagtcgccgatttttgaaactggaacaccaattgcctacgaagaacacaagtcaaagaaattatttgaaaacgagtttttggggaaagaactggagacgcctatttatttatcaaccgtagatctgaacaaatcacccaagcctgaacctgggtcaatcttaccagtcgtaggtaattcaatttccagtacaagtttacatccacagtactcacccctagagaaacaaaaaaaggagaaaactttgaccacagataccgaatgtgcgacgggatgtttattaaatgaggagaccaaaaacagtagagctgactttggtgaatggtgcaaaattgatgaaaacagattgcttgttaaaaattactttcatgatttattgaagtatataaacaacaatgacgctacattgtctaatgacaaagacggagatctagcatttttaatcaagcagatgcccaatgaagagttggatatgacattcaccaactgggtaaatttgaaggtgcgatctatcaagcatgaattcatagatgattgcgaaaaaaagttgaacatcctgagaaatgactttgatactgctaagaattacgttgagactttggaagatgatgatgaattaatcaagattgctaagaaaatgggtgttttatag

SEQ ID NO: 1461 - DNA, 3261 bp, Saccharomyces pastorianus
atggacaaaagcaagcaaatgaacattaacaacctgtccaacattcctgaggtaattaacccaggtattaccattcccatatacgaggaggagtacgagaatggagagagtgctaatggtcaactacaacagccgccacagaagttaggatcttaccggtcccgtgcagggaaattctccaatacactgagcaacttgctgccctccattagtgccaagctgcatcattcgaagaagaacggccatggcaaaaacgctgttgagttttcctccagcaacaacagttctcagtcgacggtggcttctaaaaccccgagggccagcccctcccggaacaagatgatggacagcaccatagacaatgtgtccatggatagaccgggcagtttaaccccacctcaagacatggaaaaactggtccatttccctgattcgaccaataatttcctgatccctgctcccagagggtccagtgactcgtacaacctgcctcaccagatttccaggacaagaaataatacgatgtcatcccagatcacttccatgtcgtcaattgctcccaagcctcgcacttcaagcgggatatggtcttccaatgccagcgccaatgaccccatgcagcagcaccttttgcaacagttagatcccacaacgagcaacaatacaaacaatccgaacccgcttaacgactattcaacaaagaccgcatttttcgacaacttagtatctacaagcacgagccaaatgatggacagtaaaatgaatgcaaatagtttggctattccaaactctctttggtcaaactcaagacaaaggtctcaatcaaacgcttctagcatatacacagatgcgccgctttatgaacagcccgctcgcgccagtatttcgtcccattatactatgccaatccaggactctcccttggtggctgatgagatcgatccgcattctattaactgggtaaccacagatcccgctgtaccatccataaaccaaatttccaatctattgcccactaataccatttccatttcaaacgttttccccttgcaacaccagcaacctcagttgaataacgcgataaatttaacaagcacctcattggccactttatgttccaaatatggtgaagtcatatccgctagaactctaagaaatttgaacatggctttggtagaattcacttccgtggaaagtgccgtaaaagctctggatagtctccaaggcaaggaggtttccatgattggagcaccaagtaaactatcgttcgccaaaattttacccatgcaccaacaacctccacagttcatcctcaattctcaaggcttgccattgggttctgaaaataacaatttacaaccacaaccattattacaagagcaattatttaatggatctgtgactttccagcaacaaggcaatgtctccatacctgtatttaaccaacaatcacagcaatctcagcaccaaaatcatagttccggttcaggtgggtttaataatgttctgcacggctacaacaacaataataaccctcacaataacagcaacaactctgcaaacgaaaaggaacagtgcccctttccgttaccgcccccaaacgtcaatgataaagaagattcgttaagaggtatcattgagcttttcaaaacaactgccgatgaatatcaaatcaattcattaataaaaaagtcacttaaccacaaaggaactccggatactcaaaattttggtcccttaccggaaccattgtccgtgagagagttcgatccaccaaagttgcgcgaactaagaaaatccattgactccaacttattttccgatttagaaatcgaacagttagcgattgccatgcttgaagaattaccagaattaagttcagattatctgggtaatactattgtacaaaagttgtttgaacattcatcagatataattagggatgtaatgctaaggaaaacaagcaaatacttgacctctatgggtgtccacaaaaacgggacgtgggcgtgccaaaaaatgatcaccatggctcatactcccagacaaatcatgcaagtgactcaaggtgtcaaagattactgtaccccgttaatcaatgatcaatttgggaactacgtcattcaatgcgttttgaagtttggatttccttggaaccagtttatttttgaaagcataatagccaatttttgggttattgttcaaaatcgatatggtgcacgagccgttagagcttgtctagaggcacatgacatcgtaactcccgaacagtcgatagtcctgagcgcaatgattgtcgtgtatgctgactatttaagtacgaacagtaacggggcactgttggttacatggtttttagatactagcgttctacccaatagacattctatcttggcaccaagactgacgaaaaaaatagttgagttatgtggtcacagattggcttctctaaccattttgaaaatcctaaactttagaggtgatgataatgccagaaaaatcatcttagactctctgtttggaaattcgaacgcacacgattctttaccaccaaaggagttgaccaagcttttatgtgaaacgaattatggtcctacctttgtccataaagttttggcaatgcctttattggaagatgatttgagagctcacattataaaacaggttagaaaagtgttgatagattctactcgaatacagccaagccgccgtttattagaggaagttgggttggcatctccctcaaattcacataacaaggcaaagcagcaacaacaacagcatcataataatagcatttcacatatgtttgccactccggatgcatctggacaacatataagaggcctttctgtttccagtgttaaaagcgccggatcgaagcataccactatgaatactggaacaaccacggggtctaccgcatccacactgtcaccaggccagtcattgaatgctaactctacaatgggttatttcaattatcctggtgtcttcccagtggggggcttttcaggcagtgccaataatggatatggtgttaacaatgatgatcttaattcccaattcgatatgttaaacttgaataacggaactcgtttatcattgccgcaattgagtttgactaatcataacaacactactacagaaatattaaacagtatcggctcatctaaaggccatacgaacaataacaacaacaaaaattataatgaggacaatcccgcttttgaaactatgactttacactcagcaaattaa

SEQ ID NO: 1462 - DNA, 996 bp, Saccharomyces pastorianus
atgagttctagtgaagatgaagacgacaaattcctgtacgggtccgactctgagttagcattgccttcgtccaaaagatctagagagaatgaacaagaacaagatgcctctaatgatccgggtacagccaagagacaaaaacaggattcttttgaggaaaccgttccaaccatagccaaatatgatcattccgatgaagatatatactctgattcctcaaataacgagagcaactctgacgtagaggttatcataagcacaggccctgatcctactcggctagacgccaaattgttgggctcctatcaaaacgtaacaacatctggaagcaaagacgtaatcagcgtagctaccgacgtccctgtgaccataaataaaacatcagatgaaagacccgcaacagagggcgaaacagatcaaggcgtaacgacgtcagagtcgaaagccgttactacagagggtgaaggaaatgtaccgaagacaatggttggatctattgatctagacaaagaaggcattttcgaaagcgtcggtataacaactatagaccctgaagtactaaaggaaaagccttggagacaaccaggagctaatttaagtgattatttcaactacgggtttaatgagtttacctggatggagtatttgcatagacaggaaaaattacaacaagattacaaccctagaaggatcctaatgggtttactaactctacaacaacaaggcaagctaaactcttctaacgacacagacttgaatctcggcaatatgattgacaacaacaacaacaacaacaacaacatcaacaattcgaatatgtccaatctaaataataatatgggtaatagcatctctggaacaccaaacccttccgcaccaccgatgcatccaagtttcccaccattacccatgtttggtagtttcccaccattccctatgccaggtatgatgccacccatgaaccaacagcaaaaccaaaaccaaaattcgaaataa

SEQ ID NO: 1463 - DNA, 1113 bp, Saccharomyces pastorianus
atgcaagccgctatccacagaaagctcaacactgctttagaagatgatgttcctcttcttttcccttttgaacaacaacaacaacaacaacagcaaccagacttttattacgacgcagcgactaatcaacaagatcaccccagtttttcctttggatctacaatctccccaagaagttggcattttgaaaaatcagacaacgactcaaatattccctcctctcaattacagcacttggttcacacacaaccaattcacttgattaaccctcagattttattcaacgaagagtttttgaacttggaaaacatcgcttcgcagcctcgttctaaagaaaatagaagtataaacggcaatgaaacagaaacagctactgaaaaacaaaaaagggactcaaaaagtacaaaatcttcctctttatcatcacttttttctaatgacgatacagcttccacgtattattcttcttacaacaacaacaatatcttccaaaaaaccgataagaaaaacgatgatattgatatgattgacacaatgaaatttgaaactaataccaacttacagaaagacataaagatatttcaagaaatttttgattttaatgaatttgcatacgcacaagatttttacccacacagtacgaactatacttattcgaaaccctcaaacgtccataactcaataaccaccaaaaatatagactcatactatcagcaccaataccagaatctaccccatattgaaaatatgcactccattaacaaccgtcattataacaacaacaaaagcgttaattataacaatagtagccttcttcacaataataataacaacagcgccagtaacgcgtcccatagcatgtacgaagctgaaccgtttatagatgagcctcaagtgccatcatgctattacccattagaaatttccttggatattgataggacaccagcacaaaaactaaactcggaagaattagaatttgttaaaaggctaaacgccaaactatcaagatatgctgctgcctattcagttagtgcttccaacgaccaagattattacgataaggtcagatttcaagagatttcctataaatttagtaaaacatattcttag

SEQ ID NO: 1464 - DNA, 969 bp, Saccharomyces pastorianus
atgtcccaaaaaaagaaagcttctcatccggctatcaacctgattgcaggtggtactgcaggtatgtttgaagcattgtgttgtcatcccttagatacaattaaagttagaatgcaaatctacaaacgagtggccggtatcgaacacgttaaacctccaggtttcatcaaaaccgggagcaccatctaccataaggaaggtttcttggctctgtataaaggtctcggtgctgtggtcatcggtattataccaaagatggctatccggttctcgtcttatgaattctacagaaccctattagtcaataaggaaacgggaattgtttctaccggtaacacatttgtggctggtgttggtgctggtatcactgaagccgttcttgtggtgaatcccatggaagtcgtaaaaattaggctgcaagctcagcatttgactccgacggaaccaaacgctggccctaaatacaataacgccattcatgccgcctatactatcattaaagaagagggggtttctgcgttgtatagaggtgtttctttaaccgcagcaaggcaggcaacaaaccaaggtgctaacttcacagtctattctaaattgaaagaatatctgcaaaactatcaccaaatggatgtcttaccttcgtgggaaacatcttgtataggtttgatttcaggtgccattggaccgttttccaacgccccattggatactatcaagacaagattacagaaggataagtcgacatctttggaaaaacaatctggcatgaggaaaatcgtactaatcggtacccaacttctaaaagaagaaggctttagagcattatataagggaataaccccaagagtaatgagagtggcaccgggtcaagccgttacgtttaccgtttacgaatatgtaagagatcatttggaaaagacgggaatattcaagaagaataataaaccaaagccaaaaccattgcagtag

SEQ ID NO: 1465 - DNA, 849 bp, Saccharomyces pastorianus
atggtcccgaaattctacaaattttcaaatggctacaaaatcccaagcattgccttgggtacttacgatatcccgagatcacaaaccgctgaaatcgtctatgaaggtgccaagtgcggttaccgccattttgataccgcagtgctgtatggtaatgaaaaggaagtcggtgacggtattaagaagtggttggacgaagatccagaaaacaacaaacgtgaggacattttctatactactaagctatggaattcccaaaacgggtataagagagctaaagcagccattcagcaatgtttgagtgaagtctctgggttaaaatacattgatctcctattgattcattcaccattggaaggttccaaattgagactagagacatggcaggctatgcaagaggccgttgacgaaggaaaggttaagtctataggtgtttccaattacgggaagaaacatgtcgatgaacttttgaattggccacaactgaaacataagccggtggtcaaccaaattgagatttctccttggattatgaggcaagaattggcagattattgtaaatctaaaaaccttgtcgttgaagctttcgctccattgtgtcatggttacaaaatgactgatccagacctgttgaaagtatgtaaagaggtggatcgtaatccgggtcaagtactaatccgttggtctctacaacacggttatttaccattgccgaagaccaaaaccgttaaaagattagaaggcaaccttgcggcttacaattttgaattgtcagatgaccagatgaaaattttagatcatcctgacgcttacgagcctaccgattgggaatgtacagatgcgccataa

SEQ ID NO: 1466 - DNA, 717 bp, Saccharomyces pastorianus
atgagcggaaaggagcgtgccgtggtaccaattgaatcaaaccctgtagtttttacagaatttgcacacaaattaggcttacaaaaggaatgggcatttttcgatatatatagcttaacagagactgaattattggcatttttaccaaggccagtaaaggccatcgtgctgctattcccaataaatgaaaaggccaattcaactgttaacgaccaaagttcaaaggcaagaagtacagatgttatatggtttaaacaatcagtcaaaaacgcgtgtggtttgtatgcaatccttcattcattgagtaataaccggtcattgttggaaccaggatccgacttgataaaatttctagaatctcaaagtaacagtgcaactccgagaactatgtttgatgatgcaatcgctgatcaatttgtcttggatgtaattaatgaaaatacacaaacattttctaccggccaatcagaagcacctgaagctacggtggacattaatctgcattacatcacatacgttgaagagaatggtgagatatttgagttggatggaagaaagctaagtgggcccatttccttaggtgaaagcgatccaactgccgctgatctgattgaacaggacatagtcagacaaagagttgcgtcatatatgaagagtgctgataaagaggatgtattgaattttgccatgctaggattaggccccaactgggaatga

SEQ ID NO: 1467 - DNA, 798 bp, Saccharomyces pastorianus
atgtttgttattaaaagaggtatccacacggtaccaaggctacccaatactaaagcactactacaaaagggagttcccaaagtactcagttcttctggtttcaaggtagcatggaccgactaccagcagtacctgtgtgataagctgacgctagctactgcagggcagtctctcgagtcatatcatccattccatatactgctgaaaactgcagggaatccattacaatccaatattttcaatttagcttcatctgttcataataatcacttgtttatggagaatattcttccttctattaccgaaagtgatagtgattctccaatagggaagacagaaccatccaggctatttttgtccagaatccaagactcgttcaacggcagtgactgggacgtagtgaaagaagaaatgatccatcgttcagaaaacgaagtgttgggccagggctggttatttctcgtagaaaatagtgaaaaaaaactctttatattaacctgtcaaaacaacggtacgccgtattatttccccagaaaccagacattcgatttaaacagcgcaatttctatcgacgagtttggtaccttgaagcaaatgaaagaaatgattgaaaactcaaccaaactgaatggtaaagttcaggactggaccatgcctctaatttgcgtcaacctatgggatcatgcctatttgcatgattacggcgttggaaacagatctgagtacgtgaagaatgttcttgataacttgaattggtcagtggtcaataatagattattctctgacatgtccaaataa

SEQ ID NO: 1468 - DNA, 465 bp, Saccharomyces pastorianus
atggttcaagctgtcgcagtgttaaagggtgatgccggtgtctccggtgtcgtcaagttcgagcaagcctccgaatctgagccaaccactgtctcctacgaaatttctggtaacagccccaatgctcttcgcgggttccacatccacgagttcggggacgccactaacggctgtgtctctgccggcccccacttcaaccctttcaagaagacccacggtgcgccaaccgacgaagtcagacacgttggtgacatgggtaacttgaagaccgacgccaatggtgtagccaagggctctttccaagacaagttgatcaagttgttcggtgtcaattccgtcgtcggcagaagtgtcgtcatccatgctggtcaagatgacttgggtaagggtgacactgaagagtctttgaagaccggtaacgccggcccaagacctgcctgtggtgtcattggtataactaactaa

SEQ ID NO: 1469 - DNA, 1023 bp, Saccharomyces pastorianus
atgtccgctccattggtagtattgggtaaccctcttctagatttccaggctgatgtcacggctgaatacttggccaagtattcgctaaaagacaacgacgccatcttagtcgacgccaagtccggcgatgccaagctagccattttcgatgagctcttacagatgcctggctccaagcttgttgccggtggtgctgcgcagaacaccgccagaggcgctgcctatgtcttgggcgccggccaggttgtctacttcggttccgtcggtaaggacaagttcagtgaaagattgcttaacgaaaatgaaaaagctggtgtcaagtccatgtaccaggtacaaaccgacgtcggcaccggtaagtgtgccgctttgatcactggccacaacagatccttggtcactgacttgggtgccgctaacttcttcaccccagaccacttggacaagcactgggacttggttgaagccgctaagctcttctacatcggcgggttccatttgactgtgtctccagacgcgatcgtcaagttgggccaacacgccaaggaaaacaacaagccattggttttgaacttgagtgctcccttcatccctcacgtcttcaaagacgcattagccagagtcttgccttacgccaccatcatcatcgctaacgaatctgaagccgaggccttctgcgatgccttccagttgggctgcgccaacaccgacttggaggccattgctcaaaaaatcgttaaggactctgcagttgacaagaccgtcatcttcactcacggtgtcgaaccaaccgtcgtcgtgtcctccaagggcaccgccacctacgccgtcaagcccttggactcctccaagatcgtcgacaccaacggtgccggagacgcctttgctggtgggttcatggccgggttgacccaaggaaaggacttggaaacctctattgacatgggtcaatggttggctgctttgtctatccaagaagtcggtccttcttacccctcccaaaaattatctttctctaaatag

SEQ ID NO: 1470 - DNA, 2052 bp, Saccharomyces pastorianus
atggagtacatcaagattgctaaagtatcaaatgtagtactgcatagaagaggcacagccaccgaaggtactttgcacttgactactcatcatttgatctttgagtcctctcaattatcgacggaattctggtttcactacccactgatttatggagtgcataaaaacccgggcagtaccttactgtcaaaattgacgtccacaaaccaaatccaattggaaggcacagattcgcagaactataggctctaccagggtaaggatctttggtcattcgtgaacattaagatcatcgggaaagactacgtggtcttttctttggatttcggcagcgatttgcacctacaagcgaggaaagtgtatgagtccatcttaaatttgactgtcgtcggtaatattaacaagctatacgcttttatttacatgtctaacaacttggagaggaaattgcccgcgcccaatagttgggaaatatacgatccagttagggaatttcaaaggcagggactagatcataatgacgagtcgtgcccttggagactatctatgattaacgaacagtacgaattttgcccgacatatccctcccaactgttcgtaccgaggtctacatcggatacgctactccagcatgcgtcgaaattcagatcgcaaaagagaatccctgttttaacttatcaccacaaggccacagattgtaacattctcagatcatcacaaccattgccggggttgatcaaccagaggtcaattcaagatgaaaaactggtttgggaatgttttagctctttttttaatacagatatcaaaagaaccaagcacgtgatagtagacgcaagaccgaggaccaatgcgttggcgcaaatggccttgggtggtgggacagaaaacatggataactacaatttctttctagcagacagtaatctaggtgtcgataagaatataaaattgcccaccgtgacaagattatttctcggtatagataacattcatattgtttccaacacagctgcatatatgacggagatcatctgccaagctggcgatttgaatttaccgttagagcaaaatctgatcaagtcccaaaagttcaccaattggctgaaattgaacactcttattctcaaatcagttgatatgcttctaaaatcaatgattttcaatcactccaacgtgttggttcattgttctgatgggtgggacaggaccagtcaggttgtttctctcttagaaatgtgtttggatccgttttatagaacatatgaagggtttatgattttagtggaaaaagattggtgttcctttggtcacaggtttctggaacgaagtggccatttaaattctgacgtcaggttccacgacaacactatgcactcgttatttaacgacggcgatactaatggcgatagtttcgacatggaccaagacgattatggtgaagatgatggtggagatgacgaagatacgaacttaataaatataagtaaaatatccaaaaaatttaacaacaatttcaaactgaataagaagagtctaaagtttgtttccccggtcttccaacaatttctagactgcgtatatcaattattgacgcaaaatccagacctgtttgagttcaacgaaagattccttagaagactaatatatcatttatattcatgtcaatacggaacgtttctttcaaacaacgaaaaggaaaagtttcaacaagatctgccgaacaagaccaaaagtgtttgggactattttaggtctaggaaaaagcagtttataaatccaaattttgtacagagggacaatagcgtaaaggatgatgaagaagttgcagaagacgaaaaagtggaatggatttcaccagacttgaaaaaaattcaatggtggtggcaactgtatggaaaaaaggattcagagatgaacgacgaattgcgccataaaaaaggttcttcatcactacccatggataaaaatagtaaagagcactgcaattccgatggatctaagggcttaaatctctcgatttttgggtttgatatgtttaatagaaagtga

SEQ ID NO: 1471 - DNA, 852 bp, Saccharomyces pastorianus
atgaaccagatactgaatgcgcaaagactgatacaattatcgcagttccatcctaaactgaaaaatatatggtaccttgttgccgccgccactttcagtgtttgtaacgagccacaggaaatacccaaactgtaccattatgccatgctactgagtaacgacaacgctcatatgtatagattcacattagcctcacaaaccattgatttacttcgttcagattcacaaataaggaaaactctaattaatgaaaactatcaacagccgacgttctttcaaaagcaactcacagcgaaattcagagaagtaattcttagaacggggcccttagcaggccttccaaaggccatcaatggcctcactgtgttaagggaaaccactccggacattttgctaccgcatctggattcaatagacccatgggacgctgccatgggtaatagttcttcgttctcagagactgccatgagaaggaaacatgacaagacaatccaggaaagagatcataccatacaaaatgggttacggcattggaattccatatataataaagtttccacccgtgtggtgaataatctgaactcctcgtacccagacctgtggtattatacactagctcacgtttatggcccattattctcatttgatgagatattatccgcgcaagaaacgagtttagtaataatcgcctctttggttcctcaagatgtcaaccctcaattgcgtgggcatttgaaaggtgcactgaatataggctgtgataaggagactgtagaagctgtcagaggattggctatactcgtatcccaatggtgtggtatccaatggaaatccggtgttgtaaaagtataa

SEQ ID NO: 1472 - DNA, 606 bp, Saccharomyces pastorianus
atggcgaatacgcacggcatacgatacattcgtttgaagcaggtcttcaatcgtgcattggatcaatcgatttcgaaattacagagctgggacaaagtgagctcatgcttcccgcaatacgtgaacaccaagcaaggcgctataaatgttgccaactgtcagcgacagttgacggaattctggacggagttatgccaaagggagttcaaagagatcatagaagaaagggacgtggagcagaaactgaatgagttggacgagctaatcgcggaagccaaggaccgttacatgggaggtggcctcaatgatggagacgagaggcccgcaatcgacgaactttccagcaaggaacttgtggaatgccacgtctacagccagcggatacacgccgtgcaagagatagacgaacggctggcgaaggtgaacgagatgaacgatcagttagctcgggaattggacgacctagaagcacaagtggatgcggaaaaacaggagatcaacgagatgtatgacgagtatttgggctctcacacggaccagccagtgaatggactgctgctgcaaagcctgagcgatatggttttggagttgaaggaaaactactag

SEQ ID NO: 1473 - DNA, 744 bp, Saccharomyces pastorianus
atgctgcattctgcgaggagacatttgttgtgcaggccacgtctattgtggcagagcggtctcgggactgctcgtttccagtcttcgctgcgagcaccggccaacgagcccttggcagaggaccaggtcgacgaatggctcgaggccattaacgagctgaagactgaattctcttcaaaggactacctgccggaaacttcgctggcgcccccaggccaatccaagatagacctcttgcatggcccgcacacagaggccaagaccaggcccaccacggagcagctggagcagtgggaggcgttgaagtccgtgcccatccctccacgcaaggacccgacgctggaccacatcaccaacatgatcatgcgccacggaaagaaggagaaagcgcagtccatgctgtctaaggcgttgtacctggtgtactgccagacccggcaggatccgatccaggctctggaaagggcgctggacgacttggcccctctcatgctcaccaagacttttaacacgggtgtggccaaggcctcggtcatccccgtgccgttgaacaaaagacagagaaacagaattgcttggaactggatcgtgcagagcgccaaccagcgggtgtccagcgactttgccgtgcgtctgggcgaagagctcgtcgccatctccaagggcacctcctctgccttcgacaagagggaccagattcacaaaaccgccatcgctcacagagcatacatccaactgaagtaa

SEQ ID NO: 1474 - DNA, 837 bp, Saccharomyces pastorianus
atgaatgctaatactaccacctcggcgatcgggtttgccagtcctttcgagaagctgtcgttcttcccgcactcgcccaacctgatactcgcacatctgcacgagatcatcttcagcttcatcttttaccaattcgccttctcagtcgtcgcaccgttcttgaacagggtgatcttccgcaagcattacaccacgatccatgacccgttattgaaagttgatttcgacgtccacaccgtgtcgatgattcaggctgccatcacgaacaccgtcctgctgcccaccctcgccacgccgatgcactacaatgtcgtcacctacgcggactcgtacagctcaatggtctcctcgctaagcgtaggctactttctttgggacctgaccatgtgcatgcgtcatttcaagctttacgggctcgaattcaccggccacgcccttggatccacgtacgtgtttctgttgtccttgaggccgttctgccagcccttcatcggcaggttcctcatctacgaggcctccacccccttcgtcaatatgaactggtttatcgtgcagtgtaacgcgaagagcaagaactccattccgctgtggttcaacgtcgtcaacggcttcctgctcatggccgtgttcttcttggtcagaatctgctggggcactctcgcatccgccctcttgttcaagcagatgtggaatgtcagagatgagttgcctaaagtctccgccgccataatgatgtcgctgaacatttttatgaactttctgaacgtcctgtggttcaggaaaatgctcaggttagtcaagaaacttacaaagtctacctcgtctaagctcgactga

SEQ ID NO: 1475 - DNA, 1362 bp, Saccharomyces pastorianus
atgtttgatctcaagacaattattgaccgtcctaatattccgtggaaactaatcatttctgcgttttccatcgcccaattctctttcgaatcttacttaacctacagacaataccaaaagctatctgaaacaaagctacctcctgttctggaagacgaaatcgacaatgaaactttccacaaatccaggaactactctcgggccaaggccaagttctccatcttcagcgatgtctacaacctggcccaaaaactagtcttcatcaaatacaatttcttccctaaaatctggcacatggccgttaatttgtcaaatgcgatcctgccggttaaattccacatggtctccaccgttgcacaaagtttgtgtttcttgggtcttttatctagtttgtccaccttggttgatttgccactatcttactacactcacttcgtcctggaagaaaaattcggtttcaataaattgaccttcaaattatggatcgccgacatgttcaagagtctttctttggcttacgccatcggcggtcccatcctttatctgttcctgaagatttttgataaattccccactgatttcctttggtacattatgatcttcttatttgtcgtacaggtactagccatgacaatcatcccagttttcatcatgcccttgttcaataagttcactcccttggaagaaggcgaattgaagaaatctatcgagaatttggctgacagagttggcttccccttagaccagattttcgtaattgacggatccaagagatcttctcattcaaacgcatatttcacagggttacctttcaccagcaagagaatcgtattgtttgacactctagttaacagtaattctactgacgagattacagctgttttggcccatgaaatcggtcactggcaaaaaaaccacatcgtgaatatggtcatctttagccaattgcacactttccttattttcacacttttcaccagcgtctacagaaactcttcattttacgacacctttggctttttcacagagaggatgactggtggtttcattgacccggtcatcactaaggaatttcctattatcattggatttatgctatttaatgatttgttaactccactagaatgtgccatgcagttcgtaatgagtttgatttctagaactcatgaatatcaagctgacgcttacgccaaaaaattgggctacaagcaaaacctatgtagagccttgattgacttacagatcaaaaacctctctaccatgaatgtggatccactgtattcaagctaccattattctcacccaactctagctgaaagattgactgctttagattacgttagcgaaaagaaaaagaactga

SEQ ID NO: 1476 - DNA, 2196 bp, Saccharomyces pastorianus
atggaaaaaattcctaccctgtaccctaccggacaagagttcgaaaacccaatagactatctttctaaccctcacattaagaggctcggcatacggtatggtatgatcaagatcataccaccgggggacttccgtcccccggtgtcaatagacgtgcagaacttcacgtttcagccaagaatccaaaatctggaaaatctagacctgataaataggtgcaggctatttttcatgaagcagctaaataattttaatagatctgttaaggatgcaacgaaaagcattcttaaaactccttacgccgtggtggaatgttcggatcctgctcacccagcggaaaagcttcaaaaaaaaatctacttttatgacatcttcgctgaattaataaaaactaatccggcgctcactgacacttcgcagtcttccagaaaagggctgagattcatagggatttcccaaatcagagaaaacactagtctttggaggacgatctctaaaaatctcaaagtgccaaccggtttgttgaaacacgtttttgaaaaatacattgcttcgtactatatatttcttcattcgttgaatgagaatgttcacacagcactgcataatgatcaatatccgaagtctctgctaagtgacgacgaggacggctttgaccttgattctgattctgattctgggtccggttcagaagaagaggaggaggacgacgaggcttgcatcgtatgccacaggacgaacaatccaaaaaggacgatcttgtgtgattcgtgcgacaagcctttccatatctactgtttgacaccgcctttggaacgcgtgcctcccggtgattggatttgtaatacttgtattgtcggcaatgggtattacggtttcacgcaggattcgcacgactattcactaccagaattccaagattactgtaaccatcaaaacgccaagctgctatctaaaagaacgttgtcaattgatgagctggaagagatgttctggaatttggtcaccgaagaccatcgcaacggattaacgacagttaaatacggtgctgacatacacaacgaatctcctggacaaatcactggattccccacgagagcatttatacccaaggatctgagtgagaacgaacgagaggaatatgtcaagtattgcgatcatcccatgaatctgacaaatttacccatggttcataattcgctattgccactgtttgaaagaaacatttccggcatgaccattccatggatttacatcggatcattgttctccacgttttgttggcacatggaagaccaatatactctaagcgccaattatcagcatcaaggcgaccctaaagtctggtacagtattcccgaatccggctgcgctaaatttaatgacctactaaatgacctatcacctgacttattcatcaaacaacccgatttattgcatcaactagttactttaatatccccctacgatccaaacttcaagaagttcggcattcccgtgtataaagccattcaaaaacctaacgagtacattataacgttcccaaaatgttaccatgccgggtttaacacggggttcaactttaatgaagctgtgaattttactacagatttttggctaccttatggatttggtgctattacggattacaagtcaacccaaaaaccatgtgtctttgatatgtttgatttgatgatcaatattttgaataaatacaacaacggcactttatcctttaatgacgcctttgctagacaatgctactcctcattgatcgtcttttataataaggaattaaaacgcatacgaagaattcaagccattgtgccacggacgcaccttctgaccttcaattccggtccggaagatgatgatgacgaatatgatgtgttctgttctcaatgtaaaaccatatgttcagtggcctttgtattgcatgcgctcagtgaccccgaatctttaagaacacataagaggcacaagaaaaaccatttgagtattaagcagtggaatgaaatttccacgacaaatcgtaatttaagtgttttgtgcactcaggatttcttgaaaacgctccaaaactcaaacagtagtggtgacgaagaatcgtgcgacaacgatgaattgtacttaaccaaatcattggaagacattgaaactttaataaagcaagttggcgtaaagctagataaataa

SEQ ID NO: 1477 - DNA, 1536 bp, Saccharomyces pastorianus
atggttttgcctagactatatactgctacatcccgtgctgccttcaaagcggccaaacaatctgccccactcttatccacttcctggaaaagatgcatggcctcagctgctcaatctaccccaatcaccggtaaggttaccgctgtcattggtgccattgtcgatgttcattttgaacaatccgacttacccgctattttgaacgctttggaaatcaagactcctcaaggtaagctggttctggaagtcgcccaacatttgggtgaaaacaccgtcagaaccattgccatggatggtaccgaaggtttggttcgtggtgaaaaagtccttgacactggtggccctatttccgtcccagtcgggagagaaactttgggtagaatcatcaacgttattggtgaacccattgacgaaagaggtcctatcaagtccaagctaagaaagccaatccatgctgaccctccatctttcgccgaacaatctacgtccgccgaagtcctggaaacaggtatcaaggtcgtcgatctgttggctccttacgccagaggtggtaagattggtcttttcggtggtgccggtgtcggtaagacagttttcatccaagaattgattaacaatatcgctaaggcccatggtgggttttccgtcttcaccggtgtcggtgaaagaacaagagaaggtaatgatttgtaccgtgaaatgaaagaaaccggtgtcattaacctggaaggtgagtccaaggtcgccttggttttcggtcaaatgaacgaacctccaggtgccagagccagagtcgccttaaccggtttgaccattgctgaatatttcagagacgaagaaggtcaagatgtcttgttgtttattgacaatatctttagattcacccaagccggttctgaagtttctgccctattgggtcgtattccatccgccgttggttatcaaccaactttggccaccgatatgggtcttctacaagaaagaatcacgaccacgaagaagggttccgttacttctgtccaagccgtttacgtgccagccgatgatttaacagatcctgcccctgctactacttttgcccatttggacgctactaccgtcttgtccagaggtatttcagaattgggtatctaccctgcagtggatccattagattctaaatcaagattattggatgctgccgtcgttggtcaagaacattatgacgttgcctctaaggtccaagaaactctacaaacctataaatcgttacaagatattattgctattttgggtatggatgaattgtctgaacaagataaattgactgtcgagagagcaagaaagattcaaagattcttatctcaaccattcgccgtcgccgaggtctttaccggtatcccaggtaaattagtcagattaaaggataccgtcgcatcatttaaagccgttttggaaggtaaatatgataatataccggaacatgctttctatatggttggtggtattgaagatgttgttgctaaagctgaaaagttagccgctgaagctaactag

SEQ ID NO: 1478 - DNA, 678 bp, Saccharomyces pastorianus
atgtctgacaccgaagctccagttgaagttcaagaagatttcgaagttgttgaagaattcaccccagtagttttggctactccaattccagaagaagtccaacaagctcaaaccgagattaagttgttcaacaaatggtctttcgaagaagtcgaagttaaggatgcttctttggttgactacgtccaagttagacaaccaatctttgttgctcacaccgctggtcgttacgccaacaagagattcagaaaggctcaatgtccaatcgtcgaaagattgactaactccttgatgatgaacggtagaaacaacggtaagaaattaaaggctgttagaatcatcaagcacactttggacatcatcaatgtcttgactgaccaaaacccaatccaagttgttgttgatgctatcaccaacactggtccaagagaagacaccaccagagtcggtggtggtggtgctgccagacgtcaagctgtcgatgtttctccattgagaagagttaaccaagctatttctttgttgaccatcggtgctagagaggccgctttcagaaacatcaagacgattgctgaaactttggccgaagaattgatcaatgctgctaagggttcttctacttcttacgctatcaagaagaaggatgaattggaacgtgttgccaagtctaaccgttaa

SEQ ID NO: 1479 - DNA, 1218 bp, Saccharomyces pastorianus
atgagtttagaggatacgttagcgaacatgtcattatatgacgccaaaaaatatttccgtaaggctcaaaatgttgtgtttaattacactgagatggagggtaaagtccgtgaagcgaccaataacgagccttggggcgcctcttctactttaatggaccagatttcccagggtacttataacttcagagaaagagaagaaattttgtccatgatctttagaaggtttaccgaaaaggcaggtagcgaatggagacagatttataaagctttacagttacttgactatcttattaaacacggctcagaaaggtttattgacgatactagaagtagcatcaacttgatcaagattttggagtccttccactatacagattctcaaggaagagatcaaggtatcaatgtcagaactagagttaaagccctcattgaattattaagcgacgatagtaagatacgcgcggaaagaaagaaggcaagagaaacagcaaagaagtacaagggtgttgctggaggatctgttgccgctgatagcagcttaaattccaaggccggtttcaattctacgaaagtacacggtattagcgtcagcgcggattttgatagtgatgatgaagataatggagagaactcttccagaggaaacggttacagagatagtgggtcaagggataccaccactcctcagtcggaaacacaagaaccggaagattttgtcgactttttctccaacggatcgtcacaagtacccaaagatctcatacaagaaaataacgaaggtgaaggagacgatgatgacgaattttcagaatttcaaagcgctgttcccgtttccaacacttcgttcaatttgttaaactccaacccaattgggaccaccgccacttccgctaattcaacatctttctacaacaattctactgtcagtcagagcaatgttactcctgccattgccgctgagcctaaaaaagcagaccctttcagcttgttgttttcaacagccaaggcatcctcagaagcacctattacccctaaagtatcccaaactaatgcctcctcctcaaaccccctatctaacaatacgacagcattaaatatgaacgagaacgatgatgatgatgaattcggtgaaatgcatggtggagctgtccaacaagaacaaaacactaccaataagggcacttcttctaacgaaatcgatttgctttctttttaa

SEQ ID NO: 1480 - DNA, 1008 bp, Saccharomyces pastorianus
atggacgaagaccttttttatgatagattgcaccaacggtgcccgcgagagtacttactgaaggagttagagacgaacgagcacgctgttattctaaatgtttcgagattcatcaacgaaatggaacgagtgcaagctacaaacgcatattactgcaagacgataatcaaagctcttttggacaatgactggatttttagcaaagctctcacaatggcagacgaagacgaagacggtcccgaaatatccgattatctctatgagaagtacatcgaacttctgagcacgggcaaaccagacccaacgatgaaagagatcataaggtacagatttgatggaaccgtgaagatcagcatcgaagaaacgccgaatttgatcagtgcggccagtaccacggggtttagaacgtgggaagctgcgctatacatgggagacttcctcatgcacgagccgctactagaatttgtgaatgaagacgacaagaagaagttgaacgttctcgagatcggtgccggaacaggcattgtaagtctcgttctcttgcggaagtattgcgaatacgtgagcaagatgtacgtaacggacggcgactcggacctggtggagacgcagcttagaaggaatttcgagttgaacaatgcctggcgtgagcaggggccagacatcagactgcaaagactatggtggggtagcgacagagtccccgacgaactggacctggtggtcgcagcagacgttacatacgactcgacgatcttccctgaactgtgccagtgcttggccgaatgccttgccacaagccaatgtaaaatgtgcttactgtccgcgacgatcagatgcgactccaccgacgaagagtttgcccgagagtgccataaagtcgggttgaagtacaccgtggtaacgagcaccgaggatgataagaacagcgaggcccggatggtggaaaacctgctctttaaacctttgattgcgcccattcgaatttacaaggtagtgagacaatag

SEQ ID NO: 1481 - DNA, 1920 bp, Saccharomyces pastorianus
atgatatctagaacagtaggtgagtcgattccacccaacacgaagcacgccgtatcggtgtgtttaccgacatgggaagccacagtgggctatgaagaaggtgagagcgacatcataaactcgcttactaccggctacccaagattcttcgttcacaagtcaatcaagaaactgtgcgaagttttgtgtgctaagtattctatggaaaatgagacttgcctttgtttcccgtcttataagattgctaataggtgcagagagttcattaaagtgaaaacaggtatttcaacaaaagtacgcatcttacagctgtgcacacctaagcccatgaaccaagaggagaaactttggaggagggaatgcaagattacggtggtatttgtggaccaggagatctttccggtaatgaaacagtactggcagcatactggtgaaattgtatccagtagaatggccgaatacatcctacacgagttggaagtcaaggaaagcttgaagagtacgggcacagctagcaatattagaaaatacgcggctgaagatgagagcagagtaaacgaagaatacgttgaaacgagatttggtagaaatttgaatttcctggcagctgataaagctaagtttctaataaggaaaagaatcgctacaaaagttgttgaaaaactagattcagaaagcgtgtcggacttgttctcatttgaacattataacgaaggcaacggtcccttcaatgccgggagtggagagccgttcggcgaaagccaattgaactctgacgttcctgctgaaacattcaactccacgggagagagcagtacaagcagtacttttgaagacatatctagggacgacttaaactatcacgtcaatccgaacacggatgtttacttgttccctagtgggatggcgtccattttcactgcccacaggctgctgttgaaccttgatgctaaccgcttatcaagatcctctaataggcaggacaagctgattgggtatggcccccccttcaaaaagacggttatgtttggattcccatacacagatacgttgagtattcttcgaaaattcaatcacacgcacttcttgggacagggtgattcgacatcaatggacgttttgaaaaagattttacattctggcgaacaaatactggcagtgtttattgaggcgccatcaaacccgctattaaaaatgggagatttacaagaactgaaaagactctcggatctatattcgttttatatagtggtcgatgaaactgttggcgggtttgtcaatatcgacgtattgccctttgctgacattgtttgtagttctttgaccaagatcttcagtggtgattcgaatgttattgcaggatccttagtgctgaaccctaggggcaagatttatgaatttgctagaaagtttatgaaaactgaagacggatacgaagattgtctatggtgtgaagatgccttatgtttggaaagaaattcaagagattttgtagaacggacaatcaaagtcaatacgaacactgatgtattgttaacgaaggtattgctaccacaagtgggaaagttgttcaagaaaatctactaccctagtttaacatcagaggaaaccaagaagaattatgacaacgttatgtctacaaaagatggtggttatggtggcttgttttcattgacttttttcaatatggaggaggcaaaaaagtttttcaacaatctggaactatgtaaaggaccgtctttgggtacgaactttacgttggcatgcccgtatgccattatagcacattaccaggaattggacgaaatagcccaatatggagttgaaaaaaatctcgtaagagtcagtgtaggcttagaaaatagcgatattttatgtaaggtctttcaacaagctattgataaagctttggaagaatga

SEQ ID NO: 1482 - DNA, 3147 bp, Saccharomyces pastorianus
atggatattacagaattactacagtgcttcgcctgtactttggaccaaaacgctgccataagaaccaatgcggaaactcaccttaaaaacgcaagtaagacaccagggtttttaggtgcttgtttagatatcatcgccgccgatgaggttccagaaaatatcaagctatcagcatctctatacttcaaaaacaagatcacatacggttggtgcactaatgagagacacggctcaaatgaattattagattcacaagttgatttggacgaaaaaccagtcgtgaaggatatgttgatcaaaacaatggtcagcgtctccaaaacttctccacgttgtattagagtgctaaaatccgcccttactgtgatcatctcagaagattatcccagcaaaaaatgggatgatctattgccaagctcattagaattgctctcaaatgaagacattgctgtaacatatgttgggcttctatgtcttgctgagatattcaggacgtataggtggaagagtaatgatgaaagacagggcttagaagagttgattttaaattatttccccgctttattaaattacggctcaaatactctgttccaagacggcaaatacatgaataacgagcaaattggtgaattggtgaaactgattgttaagatctataaatttgtttcatatcacgaccttccatttaccttacagcgcccagaatcgtttactccatgggcatgtttctttgttagtattattcagcaaccactacctcaagaaattttggtcatatccgatcttgaagtaagaagcaagaatccttgggttaaatgtaaaaagtgggctctagcaaatctttacagacttttccaaagatacgcatcaacttcagtaacaagaaaattccaatatgatgaatttaaacaactgtactgtgaccaatttttgactcagttcttacaagtcatcttcaagcaaattgaagaatgggggactggccaattgtggctaagtgatgaatgtctatactatatattgaacttcatcgaacagtgtattgtgcaaaaggctacttggaaactcgttggtccacattataatgtgattcttgaacacgttatttttcctttattgaagcctagtgctgatgctttggagacttttgaaaatgatcctcaagaatatatcaatcggaatatggacttttgggatgtcggttactctccagatttagccgcacttgctttgttaacaacatgtgtcacaaaacgtggaaaaatcaccttacagccaactttagagtttatggtcacaaccttacaaaattctattggtgactacagcaatatttccttagaacatgccttgcaaattgagtcatgtttgagaatattctctagcattattgaccgtttgatcaccaaggactctccattcgtcaatgaaatggaaaagtttgtattgacgtttgttttgccatttttcaaatctcaatatggattcctacaaagccgtgtttgcgaaatttgttcgaagttgggttcaatggattttaaggacccgataataatttccaccatttatgagggcgtgatgaactgtttaaataactctaacggttcattgcctgtagaattaatggcagcattggcattgcaaacgtttattagcgatgatcaattcaatcaagagctttccagacacgttgtgcctacaatgcagaaactactaagcttatccaacgatttcgagtctgacgtaatttctggcgttatgcaagattttgtggaacagtttgccgagcaattgcaacctttcggtgttgaattaatgaatactctggttcagcaatttttgaaattggcaattgatctacatgaagcctcgaatatagatccagattcattcgcaagtgtcgaggatgttcctgatgagtctgagaagcaaatggcagcgttgggtatattatcaacaacgatctctattttgttgtcttttgagaactcgcctgaaattttgaaaaattcggagcaatcattttatccagctgccgaatttattctgaaaaatgatatagaagatttctatcgtgaatgttgtgaatttgtagaaaactctacatttttattaagagacattacacccattagctggaaaattttagagctgattggggaatgtaataggaaaccaggtagtatggtgtcttattacttaagcgacttcatgttagcgcttaacaatatgttgatttatggtaaagacgaattgaagaagaatgaattttacactaagattatattcgagatttaccaaaaggctgtcgttgctgaagataatgctctagatgacttaagagtagtctttgacttatctcaagaattagttcttgcactaggtgacaatttaccgcaacaatatagggaatgcttattagaagatgttgtgaaggctatcttaacagagaaaaacgagttgaaaactaacattgtttttagcgtaaccgcttttaatgtcgtaatttcaaatctgataacagagcctttaatcacgttacagtatttgagacagcaaagatgtcttgaaattttctttgagacatggattacaggctacattccgaattataaaagatgttatgatattaagttatcggtccttgcgcttttgaaaattattctgaatttacaaagtagcgattactccatgttgaacttggaaaacctagttccacaattggggacccttgtgactcagttagcttcaagacttccagcagcgttgagacaattagctgatcaacgcaaagaattttcatcatcaggtttcggaggtgacaccaagtgggatgaagcattccttgacgttggtgatgaggatgacgacgaggatgaaagtgacttgaccgagaagtatttagagttgataaaaaacagatcagactccttggattttgtagacggctatgacgcgaaggaaacgtttgatgacttagaagaggacccattgacaggatcaatattggatactgttgacgtatacaaggttttcaaggagtccatcataggcctacaacatgtcgacagtaatagatatcaaggtataatgggtctcctgacgccagctgatcaagaacttttcatggggattatgaatgcctag

SEQ ID NO: 1483 - DNA, 630 bp, Saccharomyces pastorianus
atggcggaagatgaaagaatgtacatctcctataataatattcacaaactttgccaaaaagtcgcaaagcatattttagcaagaaatgaaaggcctgatattattatcgccattactggtggtggtatgattcctgcgagaattattagatcgtttttgaaagttaagggtcaaaagaatattccgatccaagctatcggtttatctttgtatgaggatttagggttgaaaaacagtgtagaaactatcggcaaagaggttattagaactcaatggctagattttagtgctttgaatcaacatttcgattccctgattggtaagaaaatcttaattgttgatgaagttgacgacactcgaactactcttcattacgctttgtcagaactggaaaaagaagtcgttgaacagcaaaatcttttgaatagaataaacgaggatacggttttttctatatttgttctacataataaggataagcccaagaaagccgacttacctgactctatgattaattctgggcgttatattgccgcgcaaactgtccctgatatgtggttatgttatccttgggatgctgaagacattgaagaacataccgaactggctaaagctcaagggaatgattga

SEQ ID NO: 1484 - DNA, 2127 bp, Saccharomyces pastorianus
atgagtaaaaaactatcattggaagaaaggctttctctggctacgaagaagggaagaaaaaagagcaagagatcaacatcgaacttatcatcaccctcacctgcagtaccctcaagcagtgaacaagaaatgaatggcgcgtctttcgatgatcctactgccggtgtggaatcaaacgatgatgctgagaacggggacgatacagtacgattgctaagcacggaagagagcggtacacataaactaataacaactgcagtcgaaagtacagcgcatatcgatccggataaagctggaaaatctgaaggcactataataccattgcctcaatggctacctaagaattttctagacctcagtgttgaggaattggtcaaaaaaataagcccggaataccaaaggcttaacgagcagattgacgacctaacaaacgaactcaacaagaaaccccaaatcgagactagggactctagtttctttaaattggttaaagagaaagacgatttgatagaccaattgaaaaaagaaggcacaaaattagcagagacagaattgaggcaatctaatcaaatcaaagctttgagagcgaatgtaaaagatttagagtatgatgtatccacactaactgaggattcggcacagaatgtagacaattttaacgagctgcaatcattgtatcataacttacaaggacaattggctgaagccacaaacaaacgaaaggacactgataaacaaaaagagttactagaaacattcgagaaaaagattgaagaaaaggatggtttgattaagagtttgcaacaatctttagatgaagtagaaatattgctcgagaaggagagaactgaatttcaaatggaaaagaaagcattacaagaagcaacaatagatcaggtcacagcactggagacaaaactagaaaaactaagaatagagctggataattccaatcagatttcaaatgcgaaatcaaatagggacggtggcgccgataacgatgaaaacagctccgaagtaaaagaacatacattgtcccaatataatctgttgaaagaacagctggaatcaagtaaggccaactggaatagtattgaatatgctctgaatattaaaattgtggatttggagaaccgccttacatctacaaaaaaggaaaaaaaaagatttgaagaagcttatcaaaccgccctggattcatcagaaactttaagcgagcaattggaaaaggaaagagataatcatctaaacgccgtttctcaagtcaaggagctggagagacagatagagactttaaaattatcattacagagtgtaaatgatgattacaatttattgaagaagaaatatgatattcaaagagctcagttagagaaaaatgacgatgattcaaaaccgcatcaagagaacagtgttgggaaagttgtcgaaaaattactttcagaatcaactagtagcttgaattccatgaacggaaatattgaagacgagtggattttgcctcaagaaaactccatgctgtcattatcaatctcaaaattggaagatttagaagacgattcatctataaaacccataggagatgggccgcacgacaccctaggtagtgaagaaacacaacactttagtaggaaaaatgtagattttagcatcgacgatatcccagaggaagcagctgatttgcaagcaatccaggaaggaaaatcgatgaaatcattaaacaatacatcaataccgtacagaagagcgagcgctcaattatcgaattctaatggccatataaatgctcatttggtgaataagttaagtacggaattaagaagactggaaggagaactatcaacctcaaaggaatcatacaataacttgttaagtgaaaaggcaaaggcaaacgacgagatattgaggctacttgaggaaaatgataaatttgatgaagtcaataagcaaaaagatgagcttttgcgaaaagtagaacaaatacaaagtaaattagagacctctttacaattgttgggtgaaaagaccgaacaagtggaagaattagaaaatgatgtgtctgacttaaaggaaatgatgcatgagcaagttcaacaaatggttgaaatacaagagaagatgagatga

SEQ ID NO: 1485 - DNA, 720 bp, Saccharomyces pastorianus
atggatacagaaaaggatctgctggatgcgtacataaagaacttggagaaccaaatcggaaacaaacggtattttttggagcaagctcgaagcgccatcgatgagatcacgaataggcatatagaaccagaggggaaacctactgacccaggaatcttcgcagagttactgaaaaagcctatgttattaccagagagagcagacccaatcggcttcagcttggtgtcgaatttcttgtcatcgaggatccaaacttccagtgaatggctttcaataatgggcgatcaatcagtcgataaaaaggcaatggtgtcgttgcaaaaaaacactaacagtgacttgaaagagctgctggtattactacggcatcagtttgccaatctggataacagaaagcaaaacctgactcatctaaagacatcaaaagtaagaaatgaggagctttggggatcacttaaagacttcgtggtgagctttctagcaccgaatatggacaacaatggggagtctatacatatcctaacgagagaaactacatttatattaaaaaggctgattgtgcatgattcaactgtaacgatgaatgatttttcatccaagactatgccaatatacaggcttttactcagggcaaatatagttacagtaactcaaagccctaccaactcagatgttaaatacattaagctaatagactttaatgggaccggcctgacctaa

SEQ ID NO: 1486 - DNA, 264 bp, Saccharomyces pastorianus
atgtcttcattatcaacatccgatttggcttctcttgatgatacctctaaaaaggaaattgccactttcctagagggtgagaactctaagcaaaaagttcaaatgtccatccatcaattcactaatacctgttttaagaaatgcgttggctctgtcaataatccagatttaagttctcaagaagaacagtgtctggctaactgtgtgaacaggtttttagataccaatatcaggatcgtcaatgggttgcaaaacacccgttaa

SEQ ID NO: 1487 - DNA, 4329 bp, Saccharomyces pastorianus
atgactgcttcaaatatcttgacactcccacaattgctggcgcaatattcctcgagtgtttcccaaaataaagtgttttacactacccccacaaaaaacagtcgttcaaccttcaaagggcttgaatctgctgcaatagatgctactcatctgttgaataatcacgatccattcagtggcatcaagactcaactttctaaggacactttaactactgtctttacagacgaaactactttggtcaaatccattcaccatttatattctctacctaaccaatttccactcgtgatcactgtggatttgaacttgcaagattattctgtgattcctgcattaaaagatctctctttccccatcttgttgtcgtctgatttgcaaactgcaatctcaaacacagctgcctcatacaagattgctaccggctccctaactgccgtttttcactttattaacttggcaaagattggtacgagtaccgctattggacaaaatatcgatgttccaactttagagattgccaatgaggaaactgaagtaccaagctcagaagaggttttgccattaacaaattttgaactggtaaaaggcatagactcacctagtactgctatcgttaatctgtcaccatatgatgaagaagtcagcaatgtattaccttcaaatgcagctttgatcaagatcaaagcatacagaccatggaatttttccgacttcttggaaatattgccatcttccatcaccaagattgctgttttacaaggtgcctctaccaaatcgcaatcaaatgaatttcaaccattacttttagattttttcagtaacttcaatgaattggtatctaggagtatcgaccaggtggtactaactaatgttggtcttgtagacgattaccaaagtgttatcaatactgtcatatcgaatattaacaagaaagaacctgatgccaatctgttcttgggtaaacccaatgaaaacgcggaggaccaagctgaaatcactcagttaatatcctccgtcaataaggtgttaaatttagaggacgcttacaccaaggtactaaaacagttatttttttcaaatctgcaaattttgaaccaattttcaagtgagacaattgaaccaagcaatccagaatttggtttcggacgctttttgaagcaagaaaccaaacgtgaagaactggtcaatttagcaaagagctctctcgagccaagcctatacttttctgaagatgctaacaaaattgttcagttgttatctaaatgggtgtcatttcatgatcaggatcttgatgaagctcaattacaagaagcaaactcgataggtcatgaaatatttgaacttttacaatccaaccaagattcctccactgctttaaaattcttaaagattgcccctacaagtgattcttttatttttaaatcaagttggttaattggttcagatgcttggtcttacgatttgggccattcaggtattcaacaagttctgtcatctcgtaggaacattaatgtcttattgatcgattcagagccatatgaccacagaaagcagaaccaagatagaaagaaggatgtcgggctatacgccatgaattattatagtgcttatgttgcttccgttgccgtttatgcttcgtacacacaactattgactgctattatcgaggcgtctaaatataatggtccttccattgtcttggcctatttaccatacagttcagaaaacgacactcccctagaggtcttaaaggaaaccaaaaccgctgtcgaatctggctactggccgttgtatagattcaatccaatccatgacgatccatcatctgataaagaggcattcagcttggattcctcagttattaggaagcaattacaagatttcttggatcgtgaaaataaattaactctattaaccaaaaaggatccttctttatcaagaaacctaaagcattctgctggcaatgcattaacgagaaaacaagaaaagagaagcaaggctgcctttgatcaattattggaaggcttgtcaggaccaccattacatgtctattatgcctcagatggtggcaatgctgcaaccttggcaaagagattgggagcaagagcctatgcaagagggttgaaggctaccgtactatccatggatgacgttattctagaggaattacctggcgaagaaaacgtagtttttgttacttctactgcagggcaaggtgaatttccacaggacggtaaatctttctgggaagctctcaagaatgacaccactctggatttagctactttaaacgttgctgttttcgggttgggtgattctgaatactggccacgtaaagaagataagcattatttcaacaagccttcgcaagatttgttcaagcgcttagagctgttgagcgccaagaccttgattcctttaggtctaggtgatgatcaggatgcagatggtttccaaaccgcttattctgaatgggaacctaaattatgggaagctcttggtgtttctggtgctgctgttgaagatgaaccaaaacccgttaccaacgaagatattaaaagagattccgatttcttgagaggtaccatcattgaaaatttaaaagatgaatcctcgggtggtgttactcattctaatgaacaattgatgaagttccacggtatctatacgcaagacgatcgtgacataagagacgtgcgtaagtctcaaggcttggaaccatactatatgttcatggcaagagctcgtctaccaggtggtaaaactactgcccaccaatggcttgctttagatcatttgtctgacacctctggtaatggtactttgaaattgactacaagagctaccttccaaattcatggtgttttgaagaaaaacttaaaacataccttgagaggaatgaatgccgtcttaatggacactttagcagctgcgggtgatgtaaacagaaacgtcatggtttcagctttgccaaccaatgctaaggttcaccaacaaatcgccgatatggggaaattgatttctgattatttcttgccaaagaccacagcctatcatgaagtttggttagaaggtccagaagagcaagatgaagattcgtcatggccatccatctttgaaaaaagaaaagatggcccaagaaagaagaagactttggttagtggtaacgctttggttgacattgaaccaatatatggtccaacttatttgccaagaaagtttaaattcaacatcgctgttcctccttacaacgatgtcgatgtcttatctattgatgtcggtttaattgctatagttaacccagaaactcaaatcgtggacggttataatgtctttgttggtggtggtatgggtaccacacataacaataagaaaacttatccaaggttaggctcttgtttaggttatgtcaaaactgaagacatcattcctccattggaaggtattgttattgtgcagagagatcatggtgatcgtaaggaccgtaaacatgctcgtttaaagtatactgtagacgatatgggtgttgaaggtttcaaacaaagagtagaagaatattggggtaagaaattcgaaaccgaaagaccttttgaattcaagtctaacatcgattactatggatgggtcaaagatgaaactggattaaaccacttcacagcatttattgaaaatggtagagttgaagataccccagaccttccacaaaagacaggtataaggaaagttgctgagtacatgcttaagaccaattctggtcacttcaggttgactggtaatcaacatttggttgtctctaatattacagacgaacatattgatgaaatcaaatccattttgaagacttacaaattggacaacactgatttcagtgggttaagattatcctcatcttcctgtgttggtttaccaacctgtggtttagcatttgctgaatctgaacgttttcttcctgatatcattactcagttggaggactgcttagaagaatacgggttacgtcacgattctattatcatgaggatgactggttgtccaaacggttgttctcgtccatggttaggtgaattagcccttattggtaaggccccacatacttataacttgatgcttggtggtggttatcttggtcaaagattaaacaaattatacaaggccaacttgaaggacgaagaaatcgttgatttcatcaaaccattatttaaaagatacgctttggaaagagaagaaggtgaacactttggtgatttctgtatcagagcaggcatcatcaaaccaactacagaaggtaaatacttccatgaggacgtctctgaagatgcctattag

SEQ ID NO: 1488 - DNA, 4755 bp, Saccharomyces pastorianus
atgtttgctagattgcatggtaagaaacaaaggccaatttcttccatcaattctcaaactccaagaaccagcaatactacgcacgcaaatagtatatccttatcatcaggaaatttgatagtaggctcaaataaaaacttgagggaaaaaggcgaccagtttaactctcaactgaggtcttctaataggaatataacttcagataacaaaaataatggcaattccactaacgacgatgatgattacaatgggatagaacaaccccatcgccatcagagcccaggactgaaaacaaggacacaccaagctgagttaggctatcacgagtccagattttcagacaatttggtaatgttaaacctaatcgaattcccagatataaaacctggcaatctagtagaactgaaaacctaccataaggatccatctccatcaaatcgagataagaaaatttattttatcgccaaggactttgaccaagaaaccaagagaagagcgaagacgtctaatgtttcggtactttcgggtcaattacaaactctattagatttaccttccagatctaaaatatggataaaattaaaaccgaacaaagtagacttacaagtagacgtggttgaattcaatattaaggactgtttattgaatagaggtgatatgtggtttttatcatctaaaatcgttgatacatgtgtttttatggaccaaaaactgacattcctagattctattagaggcacaatcaaggggatttatcgaaatggtaaaaaaattgtctctggatatattggtgaacaaacaagaataatcttcagatctgagtctgctaggctgatttttttgattcaaattacagatgaaatgtggaatttcgaagaaactggtgaacagttatttcaaaagatggtcaattcatttttccccaagatttttaaaaagtggaaagatatagatactcatcatactattacaatagcgtttgctatatcaatggatctatcggatacttcgttcagagacctaaaacccggtgagtctttgaaaaattcaaaggattattttagaatagttgtagatcaagtcagtattattcactgggttgatattatggaaactttaaggaaggaattcatggaaatcagaaaggatttgttgaacaaaaaaacggataaaggttacagcatagctaaggggagattttcccctgtaattaaatcaaactttcttgaactggttaacttcgccacaacaatcttaacagatccgttcaaacagttggatttaaggcataccactacacatgttatgattatttctccaggatctgggttatttgatgttgattatagtttgttgagactaactgggaagaagttactatctcttgaaatgacaatggatttaatttgtctttcaaaggctccactacacatcgtacctcttttcaggtatcgagattttgagaataaactccatcactgcgtaccactttggctaagtgtatttttttggaacgaccatgctaaaaagaataactcagaatggactccaaggtgtaaaatttatgaattacagatgatggggattacagaaaatgaacttatacaggaggttgacgtcgaatatttacaattcaataaaaaagtaaaatgtttatcagaatttatgaatgattatgatgaaaatgcatttcagctcaagattttacccgctgattcaaacaaaaaactgtctaataaatcagatttaaaattcgataccgtatttgaggacgagattgttgtaaaagagaaaaaacttcaggcaacaacaactactactcatggcaatacaaggtttatatggaaggcgcccaaatttgctattccggtaataaaggacgtacaaaaaccaaacgtaataccagatctgtcaataaaaacgatagagacttctccctacgatgaagcgaacactacaaatgatattattaacactcccactttttctaacaacgataatactgaaataaacgactcactggcctctgtaagatccgctgataaccaaaatacatctttagcgctggattcgctgaaagggctaagtaagagaaactcattaaaagattttactcaaagagttataacgaaattcatctctaatatggatgtaaacaaatgcaaagaatcaactcctgtaacaactaaagatggaatcagcaactcaaccatagataaaagcacgccagcactactttcttctgaaagtaagacaggtaatattagattacaaagtaaaagctttatgattgacagtaacatcaacaatcgcggtaatttgataatcaagaaaaacctctccatttttggagtgcctgataaggagaccataagtggctctccgtcttcatatttagaatcatcacataccaggacttcctccagattttctaccgtgtctgataaaaccccattcattacagagggacagaagtttaaatctgataattccaatgcttttagcctttcacagcgatttaggcatcgtataaatgaaacttgggtggacatcaaaagcccctcaattcctgtcagcaatgaatttgccaatgacttgttacctttacgctggaaagatgtatggccaaaatatgtggcgaaaaaatatagtaagtggagatccttcacaactccggcagaattaccgatcacaatttctgatttcccatcaaaggatgattttgaaaggaacttcatctttagaaatcattcagtcactttgaatagtgatcaggaacaatataatcaaacctacaaagatttactacgcgatatgatttatatgcgattactgactggtttccaaatctgtgttggtgaacaagtagaaaaaattgaactatctagggaaaacgacgaaagtgaaacggtggttaataaatatttggacttcaacaaatacaaaaccttcaagctttatctgatgattgactccgaaatacacagaataacatgtggatcgagtggtataattgatgtggaaaggtatctaagaaatgatgaggtaaacttgtttgatcaagttcccagttacattcctttagttaagacgagatatgaaaactcatttcgtgatgcaatgattgatcccttacatgtcaagagagaatctttgaattggaaccaaattgaccaagttctagcgggatatggcgactatttaatggataggaaatggcacggatttagagccaaatacgtggtgttaccaacagatatccctcctaacacttattctatggtcatcaatgataaaaatgaaaccttaaaccctgaagaaatcagagtagaaggattaaggaggttaattggttcaatcactagggcaagactaaggacggaaaaggaaaaacaagtaaagaaaacaaagagagaagaaattcaacccgaagttatgttctacacaggtccgctatacaactttattaacgagcaacagacatcattggaaagctccactataaatttcaaggattcaattttcgttaacgacaataatcttttgaataaaagtgttgaattatcgaagctagcgtaccaaatacaacgtggtgaaaatcgcataaccttagttaatagaaagtggcactggaaaaaacatgatagatgctttgtcggttcagagatggttaactggttaataagaaacttttctgatatagatactagagaagatgcaattagatacgggcaaaaaacgatgaaggagggactgtttgttcatgtcttgaataagcatagttttttggacgggcattacttttatcaattctcgcctgaatacaggatggacacaaacaggctcgagaaaatatcttcggatcgctctacgtcgtctgatccgaagcaaatactgagaaaagcatctaccggtagctcaaatgatccaggcgctataacaccattctctacagttgtacctgctataagtgcgtcaaacgcttccgttgctgacacaaatgaaccatcacgcccgatcttaatgttgagtaattctcttgttatagatgtcgatcccgccggcaaatcttccaagcaagaatcatgtactgtacactatgatagagttcataatcccgatcattgttttcatatcagattagagtggttaactacgacccctaaattgattgatgacttagtagggaactggtccaggctgtgtgaaaggtatggtttgaaaatgatcgaaataccttgggaagaactttgtacaatcccatctgttaatccattccactcttttgttgaaattaagctagctgtcaatccttgggaagatcctgagttcaaagatagagagctttttgctaaaagtaaattttattatcatgtttatcttctgaaggcatctggatttttattagataacagggcatccaagtttctacaaagccaagatatagaatttgatatcatgtattcatgggggaaaccgcagttcaagtacgttcaatatatccatcatactggcgcttacgttgcagaactacgagaaaatggttgcctctttttagcccctaacaatgtttatatttctagggtgaatccgggaaacataattgggaaaatccattcttcctcaagctctgcactagatgctcaaaaagtgatccttgatttcaaatcaacttgcttagattaccagaaactaagatcaattttcttggatgcaaaggaaacgtggattacaggaaagatcgtagaggaatag

SEQ ID NO: 1489 - DNA, 1080 bp, Saccharomyces pastorianus
atgtctactaaagttgttaatgttgccgttatcggtgccggtgtggtgggttcatctcttttggaccaattgttggctatgaagtctaccatcacttacaatttggtccttttggccgaagctgaacgttccttgatctctaaggacttttctccattgaacgtcggctctgactggaaatcggcattggccgctgccagcgacaagactttgccattggacgatttgattgctcatttaaagacttctcctaagccagtgattttagttgataacacttccagtgcttacattgctggtttctacaccaagtttgttgaaaacggtatttccattgctacaccaaacaagaaggctttttcctctgatttggctacctggaaggctcttttctccaataagccaaccaacggtttagtataccatgaagccaccgtcggtgctggtttacctattatcagctttttgagagaaatcgttcaaactggtgatgaggtagagaaaattgaaggtatcttttctggtactctatcttacatttttaacgaattctccactagcgaagctaacgacgtcaaattttctgatgttgtcaaggttgctaagaaatcaggttacaccgaaccagatccaagagacgatttgaacggtttggacgttgctagaaaggtcacaattgtcggtagaatatctggcgtcgaagttgaatccccaacttctttcccagttcaatctttgattcctaaaccattagattctgttaaatctgtcgacgaatttatggaaaggttatccgattatgacgatgatttgactcaattgaagaaagaagccgcagctgaagacaaagtattgagatttattggtaaagttgatgtcgccaccaaatctgtctctgttggaattgaaaaatacgattactctcatccatttgcatcattgaagggttctgataatgttatttccatcaagactaagcgttacactaatccagtcgtcattcaaggtgctggtgcaggtgctgctgtcactgctgctggtgtcttgggtgatgtcatcaaaattgcgcaaagactttag

SEQ ID NO: 1490 - DNA, 4947 bp, Saccharomyces pastorianus
atgtctatgttcaatgctctcaattcaaacatcgacggtgagcaatacgaggcagaggagcattcaagagagctacaaatcgagcaaagcttcaatattctgcaggatgccctaatcgatcttaagaacagagattttcaaaaatcggatagcaaattccaagagcttttccaaattgatgttgtcaagcctgatagatggggcgtgtaccgtaattcctctcccacattggataatctgcgatatttatgttacaggaatagagggatgtattatcatttatatttggaaagtaattatgaaaatctgaattcacaggacttggttaattgcgttctaaaagcagttgagaatttggttgaatccattcagcacagtgacgccgatttttcagttacgaatttgctggttcgcatcttcagaggttttaatagcgccaaattggaacggttaatctcagagtatgaatttacgaaagaggagaacctttcgctcttactaggtcgtcatcgcaaatttatattaagtgatttgactcaaatgatgaataactacatagaccttacaaatacattactggttcccgatttatcggataagacgatctttgagagatatcatctggataagtataagggcattgcaccagaaggtctggcttttgggccaatcctctctaaaatttctgagatgaaaagggaagatgaagagataatgaaaaaactggatgtattcaatgtcacattgaatgaagaatcttgggatgaagtggcgaaagctttaaaaaatctactccctagtgttaagacatcgtctctcatcggcagaaatatggacccttataacgaagttgaagagcccattgaagccattaaatttgatttatcggaatcaatcaataataccccgtccttagaaaaagatgaagaacaacaagatgaagagcaagatgaagagacaacgcaagtggagaataaaagtgacaattcagtgcccttagaaaccaaagttagtgaggaatccaggcctaataagaggcctgatgaacatttggatacgacaaagcctcttcaaagaagtagtaagcgtttcaaagagagggaacatgacaactcaaaagagcttgtcatggacgttcataaaagattctttactgaattcaatacattgctgtcgtatatacaaataaactcattttatgatttcgatacatttgcctccaaattcgtcattggctctgatggtagcccatttgataaatttattccatacactgacttttatgaatgtttgaaatcttggaacagtagatataccgacattttcaaccagaatgactatttatctagcggctctaacgaaaacgaagaattgtttcaactaaatgctctcctgaagtcgaatgcatttgataacaaggaaggttttcctagatatttgagtgacttggattcggatcacatcaaatcctttgtatccgaagtgaacgggggtagtcttcattttcatgaagtacgtttaaaattactattcaaactgcttgggacctatgatgagggaaaccaaagacgtctcgtgattgattacctttgggaaccccagcttctaaagacagttttatggttcgtttttggaattgagttgaatatcttttctttcatcaacaaaaaccaaaagcaatgcaagtatttggccttgtcggtttacgaactgctagtaaatcatttaggaaatattgtggaagaaattacaaacaaacggattcaaggacacaagtcagcggacttaaaaagtcaaagaaataaggtggagaaaagaataaggtcttggcatgcgttactagaacaaattgccgaggaaaaagatacagaattgtacgtccactttcaatggactcattactgttttttgcagtatacctgtgatatcgttgataacaggctttccgaaactttaacatctttggagaagactataaaagatttggactcttgtctagacgttgcttatccaaattatcggcacatacctgctttgaacttgaatacagttcaatcacaaaaaaggaaaataaaaataatacagaacataacagttgaagatatttctgaagatacaacctctgatagtcattcggaaaatcatttggagactctagagcgtgttcttttgcatatattatatccttcaaccaagcaacaagttatcgatgaggagatggtgtcattcatttcgaattcgccatttctactgaaaatcaggctgtggggcgttctcttctcatcatatgttaaaaaatctagtatacaagacgcgcaaaggatttattttcatgtccttgacttcatgaagggcgcgttaaaatcgtctttttacagggaatcgaaccctcatgcaaggcagcaaatgttattaacagttttgacagcaattggttatttttccagtaagttaaataaaattttgaatgtgaataggtgggaaaatagtgattttacgttagaggactgtatgtttgataaattattgaagacattttttttcttttatacagttttattttatgaaagttcggcagttactgaaacttcaaataagtcatttttcaaaagagcttcaaaatcatctggaaaaatgaaggacatcataatagatttatcaactttaattctctattactataatattcaggccagcataaagacgcctactgatcagggtattgagaccactgaactaatttggtctttgcataccctttttggacatttccatttttgtgacgcatcaaatggcaactttttagctttgtctgagaaactattgtgtcaattcattaataacgactcatttttacagttgaaacaaatactatggtgtagatatcactacaccatagccagtgataatttcagtcctgacctgcatgaaacaaaagctgtagagatggaaaagattcattctttacccctaggtacttaccttattaaattgcagtatcaaaacaaaaatccttacctttcctcgtcaaaaaccaccttgaagcaggttatggataatattatagagaaaataggcgatccttcaactgtggacaaccatatcatatctagaaactcgtttttattaaatgaatatctatcgaggccaataacagctaatttgctgaaggatacattttccggcgacacaaatttatacttaactacaccacatgatgagttacaacaaggtatgacagctggcctgttctatgtatccagcttacagtctttgggtttatataaaatgaggaagaagtctatgcaagcaaggccttctgagctggactctattattaggatgttgaagaatgacatcatatacaatacaaaccgttttgaaagttggatactacttggaaagtgctacacttatacagttgaagatgatttaatttggacttcagataagattactgttcctgagaagaaagaaatcattgcgctaactcaaagaaaggcgatattgtgttactcaatggccgtttccatttattacagtaagccgaatcgaaccagcgatgacaaaaagattatattaaaggcgttagatgacttgggctctatgctgattagtgggtactacaaacctatgagtaagctttgctatagctggaaaagtaatgttgaaaacacaatgagattatccgaaactggagaggtaataatggaaaaaacaaagaaaatcaccacaatttcagacttcaatattgaacaaagcatatttttatgtttcaatcgaggatgttttttatcgactagtgccaagttagaggatgacacgtttgtgctaaattggtttagcttttatagtctggctaaattctttttcaaaacagacgatgggaataactgtaaactaatctcgaactatattttaaaaagttgccaaatagcacatgagtcatcacccgttaaagatccgatcatcgaaccgcactacttattagtgaattcttgctataaatggataaaacaaggcatcataaatgtcaatgaggctttagcgctattatctaaagataaccagttttttcaagagcaagaggaattttgggttaatgatgaaggcctagcgggggactatcaaaaaaaggtgttttttgacaagatcatgaaactacttcaccatttattatctgtagataaaaaaaaatggcagcatagacctcgttacagagttgcacgcatattgtttgatgattttggtgatgtggacggggctctgaaagagatggatagtttgatatcggcaaaaagcgtaaacaaaaacttggtcaacatatggaagccagattttgagaggccaggaaagcattttatctacacataccagtatttggttttgtatttggacttgctttttgccatgaaagacttcaatactactggccttgttataaaaaaactaagacgttttggttctggaacagttaacataaatgaacttttagaacgcgccattagcgtgtatacgcaaagtgctaaaataaaactacagttacaagacaaaagttatgtagagcagatcctccccacacttgactatcaagattttttgaaaatcagtgagcagttgaatcagatattcgaccagagcaagcatccggaagaaatagtttccggactaaaactcgcattccaactgaagaaggggcatagcggaattgccttcgacagtgtttgcctgggtatttatttcgagtatctctattatcctctagctcaacagaatcaatcccccgcaaacgataatgaagagaacacgccaataccatcatctgcgggttctattgcatccaaaggcactccagattccacctccaagtcgagtgccgtgaagaagcgtgtcaccaagaaggaagtcttcgatagaatcaaactattagtggacaagatcacgtga

SEQ ID NO: 1491 - DNA, 1029 bp, Saccharomyces pastorianus
atgaaggttgaaaaattgtcaaatggtttggaagctttagtaagaactgaagaggatgatcgcgagggcttctccttcctaaatattatggaccgtgtggaccccttaccagagaacttcgagagttacaataacttcaaagagagtgtatattatatgtgtacacacaatggtacaaaaattggattcgtattgaaattcgttattgctgaaatgaaggctctttgcagagaaacctttgaagagactttccaattagatgagctgaatcatacgttaaggttcagaagcgagaatttcgatcaaaggaacgacttaattgatcaattggctcacacaatgtatctggaatcatcaataagtggtgttaagggctggagagatgaaaagtacgctatttgggtggatagaaagccatacgtccttatcgaacgtgcgatggcgggtgtacttggtataaccacatacggggtgcatattaacggttatgtgctagatccagaatccaaggagattcggttctggatcccaagaagatccaaaacaaagcaaacatggccattaatgctcgacaacattatagctggaggattaggatatccatacggtatatatgaaacagttttaaaagagagcgtcgaggaagccaacttgcaaaagagtattattgaagccagtatcaaggctgccggtgttgtttcttacctctactttacaggtgacatttctgtgacggcattcgacaaggaatcagattttatcgttggagaagtggaatatgtctacgatttaaagctcgataaggacattattccaaaaccgaatgacggagaagttgaaagtttcaacctattcagcttacaagaaaccatcaatgctttgaaaagaaaagaattcaagcccaattgcgctttagtaacggtagaattcttgattagacatggctatattacaccggaaaatgaacccaattatcttgaattagtggctagaatgcacagaagattaccattccctacattaaactaa

SEQ ID NO: 1492 - DNA, 2289 bp, Saccharomyces pastorianus
atgtctgtgcccaagaaacgtatccatggaaagtcgtcgcctcccaccggggacgtggatgatcctcagttgaaatacacaaagggcgcgtcaaaatgtgaacaaatctctgaacactggctattacaatcattacctgcgccacaatcgcactatagcttctgggctactgtggttactttagtcgcctttgctgctagattttataagatttggtatcctaaggaagttgtatttgatgaagtacatttcgggaagtttgcatcttattatttggaaagatcgtatttctttgatgttcatcccccatttgctaagatgatgattggcttcatcggttggttatgtggttatgacggttccttcaaatttgatgagattggatacagttacgaaacacatccagccccatatatagcgtaccgttcctttaatgccatattgggtactttgaccgtaccaatcatgtttaacactttgaaagaattgaactttaagcctattacatgtgcatttgcatcccttttggttgcaatcgataccgcccacgttacagaaacaagattgattcttctggatgctattttgatcatttccattgctgctactatgtactgctacgtccgtttctacaagtgccaactgcgccaaccatttacatggagttggtacatttggttgcatgctaccggtttgtctttgtcattcgtcatttccacaaaatatgttggtgttatgacttattctgctattggttttgcagtggtagtaaacctgtggcaattattggatatcaaggccggtttatctttaagattgtttatgaaacatttcagcaaaaggctaaacggccttgtgttgatcccttttttgatttacttgttttggttctgggttcactttaccgtattgaatacttcaggcccgggcgatgcgtttatgtctgcggaattccaggaaacattgtatgattctccgttaaatattgattcaaaggtagttaactatttcgacattattaccctcaaacaccaggatacagacgtgttcttacactcgcacttggcgcattatccacaacgttatgaagatggtcgtatctcctctgctggccagcaagtgactggttatgcacaccctgattttaataaccaatgggaggtgttaccaccacatgacagtgatatcggtaaaggtcaagcggttctcttgaaccagcatgtcagattaagacacgtagccactgacacctacttgttagcccatgatgtggcttcaccattctaccccactaatgaggaagttaccgctgtatcattagaagacggtgacggagagtcatatccggaaactttatttacttttcaaccactaaaaaaatcagatgagggccatatcttgaaaactaagactgtttatttccgacttttccatgttgacacctctgtagccttgtggacacacaatgacgaactattgcctgattgggggttccaacaacaggaggttaacggtaacaagaaagtcactgacccttcgaataattgggctatcgatgaaatcgttaacttggatgaagaccgaaaggtatatgttccaaaggttgttaagccattaccatttttgaagaaatggatcgaaactcaaaaatccatgttcgagcacaacaataaactgtcgtcggagcatccatttgcctctgaaccatacagttggcccggtagtttaagcggtgtttcattctggactaatggtgatgagaagaaacaaatctatttcatcggtaacattattgggtggtggttccaggttgtttcattggccgttttcgtcggcattatcgtggccgatttgcttacaagacatcgcggttactatgctttaaacaagataacaagagagaagttatatggaccattaatgtttttcttcatttcctggtgttgtcactatttcccgttctttttgatggctcgtcaaaagtttctgcatcattacttaccagctcatttaatcgcttgtttattttcgggggcattatgggaggttatcttcagtaattgcaaatctttgaatttggaaaccgatgaagatgttccaggtacaccttatgaaaagaaccccaagatttacgtcaaaccatatgcagtgtttttggtgtgtgcctccactgctgtcatttggtgctttgtctactttgcaccattggtatatggtgacgtcagcttatctccatcagaagtcgtttctagggaatggttcgacatcgaattgaactattcgaagtga

SEQ ID NO: 1493 - DNA, 1131 bp, Saccharomyces pastorianus
atgaccttagcgcccttagatgcctccaaagtcaagattaccaccaccgaacacccatcggagccaaaaccaaacgaccagctggtctttggtagaagcttcaccgaccacatgctaactgcggagtggactgcggcaaacgggtgggacgtcccggagatcaagccctaccagaatctgtcactggacccatccgcgtacgtgttccactatgcttttgagctgtttgaaggtatgaaggcttacaggacagttgacaataaaatcacaatgttccgcccagacatgaacatgaagcgtatgaataagtctgcccgacgaatttgtctgccagctttcgactcggaggagttaattgccttgattgcaaagctgatccaacaagataagcgtttgattccggagggaaagggctactctttgtacatcaggccaactatgattggcactacggccggcctgggtgtctccacgccagacagagccttgctatatgtcatttgttcccccgtgggcccttactacaagaccggtttcaaagcggttaggctggaagccactgattacgccacaagggcttggccgggcggctgtggtgacaagaaattgggcgccaactatgctccttgcgtcctaccacagttgcaggccgcctcaagaggttaccaacagaacttgtggttgtttggcccagagaataatatcactgaagtaggcaccatgaacgcattctttgtcttcaaaaacaccgaaacaggcaagaaggaactggtcactgccccattggacggcaccattctggaaggtgtcacgagagattccatattaaccctcgccaaggaaaggctcgatttaaatgagtggactattagtgaacgctactgcaccataggcgaagtttctgagagatccaaaaaaggcgaactagtagaggcttttggttctggtacagccgcgatcgtttctcccatcaaagaaatcggctggaagggcgaacctatcaacatcccattactgcccggcgagcaaacgggaccattgaccaaggaagttgcccaatggattaaccaaatccaatacggcgaagttgaacatggcaattggtcaagggtcatcaccgatttgaactga

SEQ ID NO: 1494 - DNA, 2457 bp, Saccharomyces pastorianus
atggttaagataagtacagcagctatagccgttgcactagcgacgggtgccgccgctattactgcgaccaccactttatctccgtatgacgaaagagttaatttgattgaactggctgtttatgtttccgatattaaggcccatctacttcaatattatgctttccaaaattcacataagactgaaacatacccacccgaaattgcccaggctgtttttgctggtggtgatttcactactatgttgaccggtatttcaggagacgaagtcactagaatgattaccggtgttccatggtactctaccaggctgagaccagccatttctagcgccttatctaaagacggtatttacactgctataccaatgtccacctctacttccacaacttctaccacttctgtcaagcctttgactacctctactacctctactacgaagccttccaccacttccacaacgtccaccacttctgtcaagccttcgactacctctactacctctactacaaagcctttcaccactttcaccacttccacaacttctaccacttctaccatttctactacttctactacatctaccacttctgcagaaactcgtctttctactgcacctttctctactgctacttccactcaagtttctagtcccgctgaatctgcttcttttgctcaggttgcatcctctgctgaggttacttcctctgctgaagttacttcctctgctgaacctacttcctctgctgaacctacttcctctgctgaggttacttcctctgctgaagttacttcctctgctgaagttacttcttctgttgaacctacagcttcttctactgaaattagttcttctgaaatcacctcttccgctgaacttacctcttctagtacgtattttactcaagtcgctgcttcttcaagtgaagctactacctcagccgaatctaccttttctgtcatctattctaaccaaacaaccacagctaccaaatccaactctgctgttgtttcttctagccaagttctcgtatctgttgaatctagcccctttggcgtttcaactcaagctgtagcttcttctactgaagccgctaatttctttagtgaaaccaccacttctacggaatctagctcttccgtggtttcttctagtcaaacaaccacgactgctgggtctagcttttctgctaagcctagctcctctgttgcttctaccaagcccgccattttgtctactgacgccactacttctgctcagtttagctcttctgtcgtctcttctagtcaaattatcacatctgctgaatttacctcttttattgaaccagcttttacgggaatttcttctagtgaaggtgtcacctcaggcgcgtattcctctattgctttttcatctagcgcaaatactgcttcaatcgatcatacttcctctgtagaatttttgtcatcagaggtaactagtgctactccgacgtccacttctttttcttcatctacggtccctgcatcattcgttaatcctacttccgcagcttcttccccgggttcttccccagtttctgctgcttccttggcttcttctgcctcgatctcttcagttattactagcaatgtcaatgaaacttccagtagtgctgccaacagtaaaatcacgtccgttgtatatggtagtaatgcaactttgacagccactaaagtctcgactgatgacgctaccgttactagctgcaagggtggctgcactaaagaagacaccacttcaaccaaaactcaactttccaccgttaagaccactgtgacgagttgttcagccggtgtttgctccactttgaccgctccaatcactaccgtcaccgctaaggctgctatgaccaccgacgtcactgttactagttgcaagggtggttgcactaaagaagacaccacttcaaccaaaactcaactttccatcgttgaaaccactgtgacgagttgttcagccggtgtttgttccactgtgattgcaccaattaccaccgtcaccgcaaaggctactacgagcactaacgtcaaagatattaatgaaggtaccacatcaaccaaaattatgccttccgcaattgaaactaccataaccagctgttcggctggtgtctgtaccactttgaccgctccaatcactactgtcagtatcggggctggcacatcgaccaagacagaactttctaccatcaaaactactataactagctgcgcaggtggtgtgtgcaccactgtgactgctccaatcaccaccgccacgaataaagccatatgccaaatttcagaagtttccacggccgcatctgcttctgcttcatctgcttcatctgcttcccatgctattgatatcaacacgaacggtgcttataggtttgataatagaggcgtttttggtgctgctattgttgctggtgccgctgctttactgttataa

SEQ ID NO: 1495 - DNA, 1632 bp, Saccharomyces pastorianus
atgtcagggggtgcgagcacgaattcaaatgcttccatagacgaaaaaaacctaaacatcacttcggaagctgaaattaaaaacgaagatgtatatgcggaacctgtcctaagtacagtcttatcacctaacggtaaagttgtttacatcagtgacaaggtagatgaggctatgaaattggccgacgaagccaaggaaattgaggttacgccagaagaagacagaaaactacgctggaaaatcgattattgtatgtttcctttaatgtgtatactgtatgccgtccagttcatggacaaaatttccacaagttcggctgcggttatgggattaagaactgacttaaaaatgcatggtgaccaatactcctgggtcacttccgccttttattttggttatttattcatgaatctaggtccggtacagttaattttccaaaaaagtaaacatatgtccaagatgcttgcaattttcatcattgtatggggattactcttggccttgcatgctgttccatcggttaagtactcatcttttatcgcattgagggtgcttttaggctgtgcagaaagtgttgtcacaccctgcttcaccatcatcactgctcaatattggaaaacagaggaacagttcacaagaatctcaatttggtttggtatgaatggtcttgggtccattctgatcaacgcgattgcgtacggtgtctatattcatcaagaatcctatgctatcaagggctggagggctttgtttgttatcaccggtgtaattacaattttcgttggggccttgatatttctctggattcctgatgatccatcaaaggcaagatttttatcaaagagagaaaaattgatggttgtccagagaattagatccaaccaacaagggtttggtaatcacgaaatcaaaaagtaccaaattgtcgaagctttgaaagatgtcaggacttggttatatttccttttcactgtgagttctaatattcctaatggtggtatttcgagttttatgagtattctactgaacagcgatttcgggtatttatcaaaggataccttattaatgggactgcctactggtgctgttgaactagttgggtgcccgctttttggtattctggccgtatacgcagctaataagaaaataccattttggaagtacaaattggcttgggccatctttgctgctgtcttagcattgattgctagctgtatgctaggttttgcaacctcttcaaaaaaggcaagactggctggtgcctacttatggtatatctcccctgtttcgtttatttgtgtcctttccaatattagtgctaactcttcaggctacagtaaaaaatggactgtatcttcaataaatttggctgcatatgctgctgccaaccttgctggcccacaaacatttattgcgaaacaggcccccaagtaccatggtgccaaggttgccatggtcgtttgctatgccgttatgatcgtgcttttatctgcattactcttgatcaatatgagagagaataagagacgtgacaagatagctgctgaaagaggttaccccgaagagacagcaaatttggaattttctgacttgacggattttgaaaatccaaactttaggtacactctataa

SEQ ID NO: 1496 - DNA, 1086 bp, Saccharomyces pastorianus
atgattttagccgactcaatacttttctcaactttatgcgctttcgctgtctcgacacctttgtcgaaaagagactcctgtacattaacgggttcttctttgtcctcgctgtcaactgtaaaaaaatgtagcagtatcatcattaaggatttgactgttccagctggggaaacattagatttaaccagtttgataagtggcactactgttacgtttgaaggcacaactacatttggatacgaagaatgggctggtccattgatttcgatctcagggtccaaaattaacgttgttggtgcttccggacatgttatcgatggccaaggtgcaaaatggtgggatggtaaaggcgatagcggtaaagtgaagccaaaatttgtgaaattaggcttgaccggaacctcgaaagttactggcttgaatatcaagaacgctccacaccaagttttcagtgtcaattcatgttctgatttaacaatcagtagtgtaactgttgacatcagagatggtgattctgcaggtggccataacacagatgcgtttgacgtgggtagctctactaatgttttgattcagggatgtaccgtctataaccaagacgactgtattgccgtaaattccggtacaaccatcaaattcctcaacaattattgctacaatggccatggtatttctataggttctgttggtggccgttcagataatgtcgtcaatggattttgggcagaaaacaataatgttattgactctgataatgggttgagaattaaaactgttgaaggtgcaacaggctcagttaaaaacgtcaactttattagtaacaaaattagcggcataaaggattacggtattgttattgaaggtgattacctgaatggcaagacaaccggaacggtcactggtggagttcctatttctggtttggtgatggaggacaatacagggagtgtaaccagctcagccaaacgtgttaagattttggttgagaatgcttccgattgggagtggtctgggaattcaatcaccggtggttcctccttttctggctgttctgggatcccatctggctcaggtgcatcatgttag

SEQ ID NO: 1497 - DNA, 1089 bp, Saccharomyces pastorianus
atggttctagctaactcggtacttctgtcagctttatgcgcttttgctgtctcagcagcgcctttgtccaagagagattcctgtacattgtcgggatcttctttgtcgtcattgtcggccgtgaaaaaatgtagcagcatcatcatcaaagatttgaccgttccggcaggacagactctagatctaagcggtctaacgagcggcactactgttaccttccaaggcacgactacttttggatacaaggaatgggaaggtccattaatttctatctcagggtccaaaatcaacgttgttggtgcttctgggcatgttatcgatggccaaggtgcaaaatggtgggacggtaaaggtgacagcggtaaagttaagccaaaatttgtgaaattgggcttgaccggaacctcaaaagttaccggcttgaatatcaagaacgctccacaccaagttttcagtgtcaataagtgctctgatttgaccatcagtggtgtaaccgttgacgtcaaagctggtgactccgccggtggccacaacacagacgcgtttgatgtgggcagttccaccaatgttgtaatccagggatgtaccgtttacaatcaagacgactgtatcgccgtaaactctggtaaaaatatcaagtttttaaacaacaactgttacaacggtcacggtatctctataggctctgttggtggccgttccgacaatgttgtcaacggtttctgggcccaaaacaataatgttatcaactctgataatgggttgagaatcaagactgttcagggtgcaacaggttcagtttcgaatgtcaacttcattagtaacaaaatcagcggcataaagaagttcggtattgttattgagggtgattaccttaacggtaaaaccactggttctgccactggcggggttcctatttctggtttggtgatgaaggacaatacagggagtgtaaccagctcagccaaacgtgttaagattttggtgaagagcgcttctaactggaagtggtctggtgtgtcaattactggtggttcttccttttctggctgttctggaatcccatctggttcaggtgcttcatgttag

SEQ ID NO: 1498 - DNA, 945 bp, Saccharomyces pastorianus
atgacggccagcttaactaccaagttcttagacaatacttatgaaaatccatttatgaacgcatcgggtgttcattgtatgactaccccagaactggatgagttagccaactctaaggcaggtgcttttattactaagagtgctacaactttagaaagagaaggtaatcccaaaccacgttatatttccgttcctctaggtagtatcaactctatgggtttaccaaatgaaggtgttgattactatttgtctcacgtactaaaccgccaaaagaagtatcctgatgcacccgcaatcttcttctctgttgctggtatgagtatcgatgagaatctaggcttattgaaaaaaattcaagagagtgaattcaacggaattacagagctaaacttgtcatgtccaaatgttcctggtaaaccacaagtcgcttatgattttgacttaactaaggaaacattggaaaaagtttttgctttctttaataagcctttaggtattaaattgcctccttattttgattttgctcattttgatattatggccaagatcttaaatgagttcccattagcctatgtcaactctatcaacagtgtaggtaatggtctctttatcgatgtagaaaaggaaagtgtagtagtaaaaccaaagaatgggttcggaggtattggtggtgaatacgtcaagccaaccgcacttgctaatgttcgtgcgttttacactcgtttgagacctgaaatcaaaatcattggtactggtggtattaaatccggtaaagatgcatttgaacatttgctatgtggtgcttctatgctacaaattggtacagaattgcaaaaagaaggtgtacaaatctttgaacgtattgaaagagaattgaaggatataatggaagctaagggttatacgtcgatagacgaattccgtggtaagttgaacagtctttaa

SEQ ID NO: 1499 - DNA, 609 bp, Saccharomyces pastorianus
atggacaaagcgtttgacgaaattattggagatgatcatgcggaagactcagtagaccacaaggtaacgaggtaccgtaggagagatttgagaaacgaattggggcccaggctgggatttgggtcttccgatccagcggtaaggtcaggagacagcttttatccacaaaaggaagagccacctttgcccaagagaatcagaatgtccaaaatcccattggacgtttccgattacactcttgatgatatgattaaagagtttggtgccccagtattttcgaagattttcgataacaaagaagatcgtacatgcatttacgaatttgaggatccagaagtaatggaaaagattgtcgaacgttacaatgggcatgagttgaatggtaccaaaatcgaagtagaaatgtaccaacctcagagaaagcatccgagaggtaacacaaacaaccgtcacagacagccggtccaagaacgtagtagaggaagatcgggtagccattactgccaaaagcctagcagagtctctaagaagggcaagggccgcgaaagtaacacacctacttctgttgaagctcttgacgctgagttggacgcttacatgaaaggttga

SEQ ID NO: 1500 - DNA, 2160 bp, Saccharomyces pastorianus
atggtatatcaattgagtgcgacgctgaaagggcacagccaagacgtcagggacgtggtagctgtggatgattcgaaagtagccagtgcttcgagagatgggacagttcggatgtggtcaaaagacgaccaatggcacagtacagtggtttattcagggcagggatttttaaacagtgtgtgctatgattatgagaaacaggtcctgctctttggtggaaaggacaccatgatcaacggtgtgcccttatttgccaccttaggggaggatcccttgtatacattgatcggccatgaggggaatgtttgtagtttggaatgccaagaaggtgttgtggtaagtggcagttgggacaaaaccgccaaagtttggaaagacggatctttagtttacaatttgcaagcgcatagtgcctctgtatgggatgccaaagtggtatcccttacagaaaacaagtacctgactgcttctgcagataaaacgatcaaactgtggcaaaatggggaagtgatcaagacattcagcggaatccataatgatgtggtgaggcacttggccctggtggacagtggccatttcattagttgttctaatgatggtctcattaaattggtcgagatccgtacgggcaaagtgctaaaaatttttgaaggtcatgaaagttttgtttattgtgtgaagctgctgcctaatggagatgtagtaagttgtggcgaggaccggtcggttcgcatatggtccatggaaaatgcatcattaatgcaagtcattacgctgcctgcggtctccgtttggtctatagactgtatgtctaatggtgatatagtaatggggagtagtgataatctcgttagaatattctcacatgatgaatcaaggtgggcatcagaggaagacataaaggagctatcaaaacaggtggaagaatccactataagttccgagacaatgcaatttgacgagtcaaaattatcgccttttgagatcttgcaatctccggggcgtaaagagggccaagttgtggtggtcaaatcacctcaaggcacgatagaggctcatcaatactcaaatagctcatggaccaagattggtgacgttgtcggagcaggtgctaccggaaacgaccaaaaggtggaatacgagggcaagtcatacgactatgtatttgatgtggatatcgaagatggaaaacctcctttgaaattgcctatcaatgctaacgataatccatacacagccgctgataatttcttggcccgctatgaattgccatcgagtcatagagatttagtggtacaatttatcttgaaaaacaccaatggtgtgtcactagatcaaggaaccggtgccgatgatacacccctagccgcatcgtcaacatcatcgacgtcaacaacaacaatgaaggtgttccccgttaaagaatacttagttatggataactttaacccagatactattttcaacggaatcgcaaagataaacgccagtgagaagacgtttgacgatgaaattttggcacaaataggtggtgcgctacatgacatcgatgaaagttgggagctgttgctatcgtttgccaatacaataagatctacttgggaaattaaaacccctgcgtacgacatagtgcggttgatcgttaaaaaattgccttattcgtcagatatcaacgattacattgaagaaggcttgggtaacaagaatatcactctagccatgctaactgtgcgtatcttggtaaattgcttcaagaatgaaaactggggggtaaagctgttagcatctgagcaagtttataaatcaattttcgaaacaattgataccgaattctctcaagcatctgctaagcaatcccaaaatttggctgttgccgtagccacattaattttcaattattcagctcttgtgacaagagagaactctgacctggaacttttgccaattatagccgacgctatgaacaccaagtatggacctttagaagagtatcaagaatccgaagaagccgcatatagactttccatggcatacggtaatttatctactgtcgagcctacgttaagacaatttgctaaatctgtaacatggcttgcaaacattagaaaaagctatgggaacgtgccaagattcaaaaatctgtttgacgatttatcctga

SEQ ID NO: 1501 - DNA, 1872 bp, Saccharomyces pastorianus
atgacaggtccattagtgtacgttcaaaacgcagatggtatcttcttcaagacagctgaaggtaaggggagtaatgatgcagtgattcatttggctaatcaagaccaaattgttcgagtccttggtgcaggagaattcccagctcaaggtgaagtggtcaagattgcttccttgatggggttcatcaagctcaaattgaacaggtatgctattattgcgaataccgtggaagagacgggcaggttaaatggacacgtcttttataagatattgcagcattctgtggtgccctccaagctcaactcaagaattgattcggaagaagccgaatatatcaagctgttggaattacacttgaagaattctacgttttatttttcatacacttatgatttgaccaactcgttacaaagaaatgaaaaaattgggcccgtatcctcttggaaaactgccgatgagcgttttttctggaaccattatttaactgaagacttgagaaattttgccgttaaggattctagaatcgatgcctttattcaacctgttatctatgggtatgccaagactgtggactccattctgaataatacccctattgtcctcggtttaattaccagacgtagtatattcagagcaggtacaagatacttccgtcgtggtgttgaccaagaaggtaacgtcggtaacttcaacgaaaccgaacaaatcttactagctgaaaacccggagagtgaaaaaacacatgttttctcctttttacaaacaagagggtctgttccaatatattgggcagaaattaataatctaaactacaagccaaacttagtccttggcgaaaattcattagacgccaccaaaaagcattttgatcaacaaaagaagctgtatggtgacaactacttagttaatctagttaaccaaaagggccatgaattacctgtgaaagaaggctatgaatctgccgtgcatgcattggacgatccaaagattcattacgtctattttgatttccatcatgagtgccgtaagatgcaatggcatagggtcaagcttttaattgatcatttagaaaaattaggtttgtctaacaaagatttcttccacaaggttattgattctaatggtgagaccattgatatcattaatgagcaacattctgtcgtaagaaccaattgcatggattgtttggatagaacaaatgtcgttcaatcagttttagcacaatgggtcttgcagaaggaattcgaaactgccagcgtcattcctgctgagaccacgtgggaagatagcgctccattactatcctcctatcaaaatttgtgggcagataatgcggatgcagtcagtgtcgcttactcaggtaccggtgccttgaagactgattttacaagaactggtaaacgtacgcgtttaggtgcgttcaatgattttatgaattcggcgtcacgttattaccaaaacaatttaaccgacggtccaagacaagattcgtatgatttgtttcttggcgggtttaagccacatgtggcttctatcaagtcaccgttccccgacagaaggcctgtgtatattcagctgattccaatgattatttgcgcagcaataaccgttttaggtgccacgattttcttccctaaggatagatttgccagtggcaggaatatgttgtatttcgcgggtgccgcagtcatcttggcgctgtcaaccaagtttttgttcaacaatggtatgcagtatgtcaactggcctaagttagttgatgttgggttcttagtcgttcaccaaacacacgataaagagcagcagtttaagggtttgaaatatgcacaaagtcctagattttctaaaccagatcctttaaagagagattga

SEQ ID NO: 1502 - DNA, 1455 bp, Saccharomyces pastorianus
atgtctgtgcacgctgctacaaacccaatcaataagcatgtggttctgattgacaactacgattccttcacctggaacatttatgagtacttgtgccaagagggcgccaaagtcgacgtctaccgtaacgatgccatcacggtggatgaaattgcagctttgagccccgatacgctgctcatctcgcctgggccaggccatccaaagacagattcaggtatttcaagagactgtataaagtactttgctgggaagatccccgtcttcgggatctgcatgggccaacagtgcatgtttgacgtatttggcggtgaagtcgcatacgccggtgaaattgtccacggtaagacttctcccatcagtcacgacaacaaagggattttcaagaatgtgccccaaggtattgctgtgactagataccattctttggccggtaccgaacaatctcttccatcgtgcctaaaagttactgccagcacggaaaacggtattatcatgggtgtaaggcacaagaagtacaccgtggaaggtgtgcaatttcatccggaatccatcttgaccgaggaaggccatttgatgattagaaatatcttgagcatcaacggtggaaattgggaggaaaacgggttgtctccttcaaactctattttggatcgtatatacgcacagcgtaagattgacgttaacgagcaatccaaggttcccggtttcaccatgcaagacctgcaatcgaactataatttaggccttgctcccccagtacagaatttctacgcgaaattgtcatcgtcccacaacagagccgtggttcttgctgaagtgaaacgtgcttctccatcaaagggtcctatttgcctaaaggctgtcgccgctgaacaggctttgaaatatgcggacgctggggcttccgccatctccgtactgactgaacctcactggttccacgggtcgctacaggatttggccaatgtcagaagaatcctagatttgaagttctcccccgaggagaggccttgtgtcctaagaaaagaatttatctttagcaagtaccaaatcctagaagcaagattaggcggggcggacaccgttcttctcatagttaagatgctatctcaacccttgttaaaggagctatacgactacagtaaagatttggacatggaacctcttgttgaagtaaactccaaagacgaactaaagagggctttagaaatcaacgctaaggtcataggtgtcaataatagagaccttcactcatttaatgtagatctaaacaccaccagtaatcttgtggaatctactccaaaggacactcttttgatcgcactttctggaataaccacaagggaagatgcagaaaagtataaaaaggaaggtgttcatggatttttggtaggcgaggctttaatgagatctaatgacgtaaataagttcattcatgaattatgcgagtga

SEQ ID NO: 1503 - DNA, 3075 bp, Saccharomyces pastorianus
  modified_base (1445)..(1445): a, c, g, t, unknown, or other
atgagcagtaagaataccggtgccaccgccgtaggagagattgacgagagtctctattctcgtcaactttatgtgttgggtaaggaagccatgttgaaaatgcaaacctccaacgtgttgattctcgggctgaagggtttaggtgttgagatagcgaagaacgtggtcctcgcaggtgtcaagtctatgaccgtttacgacccagaaccagtccagttacaggatctgtctacacagttttttttaaccgaaaaggatgttggtcaaaagagaggcgatgtgtccagagccaagctggccgagttgaacgcatacgtcccggtcaacgtgttggactcgctggaagatgtcacgcaattgagccaattccaggtcgtagtcgccacagacacagtttctttggaggataaggtgaaaatcaacgaattctgtcattcctccggtataagatttatttcctcggaaacaagaggtctcttcggtaacgtttttgtagaccttggtgacgagttcacagtgctagaccctacgggtgaagaacctcgttctggtatggtttccgatattgagccagatggaacagtgaccatgctggatgacaacagacacgggttggaagatggtaactttgtcaggttttcagaagtggaaggccttgataaactaaacgacgggacccttttcaaagtcgaggttctgggaccatttgcattcaggatcggttctgtcaagcaattcggccaatacaagaaaggtggtattttcacagaagtcaaagtgccccgtaaaatctcgtttagcacactcaaacatcaactatccaatcctgagttcatcattgcagatttcgcaaaattcgatagaacctcccaattgcatctgggattccaagcattgcaccaatttgttattagacataacggtcaactcccaagaccaatgaataatgaagatgccaatgaattaatcaaactggtcacggatttgtccgttcaacaaccagatgttctgggcgaaggtgtagaagttaatgaagatataatcaaagagctttcttaccaggcaaggggtgacatcccaggtgttgtagcgttctttggtggccttgtcgcacaagaagttttaaaggcctgttccggtaaattcactccactaaagcaattcatgtatttcgactcgctagagtcgttgccagattccaaaaacttcccaagaaatgaaaagaccacacaaccactaaactcccggtacgataatcagatcgccgtctttggcttggatttccaacaaaagattgctaactcaaaagttttccttgtcggatccggtgctattggttgcgagatgttgaaaaactgggcgcttttagggctgggttccggttctaacggttgtattgtcgttactgataacgattccatcgaaaagtccaacttgaaccgtcnattcttattcagaccaaaggatgtgggtaagaacaagtctgaagtggctgcagatgctgtctgtgctatgaaccccgacttgaagggcaaaatagatgccaagatcgataaagtgggctcagaaactgaggaaatatttaatgattcgttttgggaaggcttggattttgttactaatgctttagacaacgttgatgcaagaacatacgtggaccgtcgttgtgtcttttacagaaagccactactggaatccggtactctaggtactaaaggtaacacccaagttattattccaagattaaccgaatcatactcttcttctagagatcccccagaaaagtccattccattgtgtacactacgttccttcccgaataagattgatcacactattgcctgggctaagtctctatttcaaggctatttcactgactctgctgaaaacgtcaatatgtatttaactcaatcgaatttcgtggaacaaaccttaaagcaaagcggagatgtcaaggggattcttgaatccatctcagactctttgtccaatagaccatacaattttgaagactgtatcaagtgggcaagattggagtttgaaaaaaaatttaaccatgatattaagcagctactattcaattttcccaaagacgctaagacatccaacggtgaaccgttttggtccggtgccaagcgtgctccgactcctttagagttcgatatctacaacaatgatcatttccattttgtcgtaggaggtgccaacttacgcgcattcaattatggcttgaaaagtgatgactctgattccaaatcaaatgtcgacgaatacaagtctgttattgaccacatgattatcccagaattcactccaaatgctaatttaaggattcaagtcaacgacgatgatccagatccaaacgctagtgctgctaacggttctgatgaaattgatcaactagcatcatctctaccagatccatccactttggcaggttttaaactagaacctgtggactttgaaaaagatgatgacagcaatcaccatattgaattcataaccgcatgttccaactgtagagctcagaactattttattgaaactgctgatcgtcaaaagactaaattcattgcaggccgtatcattcctgccattgcaacgacaacttctttggtcaccggtctggtcaatttagagttatacaaagttgtggataacaagacagatatcgaacaatataagaatggttttgttaatctagctttaccatttttcggtttctcggaaccaattgcctcaccaaagggagaatacaacaataagacatacgatagaatttgggatagatttgatatcaaaggagacgtcacattaagtgagttgattgaacatttcgaaaaagaagagggtttagacataacaatgctttcatatggtgtttctctgctttatgcttcctttttccctcaaaagaaactaaaagaaagattaaatctatccatctctcagttggtcaaattagttactaagaaggatgtccccacacatgtatctaccatgattctagaaatttgtgcagatgataaagaaggcgaggatgttgaagttccatttataaccattcatttatga

SEQ ID NO: 1504 - DNA, 804 bp, Saccharomyces pastorianus
atgagctgcttggtattaccgctagtcagtgtcgggaacataccgcaattgagtgttgattggctactgaattcgcaatcgaacgagtgggaattcgtggaggcgttagattctaagtacctagtggaattcgtaggaccgctagatagacccgaagatggtggcgactcactatacagaggcactgatatgaagtacagtagcgccttagagttatttcacaacagagaacggaatatctacgccatacagcaacgaacaccgctagtatcagtgaactacttgaataatttcattgtagaggttattctgcccctcttgagcaagtacaacgtacaggagatatgcatctgggactctttgagtgcaatggaggatgaacatggcgttattgtgcgcccgcacgagatatattcgctgggtgaggttcaaatcgatgatatgtctgatcttttgtcgacacttcgtcttaacgcccaagagtcaatggtcaacaattggttacggttcacgccaacgagtttccaagacaagatacccgttgaccagcagatctacaagatcattttccacatacttaatgcttcacaaaggcctcaaactttccgcagcatcaaatactgtagctgcttagccaatgagggtgacaactcactggattcacaacagtttctgcaatggatcacttcccaaaaggccatcgcaagcctatcaacaataagcgagtttgttaggccgatatcgtggcaaggtgtttacggagcggcagattctagggataactttgtagatctatacagctaa

SEQ ID NO: 1505 - DNA, 3336 bp, Saccharomyces pastorianus
  modified_base (758)..(791): a, c, g, t, unknown, or other
atgctagaacggatccagcagctggtaaatgcagtaaacgacccacgctcggatgtcgccaccaagagacagggcattgagctactgaatgaaattaaatcttcagagaatgccatggagatattcatatcactggtcatcaacgagaattcgaatgatcttttgaaattttatggattgtctactatagttgaattgatggctgagggctcaaatgccaatgcgaacagcttaaatttggtcaagtttgaaattactaaatggcttaaattccaaattttagccaataaacaaaccaggttacctgatttcttaatgaacaagatttcagaagtgctaactactttgtttatgttaatgtacagtgattgtaatgggaaccagtggaatagtttttttgatgatctgatgagtcttttccaagttgactcggcaatttccaacactagtccgaccactgatggcaacaacctttcaggtcttgaatttttcaacaagctttgtttgatgatcaattgtgagattgctgaccaaaattttgttagatccaaggaatctcaattgaaaaataataatataaaggactggatgcgtgataatgatatcatgaaactgaataacatttggtttcaatttttaaaactggatgaacaagttgtttcacagtttcctggattaatcaattctactctggattgtataggcagtttcatttcgtggatcgatatatgcggggttaattgcggacgcgaattctnnnnnnnnnnnnnnnnnnnnnnnnnnnnnnnnnnagaaaccaagatttcatgttataattgcatactggccatcatttccaagaaaatgaaacctatggacaaactggcctttttgaatatgatcaatctaaccgacgaactgacttattaccatcaggccatatcaatgaatcctcaaatcattacattcgataatttggaagtttgggaaagtttaacaaaactgattacttcatttggtatggaattcaccattatcattgagcaaacgaatgacgatcctaagctggacactttatacaaacaatcggttatttcaaacgttgatacaattttactagaaaaaataataccaatacttttggaatttatgaataatgagttcgattcaataacaggaaaaacattcccattttggtcgaactatttggcttttttgaaaaagtataaagcgtcttcaccaaatttcataccattgcataaggatttcttaaataatttccaacagatttgttttagaaggatgaagttttcagatgatgaagtcacacaggatgatttcgaagagtttaatgaaactataaggttcaaattgaaaaatttccaagaaatcattgtggtaatcgacccaagtttattcctgaataacattactcaagaaatatccgcaaatctaatgaattgtaaaaatgaaaactggcaagtttttgaactgactatctatcaaatttttaacctaagcgaatgtatcaagaacaattacttcggtttgattaagaatgaaattatgacttcacaaccttcactgaccttagtacgatttctaaatgaattgttaatgatgaaagactttttattgaccatcgataatgaacaaatccaaattttattcatggaattaattgtcaagaactataatttcatattttcggcaagcgctaacacggcaaacgccactgacgatgatgagaaatatctcttgatcttgaacatttttatgagcccatttgccatgtttaataagagggaaaacgttagacttagatcatggtatttattcacaagacttttgaaactaaccaggattaacttgaaaaaaattctgtacacaaataaaactttagtcaatgaaatcaccaataaaataagtccattacttcatattaaaatagcctcaattaattcacaagggacagatgataatgatacaatttttgataatcagttgtacctttttgaaggtattgggttcataatcacattaaacaataacaatcaggacaccgcttcttcatcgtcatcatcttcttcttctagtaccactgctactactgctactatgaactatgatatattagaccaaatattaacgccactattcacccaactagaaggctgtattacacaaggagcttcaccaatcgtaattcttgaatgccatcatatactaatggccattggtactttggctagaggtttacacattggtttggttcctgaaaatcaagttaacaatatggtagttaacaaaaaactaatcaatgactccttagtccataaattctctaatattgcagaggttatattagtgacattttctttttttaacaagtttgaaaatatccgagatgcatctagatttacttttgccagattaattccgattttaaataataaaattttaccgtttattaataaattgattgaattgatcttatcatctaccgatttgaagtcatgggagatgattgatttccttgggtttctatctcagctaattcatatgttcaatactgacttaaactgttaccaattgtttaatcaattacttaccccactaatcaacaaagtccactccattatcaaagaaattgatgagcagcacgaccaacaagcaagcattaataaacctatagacaactctgtcacaaccaccgctgccgtaaacaaaaacatagtggttaccgattcctatagagataaaatattattgaaaaaggcatattttacatttttacagtcattcaccaataattccgtcacatcgatactattatcagatataaacagatcaattttgcctgtcatattgaacgatttggtcacttacacgccacaagagattcaagagacgtcgatgatgaaagtatcattaaacgttttgagcaacttcatcaaacgtttcggaaacgggtcatgcttggataatgatgatatcaacagagatccaaatttgaaaatcgacggtctaaacgaatacttcatcatgaaatgcgttccgataattttcgaaattccgttcaatccgatatacaagtttaacataaaagaggggaatttcaaaacgatggcatctgacctggcaagattattaagagaactgttcctcgttaacaacaacccaactacaaatgacaacgaatgcgtgaaatacttgacccaaatatacctcccacaaatacagctaccccaagaactaagtattcagttggttaacatgttaaccacaatgggccaaaagcaatttgaaaaatggttcgtcgttaatttcatatccgttttgaagcaggatcaatag

SEQ ID NO: 1506 - DNA, 7422 bp, Saccharomyces pastorianus
atgaataaatacattaacaagtacactaccccacctaatctattgtcgctacgacaacgggcagatgttaagcatagaacaagaaagaagctttcgcataaatcacgttcccatgatgatgaaatgtctacagcttcaggcacagattccaatcataatggccccaacgattctggcagagccattactggttctgctccccacaacggaaaaatatcttttgtggactcagaattagacacaactttctccactctaaatttaatctttgatagactgaaaagcgatgtaccacaagagcgagcctctggagctaatgacttgaacactactttgacatctttagcaagggaggtctctgtggaacagtttcaaaggtttagtaacagcttaaacaacaagatttttgaactgattcatggctttacatcaagcgaaaaaataggtggtattatcgcagtggatactttgatctcattttatttgagtacggaagaactgcccaaccagacttcacgactggcaaactacctgcgtgtcttaattccgtctaatgacatcgaggtcatgagattagcggctaatacattgggtagattagcagtaccgggtggtacattaacttcagactttgtcgagtttgaagtaaaaacctgtattgactggttaactctaacggcagacaatagttcttcaagctctaaaatggaatataggcggcatgctgcgctattgattataaaggcattggccgacaattcaccttatcttttatatccatacgttaattccattctagaaaatatatggatgccattaagagatgccaaactcgctatacggctcgatgcagccgtggcgttaggtaaatgtctaactatcatccaagacagagaccctgctctaggaaaacaatggtttcaaagactatcacaaggttgtagtcatggtttaagtctcaatacaaacgattcagtgcatgctactctgttagtttttcgtgaactacttagtttgaaggcaccttatttaaggaataagtatgatgacatttacaaatctacaatgaaatacaaggactataaattcgatgttattagaagagaggtttatgccattttacctcttttggctgcttttgacccagcagttttcactaagaaatatcttgataggattatggtttattatttaacatacttgaaaaatattgacgccaatgccgcaaatatctctgacaaacctttcatattagtttcaataggtgatattgcgtttgaagtcggttctaatatttcaagttatatgacgcctatccttgataatatcagggaaggtctaagaaccaaatttaaagtgagaaagcagttcgaaaaggacttgttttactgtattggcaaattagcttatgctttgggcccagcttttgctaaacatttgaataaagaccttctcaatctgatgcttaactgtcccttgtctgatcatatgcaggagactttaatgatccttaatgaaaaaataccctctttggaacccactgttaattcgagaattttgaacatattatccatatcattatctggtgagaaatttgatcaatcgaatcaatatgatttcaataaccaattttccattgaaaaggctcgtaagttaagaaatcaaagttttatgaaaaaaactgctggatctaacgacgatattactgatgcacaaattttgatccaatgctttaagatgttacaattagttcatcatcaatactccttgactgaatttgttagattgatcactatttcctatattgaacatgaagatccgtctgttaggaaattagctgcgttaacctcttgtgatttatttatcaaagatgatatctgtaagcaaacgtcagttcacgctttacactctgtgtccgaagtattaagcaagctgctgatgatcgcaataactgatccagttgcggagattagattagaaattttgcaacatatgggttcgaactttgatcctcaactggcacaaccagacaatttacgcttacttttcatggcgctgaatgatgaaatattcggaattcaattagaagcgatcaaaatcataggcagattgagttccgttaatcccgcttatgtagttccttctttgagaaagactttgttggagttattgacgcaactgaaatactcaaatatgccaaagaaaaaagaagaaagtgcaacattattgtgtactttgataaattctagtgatgaggtagctaagccctatatcgatcctattttagacgtgattcttcccaaatgtgaggatgcttcgtcggcggttgcatccaccgcaataaaagttcttggtgaattgtcggttgtcggtggaaaggaaatgacacgttatttgaaagaattaatgccactgattatcagcacttttcaggatcaatcgaactcgttcaaaagagatgctgcattaacgacgctgggacaactagctgcctcatctggctatgtcattggtcctttattggattatccagaattactcagtattttggttaatattttaaagaccgaaaataatcctcatataagacgtggaacagttcgtttaattgggatcttaggtgctcttgatccatataaacatagagaaatagaagtgacgtcgaagtcaaagagttcagtagagcaaaacgcgccttcaattgacattgcattattaatgcagggagtgtctccgtctaatgacgagtattaccccacagtagtcattcataaccttatgaagattttaaatgacccgtctttatcaagtcatcatacagcgtctattcaagcaattatgcatatctttcaaagcctaggtttacgttgtgtctcatttctagatcagataattccaggtatcatcttggtgatgcgttcatgtccaccatcacaactggaattctattttcaacaactttgttcacttgtatcaattgtcaaacagcacattaggcctcatgtggagaaaatatatagtgtaatcaaggaatttttcacaatcattaaattacaaatcacaataatatcggttattgaatcgatatcaaaagcgttggaaggtgagttcaagagattcgttccagaaactttgacatttttccttgacatccttgagaacgatcaatctaataaaaaaattgtttctatccgtatactgaagtccttagtgacttttggatccaatttagaggattactcccatttaattatgcccgtagtcgtcagaatgactgaatactccgctggaagtttaaaaaaaattgcaatcattacgttggggagattagcaaagaatatcaacctctcagaaatgtcatcaaggattgttcaggcactggtgcgaatcttgaataacggggacagagaactaacaaaagcaaccatgaatacattgagtttgcttcttttgcaattgggtaccgacttcgtcatatttataccagcagttaataaaacattgctaagaaatagaatccaacattcggtgtatgatcaacttgtcaataagctgttgaacaatgaaggcttgccaacaaatatcatattcgataaagagaatgaaatgcctataaaggataagtatgaggatgaaacgcaagtaaaaaaattacctgtaaatcaaaatattctaaagaacgcatggtattgctcccagcagaaaacaaaagaagattggcaagaatggataaggagattgtctattcaattattaaaggagtcaccttctgcctctttacgtgcgtgttcgagcttggtcggcgtttactaccctctagcaagagaattatttaatgcttcattttcaagttgctgggttgaacttcaaatcccataccaagaagacttagttcaagcgctttgtaaagctttatcatcttctgaaaaccctccagaaatttaccaaatgttgttgaacctggtagaattcatggagcacgatgataagccactaccaatcccaattcacacactaggaaagtacgctcaaaaatgccacgcttttgcaaaggcattacattataaagaggttgagttcttagatgagccaacaaattctacaatagaatcattgattagcatcaataatcaacttcatcaaacagattcagccattggaattttgaaacacgcacaacagcacaatgaactacagctgaaagaaacatggtacgagaagcttcaacgttgggaagatgctcttacggcttataacgagagagaggcggcgggcgaagactctgttgaggtcatgatggggaagttgagatcgctgtatgcccttggagaatgggaacaacttgcaaatctagcttctcaaaaatggagtacggcaaagcctgacgtaaaaaagtctatggcaccattagcagctggtgctgcatggggcttagaaaaatgggatgacatagctcaatatacaagcgtcatgaagtcgcagtcaccagataaagaattttatgatgcaattttgtgtctgcataggaataacttcaagaaggcagaggcccatatttttaacgcaagagatcttttggttactgaactgtcggcgctcgttaatgaaagctataatagagcatatgtcgtcgtcgttagagcacaaattatcgcagagttagaagaaattataaagtacaagaaactaccgcaaaattccgataagcgttttattatgagagagacttggaatacaagattattgggttgtcaaaaaaatattgatgtgtggcaaagaattctgcgtgtaagatcgttggtaataaagccaaagcaagacgcccagatgagaattaagtttgcgaatttgtgcaggaaatccggcagaatggcgttagccaagaaagtcttgaatacactacttgaagaaacagatgatcctgatcaccctaatacagccaaagcatctcctccggttgtttatgcccagctgaagtacttatgggctacgggatcgcaagacgaagctctgaaacaattaatcaactttacttctagaatggcacatgatttgggattagatccaaataatatgatagctcaaagtgttcctcaacgaaacaaaaaaaatccgcgtcatattgaggattatactcggcttctggcccgctgcttcttgaagcaaggagaatggagagtttgcttacagcctaaatggagactaagtaatccagactcgatcttaggctcatacttgcttgctactcattttgacagtacttggtacaaagcctggcacaattgggcattagccaattttgaggttatttctatgatgacatccgtctcaaaaaggaagcaggaaggtggtgattctgcttctagtagcgacataaacgaatttggaaacggtatgattggggttaatacatttgatgctaaggaggttcactattcctctaatctgatacagaggcatgtgatcccagctattaaagggtttttttattccatctctttatcggaatcaagctctctccaggatgccttaagactgttaactttatggttcacatttggtggtatcccagaagcgacccaagcgatgcacgatggttttaatttgattcaaattggtacgtggttggaagtattgcctcaattgatatccagaattcatcagccgaatcaactcgttagcagatcattaatctcactactatctaatttgggtaaggctcatccacaagcattggtatatccgttaatggtcgcaatcaagtctgaatctctatcgagacaaaaggcagctctgtctattatcgaaaaaatgagaatacacagcccagttctagtcgaccaggcagaacttgtcagtcacgaattgattcgagtagcggtgctatggcacgagcagtggtatgaaggtttggacgatgctagtaagcagttttttggcgagcacaatactgagaaaatgtttgccgctttagaacctttgtatgaaatgctaaagagaggtcccgagactttaagagaaatctcttttcaaaactcatttggaagggatttaaatgatgcctatgaatggttaatgaattacaaaagatctaaagatgtcagtaacttgaatcaagcatgggatatttactataatgtttttagaaaaatcagtaagcaattgccggaattacagacattagaattacagcatgtctcaccaaaattattatctgcccatgacttagacttagctgttcccgggacctacgctggtgggaagccaatagttaagatatccaaattcgagcctgtgttttcagtaatctcatctaaacagagaccaagaaagttctgtatcaaaggtagtgatggtaaggattataagtgtattttaaaaggtcatgaagatatcaggcaagatagtttggttatgcaattgtttggtttggttaacacattgttgcaaaacgatgccgagtgttttagaagacatttggatatccaacaatatcctgcaattccgctatctcctaaatccgggctattaggttgggtgccaaatagtgatacatttcatgtgttaattaaagatcacagagaagctaaaaaaatcccgttgaacattgaacattgggtcatgttacaaatggcaccagattatgataattcgacgttattacaaaaagtggaagtgtttacatatgctttgaacaatacggaagggcaagatctttataaggtgctgtggttaaagagtaggtcatcggaaacatggttggaacgtagaactatttacacaagatcgttagctgtcatgtctatgactgggtatattctaggactgggtgatcgacatcctagtaatttgatgttagatagaattactggtaaagttatccatattgactttggtgattgtttcgaagctgctatcttgagagaaaagtttcctgaaaaggtgccgtttaggttgactaggatgctaacttatgcaatggaagtaagcggtattgaaggaagtttccgtatcacctgtgaaaatgttatgaaagttctcagagataataaggattcattgatggccatcctcgaagcctttgctttcgatcctttgattaactggggatttgatttgacaacacagaaaatcgaagaggaaactggtattcaattgcccgtaatgaacgccaatgagttattgagtaatggtactattacggaagaagaagttcaaaaagtagaaaatgaacacaaaaatgcaatcagaaatgcaagggctatgttggttttgaaacgtataacagataaattgacaggaaatgatataagaaggctcagcgatttggatgtgccggagcaagtagataaattgattcaacaagctacctccgtggaaaacctatgccagcattacataggttggtgtcctttttggtag

SEQ ID NO: 1507 - DNA, 603 bp, Saccharomyces pastorianus
atgaagatctattacatcggtgtgttccgctctggcggagaaaaggctctagagttgagtgaggttaaagatttatcacaatttggtttttttgaaagatcaagtgtaggccagtttatgactttttttgctgagacggttgcttccagaaccagtgctggccaaagacaaagtatagaagaaggtaattatattggccacgtttacgctaggagcgagggcatatgtggggttttaatcactgataaggaataccccgtcaggccagcttatactcttttgaataagatattggacgagtacttggtagcacatcccgaggaggaatgggccgatgttactgagacaaatgactcgctgaaaatgaagcaattggacacatatatcagtaagtaccaagacccttcacaggctgatgcgatcatgaaagttcaacaagaactggatgagactaagattgtcttgcacaagactatcgaaaacgttttacagagaggtgagaagttggataatttggtggacaaatcagaatctttaacggcaagttcgaagatgttttacaaacaagccaaaaaatccaactcatgttgcagtattatgtag

SEQ ID NO: 1508 - DNA, 1389 bp, Saccharomyces pastorianus
atgaaaagacagctcataagacaccactatcctcgaagtggcccttggaatcgtgttttctattccaccaaaaagcccgctaagaatgtctcacccacaacaccagctacgatgacttctttggtgtctcagaggcaggatctcttcatgacagatccattgtctcctgggtccatgttcttcctgcctaatggtactaaaatctttaacaaattaatagagtttatgaaattgcagcaaaaattcaaattcggttttaaagaggtgataacaccattgatttacaagaagactctttgggaaaaatccggtcattgggaaaattactctgatgatatgttcaaagtggagaccactgatgtagaaaaggaagaatacggtttgaaacccatgaactgccccggccactgcctcatcttcggcaaaaaggataggtcatataatgagttgcccttgcgattctcggatttttcaccactacatagaaatgaagcttccggtgcattatcgggactgacaagattaaggaaattccatcaagatgacggacatatcttttgcgctgcatcccaggtgaaatcagaaatcttcaattctttaaaacttgtcgacatagtttacaacaaaattttcccctttgctaaaggtgctgctgacacagacaacaactattttataaatttctccacgagaccagatcatttcgttggggacgtagaagtgtggaatcatgcagaacaagtcctcaaggaaattcttgaagagtcaggcaaaccatggaaattgaaccctggtgatggtgccttttatggtcctaaactggacataatgctaactgaccatttgggtaaaacccatcaggttgccaccattcagttagacttccaactacctgagagattcgatttgaaattcaaagatcaagataattcatacaagaggcctatcatgattcacagagccacttttggctccattgaaagattcatggctttgttaatcgattcaaacgagggccgctggccattctggctaaacccttaccaagcaataatcattcctgtaaacactaagaacgagcaacaactaaagctgtgcaacgctttgcaaaaaaaactacgcaacgaggaaaaggcgaatgatatggagcctgttgctttgaatgattggcacttcagtgctgatttagacatacgaaatgaacctgtcgggtatagaatcaagtcagcaattttaaaaaattactcctatttaattatcgtgggtgatgaagaagtagaattacaaaaatataacatcagagaacgtgataataggaaaagttttgaaaaactaactatgaacgaaatttgggaaaagttcattgatctggaaaaaaactataagtaa

SEQ ID NO: 1509 - DNA, 1017 bp, Saccharomyces pastorianus
atgaacaatacagctgctgataaaatcactgaaggccaggatgaagaatgcaagattgaagtcttggacgatactcatctcgacttcatcagcgcagactcggaattgacccaggatttgcctgatgatgttgagatcatcgacttggtccatttgaaaattcagtcacttgaagacctgaacctttaccggtttaaaaacctgaaacagctgtgcttgagacagaacctgatcgaaagtataagcgaagtggaagtattgccccatgacaagatcgttgatctggatttttatgataacaagatcaagcacatctcttccaacgttaacaaactgaccaaattgacgtctttggacttgtcgttcaacaaaattaaacacataaaaaatctggataatttgacccagctggaaaatctgttctttgtacaaaacagcatttccaaaatagaaaatctgtcctctttgaagtcgctgaaaaatttggagttgggtggtaataacattcattccattgaagccgactctttcgaaggcttgagtaacctggaagagatctggttgggcaaaaacttcctgccaagactaatcaacctacatcccttacataatttgaaaatcctatccattcagtctaataaattgaaaaaaatcgaaaacttggaggcattgactaacttggaagagctttacttatcacacaacttcattaccaagatcgaaggcttagagaaaaacctaaagttaaccactctggatgtcacatcgaacaaactcacctcgttggaaaaccttgaccatctgtctcagttaaccgacatatgggcctcattcaaccagatagaccaatcgtttgagagtttaggcaagaacttgtccaatttgtcacgtttggagaccatttatttggaggggaaccccattcagatggaaaataaaacttcttataggagaaaactaactatgaatctgcctccatctctggagaagattgacgcgacgtatataagaggttga

SEQ ID NO: 1510 - DNA, 378 bp, Saccharomyces pastorianus
atgttcaaatcaatctgcaaaatttcgtcccgcatggctccctctgcgtgccgcaccatgttggcccgtcccgtcatggccaactccatactcgcacaaaggttctactccgccaacttgagccaagatcaggtctctcaaagagttatcgacgtcatcaaggccttcgacaagaactcccccagcatcgccaacaaacagatctcaagcgacactcaatttcacaaggacttggggctggactccttggacaccgtcgagttgctcgtggccattgaagaagaattcgacatcgaaatcccagataaagtggccgatgacttgagaagcgtgggtgaaaccgtcaactacatcgcttccaaccctgacgccaactga

SEQ ID NO: 1511 - DNA, 1611 bp, Saccharomyces pastorianus
atggaagttgctccagcattctcgaccacgcagtcagatatcacgttccagaaggtggacgcccgcgaaatcgataggtccgcctacttaggcccggactacaatggcgatgacctcatgcagctgatctcggattactataatatcgaggccctcgtggcgtacctagctcagcatacggagtataaaagtgtcacgcttcagtttcccgacgacttgatcaaagactcctcgctgataataaggtcgctgcagtcgaggtttgccgatgagacggtgaagttttgggttcttgcagacacggcgtacagcgcatgctgtgtggacgaggtcgctgccgagcacgtccacgcggacctggtggtccatttcggtgatgcatgcctgaacgccatccaaagtctgcccgtggtatactcgttcgggaccccatatgtagacataccgttggtggtggagaacttccggagggcgtttcctgacctgtcctcgaaaatatgcttaatggctaatgctcctttctccaagcacctgtcgcaactgtacagtgtcttgacgcgcgacttacactacaccaatatcatatattcgcagataaacacctctttcgtagaaaagagcctcgtaaccatactggatacgttcgacaccccggagaatgtgacccaggttggtgagttcggcaacaacagtatactgcttggaccaggaggaaccacagacggcgtcttgcccgaggaataccatctcttccacctgaccacgcctcaggacccaaggttgctgtacttgtctacggtttttcaatcaatccatatctttgatccagctgcgtctgatcttgtgacagggcccttcccctcgcttatgaagcgttacaaatacatgcatgtggctaggactgcgggctgtataggtattctggttaacacgctgtcgctgcgcaataccagagaaactatcaacgagctgatcaagctcatcagggcgcgtgagaagaagcactaccttttcgtggtcgggaagccgaacgtggccaagctggcaaacttcgaagacatcgatatatggtgcattctcggctgcaaccaaagcggtatcatcattgaccagttcaacgagttttacaagccgatcatcacaccgtatgagctgaatttagcgttgagtgaagaggtcacttggaccgggaagtggatcgtggacttcaaagacgccatcgatgaaatcgaacagaacatgggtggagacgatacgtctgcgaccacttcccacagtgacgagccagagtttgacgttgtgacgggcaaatacaccagcacatcaaggccactacgagcgctaacgcatttagagctggaggcggctgaaaatgaagacgatcgctccaagcagctgactacgagacataccgcctcgggcgccattatcaagggcacagtatccacttctgcggcagcactacagaaccgttcgtggaagggcctgggcagcgacttcgactccgtcgaagttgatgaaaccggtgcggacatcgaagaaggtatctccggtgtcgcacgtggctatgggttcgatcgtacagacgccataaacaaggagcaaaagtaa

SEQ ID NO: 1512 - DNA, 1191 bp, Saccharomyces pastorianus
atgtttaagaaatacaagaaccaagacttggatatggcattctggtggaagaaaaacccgaaaactccttccgattatgccaggttaatagtcgaacagctgaacaaattcagctctccatcattaacccaggataataaaagaaaggtgcaagaagaatgtaccaaatatttaatcggcactaagcattttattgttggtgatacggaacctcacccaacaccagaggctattgatgaactttatacggccatacatcgcgctgatgtattccacgagctactactacattttgtggacctggagtttgaagcgagaagggaatgcatgctgattttctctatttgcttggggtactccaaagacaataaatttgttacggtggactatttagtctcacaaccaaagaccatttcattaatgttaagaacagcagaagtcgccttacagcaaaaagggtgccaagatatttttctaacggtggggaatatgataattgaatgcattaaatatgaacaactttgtagaatcatacttaaggacccccagctatggaagttcttcgagtttgcgaagttgggtaattttgaaatcagtacggaatctctacaaatcttaagcgctgcattcactacacatcccaagttagtctctaaggagtttttttgtaacgagaataacattatcagatttatcaaatgtatcaacaaactaatggctcacggaagttacgtgactaaaagacaaagcaccaagctgctggcctctttaatcgtgataaggtctaacaactcattgatgaatatatttatcaattctccggaaaatctaaagcttataatgactttaatgactgacaaatctaagaatttacagctggaagcattcaatgtatttaaagtaatggtggcgaatccaaggaaatcaaaacctgtttttgatatccttgttaaaaacagagataaactattaacatactttaaaacttttggtttagattctcaagattctactttccttgatgagagggaattcattattcaagaaattgattccttaccacgcataatttcatcgacgacagacaatactaataacaatgtttcttcgaacaatttaaactcgccatcctcagtaataaacaatccatcgacactcttgactcattcaacaacgcctgattcaagataa

SEQ ID NO: 1513 - DNA, 1404 bp, Saccharomyces pastorianus
atgtctagtgctcaaatcgacaatgctctgtcgagttctaccactactctagtagacctgcccaataactctacttccatccagagaaaacaataccccaaggacgacaaggccctcaataggctattagttgaactaaagaataaccctgactcgaacatccttccgcatgaccaatcacattctgaaattttccaagctttgaaaactcgcattggtaagatcaataatgaaacctgtgatcccggtgaagagaactcttttttcatatgcgatttgggtgaaacaaaaagattgtattataattgggtcaaagaactaccaagaatcaagccattttatgcggtcaagtgtaatcccaaccccgaggttctttcattgttagcagaattaggcgctaactttgactgtgcttccaaagtagagattgacagagcactatcaataaacatttctccagatagaatcatatacgccaacccttgtaaagtagcgtcttttattagatatgcagcatcaagaaatgtaatgaagtctactttcgataatgtggaagaactatacaagatcaaacgattccatcccgagtctcaattattattaagaattgccactgatgattctacagctcaatgccggctttctgccaaatacgggtgcgagatggataaggtagactcgttattgaaatgcatcaaagaattgggtttgaatttagcgggtgtttcatttcatgttggctcaggtgcttctgatttcacgagcttatacaaggctgtcagagacgcaagaacagtatttgaaaaagccgctaacaaatacaacttgccgcctttgaagattttagatataggtggcggattccaattcgaatctttcaaggaatcaactgctgttttgcgtttagctttggacgaattctttcctgtgggttgtggtgttgatctaattgctgagcctggtagatactttgtggccacggcgttcactttagcaactcacataatcgccaagagaaagctatcagaaaaggaagcgatgatttatacaaatgacggtgtttacggaaacatgaactgtattttatttgaccatcaagcgcctcacccaaagactttataccacgattcgaaattctactacgacgattttgaatccaccagtgccgacctcgaacctgtcaataagacaagagccacatatccgtataaagtgtccatttggggtcctacatgtgacggtttggattgtattgccaaagaatactatatgaagcatgatgttgtcgtcggcgattggttttatttccctaatctgggcgcctatacttcgtctgccgctactcaatttaacggttttgaccagacagcggacatcgtttacatcaattctgaatccgactaa

SEQ ID NO: 1514 - DNA, 1284 bp, Saccharomyces pastorianus
atgcgtaagtgtaaaatttttgttggtaactctcacccagagttaggtaacatggtctgtcaaagattaggtattgaaccagctccatgttcattaaagaaatttgcaaacggtgaaacctctgttcaaattggtgtctctgttcgtgacgaagacgtgtatgtcatccaatctggttctccatcaattaacgatgatatcatggaattgttgattttagtctctgcctgtaggggcggatctgcaaagaaaatcacagctgtcattcctcagtttccttattccaagcaatgtaaaatgaagaagcatagaggtgctatcactgcaaggatgttggctaatctactggttatggccggtgctgatcacgttgtgtccatggaccttcatgcttcccaaatgcaaggttttttcacgaaaccagttgacaacctatatggaggtccaagcttagctaagtggattagagaaaatgttgaagactatgaagatgcagtagttgtctctaagaacccaggcggcactaaaagagtcactgctcttgctgattctttgaagatcaacttcgctatgattcataccgatcgtcgtcgttctaaggatctgtattctcaaaacaaggatttacaacagttgaaattgaggaagcaatcgatgttgaggaaaaacaaacctatcgtgagacaaggtgatcatccaaatgaggaagaaaacatcattctgagcaacggtatccaaactgctagaatccgtaacggtcacgttatcggcgacgacgaagcagatgacgatgaagacgccattttggaatctgacggtgagcttcattctatcgacgtcatggactcgcatggtttaggcggtacatacgacgctgtcgactctgaagacgaagaagaagtgccagttctttatagagaacaattaattacattggttggtaacgttcgtggtcgttccgccattattctagatgatatgatcgatagaccgggctctttcattagtgcagccgaacatctggtccaaaactgtggtgctaagaaggtttatgttgtcgccacccatggtatatttactggtgactgtttggaagaactagaaaaatccgacgccatcgacaccatcgttgtcactaacacatatcctatttcaagagaatgtatagctgggtccaagaaattggtcactattgatgtctctccaatttttgccgaatgtattcgtcgtgatcattatggtgaaagtatttcggtgctgtttgactctttggcagctctgtaa

SEQ ID NO: 1515 - DNA, 1860 bp, Saccharomyces pastorianus
  modified_base (652)..(692): a, c, g, t, unknown, or other
atgcccgagtacacattattggctgataatataagggagaatattgcccatttcgatccacatgacttatttgaaaacttgcacaccattgtccatgaagatgacaatcaagagaacgaggaagctgagcatttcaattatgatcaagtgctggataagtccttactgtcaagaagttctattgtgggccttggtttaggtttaatgagtccggtattaggaatgtgcacaagcatggctattggactaatcaacggtggcccattaactataatgctgggatttctaataagtggggtgtgcatatggttctcttctctttcactcggggagattgtgtctaaatttccaatggaactgcatgtcgggagtgccatgttagcgccagagaaactcaagctggcatgctcctggtacacagggtggttgatgcttatagggaattggacgatgagcacgagtatcacttttgcaggtgctcaactaactatttctctgattttgatgacaaactcagatcttatatccgaatcacatttgatattttacacagtcattgtattctatttagtggtgaccattgtaggcttcgtgaatttgaagtttgcaagattcattgaaacaataaacaaagtatgcgtttattggatcnnnnnnnnnnnnnnnnnnnnnnnnnnnnnnnnnnnnnnnnntcacaaaggaaaatttagatctttgaagtacgcactatttcattttgacaatggtctatcgggatacaaaagtgcatttctttcgttcattattggcttccaacaatccaactttactctacaaggtttcagtatgctacctgctttagcagatgaagtcaaggtccctgaaagggatattccccgtggtatgtcgaatgccgtattactatctgcattttctggggttattttcctcataccaataatgctaatccttcctgataatgatttactctttacaaatcataaagttcttccaattgtgaacatttttacaaaatcaaccgattcggtggttctatcattcttcttagtgctcctgatcttaggtaatttgttgttttctggaattggttcaattaccacatcttcccgtgctgtttatagttttagtcgtgaccgtgctataccgcattatgataaatggacgtatgtggagccggattctcaatcaaaagtcccaaagaattctatcatattgagtatggtaatatcatatttccttggactgttagcattgatttctacagctgcgtttaatgccttcataggagccgcggtattgtgtctctgttccgcaactttcattcctttggttttagtactgtttaccagaagaagggccattcggagtgcacctgtgaagattagatataaattcggttggtttatcaacattatttctattgcctggctattattatctatggtttccgtttgtctgccaacgcaggttcccgtgactttcaaaacgatgaattacgctttgatggtttacatattttgtatcctggcgatcactggtctctatttcaagtgggggaagtataattttaggttgcctttagctgatgacatcaaggcaccgattccgagtgatccggaagaaacagtttttgagctagatgatagtaatgttgagcataccatgagctctgaggtcacaatgcaaagctctacatggggcaaatcagaagagagtttagggaaaccttatctacaggacaattttgaaaatccatttgaagagaatgaggaaaacgtgataactgatgatgatagtggtgagcagcacgtacaggaacagggattcgatctcgctgatgatcgcaggcacgatatatga

SEQ ID NO: 1516 - DNA, 417 bp, Saccharomyces pastorianus
atgatattccttaaatctgtcatcaaagtaattgacaattcaggagctcaattagcagagtgcattaaagtcataaaaaaaggctctccgaaaagccctgcaatagtcggagatagaatagtgtgtgttatccagaaagcaaagcccttaactcaaaacattacaggaacagccaatactaatcgtgtaaaaaaaggtgatatctgtcacgcaattgtggtaagatctaaacaacgtaatatgtgcaggaaggatggctctatggtcgcatttggagacactgcctgtgttttgattaataagaacactggcgaacctctcggaacaagaattatggctaacgatggctgtgtagatagaaccttaaaggaaaagggatacaataagatatgctcgttagccagtagagttatataa

SEQ ID NO: 1517 - DNA, 1197 bp, Saccharomyces pastorianus
atgtatgttgatcctatgaacaataatgagatcaggaaactgagcattactgctaaaacggaaaccacgccagatgacgttaggcagaacattctcgcaaacgcacattcggtgcatgaggaatgttcttctattacgcccgttacaataaatgggcaaaacatcgaaaaggtgaaagaagaaatttctcctgatgattatctggctaaaagacccatgttgcaatacagagaaacttcaggtaagtactccttaggtgattttcaaattttgagaacactgggtaccggctcattcggaagagttcatctaatccgttccaaccacaatggaagattttatgcgttaaagacattaaagaaacacactatagtgaaattaaagcaggtggagcataccaatgatgaacgccgaatgctgtcaatcgtatcacatccattcatcatcagaatgtgggggacatttcaagactctcaacaagttttcatggtgatggactacattgaaggtggagaattattttctttactacgtaaatctcaaaggtttcctaacccagtggccaaattttatgccgcagaggtctgcttagctttggaatatttgcatagtaaggatataatatatagagatttgaaacctgaaaacattctcttggataaaaacggtcatattaagataactgactttgggtttgcaaaattcgttcctgatgtcacatacacactatgtgggaccccagattacatagcgcctgaagtggtcagcaccaagccatataacaagtcagtggattggtggagtttcggaatattaatctatgaaatgctggctggttatacaccgttctacaactccaataccatgaaaacttatgaaaatatattaaatgcagaattgaagttcccgccatttttccatccggatgcacaggacttattaaagaagctgatcaccagagacttaagtgaaagactgggtaatctacagaacggaagcgaggatattaagaaccacccgtggttcagcgaagtgatatgggagaaactattagccaggtacatagaaacaccgtatgagccaccaattcaacagggtcaaggtgacacttctcaattcgatagatatccagaggaagaattcaattacgggatccaaggggaagacccatatatggaactgatgaaagaattttag

SEQ ID NO: 1518 - DNA, 1206 bp, Saccharomyces pastorianus
atgatgaaaagattctttccccttaaaattcagactcgtctgaaatgcgactacccattacttactttcgagcaattggtttctacaaatggaatagggaaagggaaaaccggcagaatttctttaagggattacgtagaatggcaaaatttcccaaatataatgaaaagagaaaacttctttacacaaagaaaacaagcgtctacgggatccatagatcccattttatttgacaacattatcaattatgatccagtcttcagcgagtgcctcgcaaaatggctacttgtcaactacaaattgaacgactacccgtattatgacctcaacatcgtcaatatttacacggatttacctcaagggattcaaatatgcaaaagtttaatgacatatctaaaatcgacattgtctgaaaacatgtttcagaggataaagtactttatgatgcctttatacaaatgtgacaatgtaccattaaaggtcttagatggaatacctggagaagtaagcttagttcaagattatccggtatctccgactttattgaaagaaaagtttctcatagaggaccccgttaatattctaatgcttaacgatgttattaaatacacgacccacgatttagtcagatactcttcataccataacgcatgggagcaatgctttgtagatgtggatgagaatggacaaaataataaaacatttgatagtgatattgactattcgtgcaaacttgcgttagatcaaatgttcagtgaacaatcaaatatagttcctgataaagaaatttatattcctactaaattaattgagatattcacaacaatcaaaaataatattccagaacatcgactcttcaccgtggacactccacaaagatcgagcccaacattattatcaatattaaaaagcttattaaacccacgcttaacagggtcgagccagatagtggaaccatactccgattcaatcttttctgatatttgcagcggaagggtgtatttcatgacggacttcttacagttacaaaaaatctacaatgatatcaatgaattctctaggagctgtgaagtcgaggatattagcgattttgttgaaaaatggatgagccctagtgagacagacacacgcacattgtcgaatggaaagaagcctcatctggaagacataagcaacagtactttggcaacacttcattccacataa

SEQ ID NO: 1519 - DNA, 441 bp, Saccharomyces pastorianus
atgggtaagagaaagaagtcaacaagaaagccaagcaagaggctagtccaaaagctggatacgaaattcaactgtttgttttgtaaccacgaaaaatctgtatcatgcactctagataaaaaaaacagtataggaactctttcatgcaagatttgtggtcagtctttccaaacgcgtataaattcgctatcgcaaccggtggatgtatatagtgattggtttgatgctgtagaagaagtcaattctgggcgcggaagcgacacggatgatggtgatgaggactccaatagtgattatgaaagtgattcagatcaagagggcataagcacgaaagttcgtggcgaagtcgattctgatgaggaggaagtagactcggacgaggagagaatagggcaagttaaaagaggtagaggcgcattggtagatagcgatgatgaataa

SEQ ID NO: 1520 - DNA, 303 bp, Saccharomyces pastorianus
atgctaaccactcagtggctgttattgagaagtacagcaaggggtgcctctcttgttagcaagatccgtccttgttttaaacctattattgcgtactcgagaaaactgtatagctcaacctcgtcacaagccaatgccattaggtcgctgagcatgagtgaaccctgtaaggagaataaacttacaaattcaaaacttgtaaatatctacagtaaacgttcactgttcacagaaactggtcatgcttgtgcgaaatgccaaaaaacgtcacaattactaaagtatgtttacacaaacgcttga

SEQ ID NO: 1521 - DNA, 1890 bp, Saccharomyces pastorianus
atgctaaggagatgcttgaatttttcactacgaaacattcgatataattcaacccttacgaacgcaagtttgcagagttcgaatttgacgaatcttatagacactaatattaaagatataaatgtcctttcaccgtacagagacgaagccggtaatttgactcaaggagctaactcaaaagaagccaggttatcgtttaaaactctccagggccaatcgtatcgtgatcagttagacttgaatcccgatgtgagcaaagcaatcaataataatattatgtccgtacatattcccaataacgtgagaagagttgcaacaaattactacagtgagctccaggagccgaattcattgcatcgcccttgcaaaacaaaaatggaggttgatgctcatatagcgtctatatttctacaaaattatggctctgtattccaaagtttaaaggaattacaaaaaagagtaggcgctgagaactttaagcctcagagggttctggatgtcgggtttggtccagctactggtatagttgcactgaacgatgttttaggtgaaagctacagaccggatgtaaaagatgcagttatattgggtagtgctgaaatgcaaaaaagagccaaaattattttaagcagacaaatcaatgaagttgttgatcctaccgaaatggaatcaactgtagaggaagggggggggattaataagcaaggcgatgagatccctcaagaagatgagcttgtcggagaagtaatgactaaaaaaattaatgtgatgaccaatttacgatcttcaattcccgggtcgaaagaatatgatctcgtaattttaacgcaccaacttcttcatgacaagaaccagtttccaattcagatagatgaaaatattgagcattatttaaacatgttggcacctgggggccatatcgttattgttgaacgaggcaatccgatgggattcgaagttatagctagagcaagacaagttatgcttagacctgaaaatttcccagaagaatttggtaagattcccaggccttggttgaggggaatgtcgaataaaaacaaaaatgacgtagggtcaatgaacataccgagtgattattttttaaaggtcattgctccttgccctcatcagaggaaatgtcctctgcaagtagggaacccaaacttttacacgcataaagaaggtaaagatttaaagttctgtaattttcagaagagcattaaaagacctaagtttagtatagagttaaaaaagggcaaacttctggccacatcatgggataattctcaaggagatgcctctagattaaaaggcactggaaggagaaatggtcgtgattatgagattctaaattactcctacttgattctccagagatcgcataaagatgagaaatctttgaaggaaattgagaaattacggaatgaaagtggcaatgtcaaatacgatgttggatcatcaggtgacgacacacaggatacttggccgcgcgttataaatgaccccgtcaagcgtaaaggtcatgtcatgatggacctatgtgcaccatcgggggaacttgaaaaatggacggtttcgaggtcattttccaaacaagcttatcatgacgcaagaaagaccaagaaaggtgatttatggactttaggggccaagacacaaattaaagggttgggagatttgaatgtaaaaaagtttaaaaaattagaaaaggaaagaatcaagcaactcaagaaggaagaacgtcaaaaatcaagagagattattgaatcctataatgaccttgaagactctcttcaatttggcaataacaagctgtcaaacattgaagtaatgaaggaaatgtcaaacgttcacggtcactatttctcacagcatgtaaataaaaaatga

SEQ ID NO: 1522 - DNA, 744 bp, Saccharomyces pastorianus
atgccaaagttaattttagtcagacacggtcaatccgaatggaacgaaaagaacttattcaccggttgggttgatgttaagttatctgccaagggtcaacaagaagccgctagagccggtgaattgttgaaggaaaagaacgtccacccagatatcttatacacttctcaattgtctagagctatccaaactgctaacattgctttggaaaaggctgacagattatggatcccagtcaagagatcttggagattgaacgaaagacattacggtgctttgcaaggtaaggacaaggccgctactttggaaaagtacggtgaagaaaagttcaacacctacagaagatctttcgatgtcccacctccaccaatcgaagcttcttctccatactcccaaaagggtgatgaaagatacagcttggttgacccaaatgtcttgccagaaaccgaatctttggctttggtcattgacagaatgttgccatactggcaagatgtcatcgccaaggacttattgagcggtaagaccgtcatggttgctgctcacggtaactccttgagaggtttagttaagcacttggaaggtatctctgatgccgacattgctaagttgaacatcccaactggtattccattggttttcgaattggacgaaaacttgaagccatctaagccatcttactacttggacccagaagctgccgctgctggtgccgctgccgttgccaaccaaggtaagaaataa

SEQ ID NO: 1523 - DNA, 909 bp, Saccharomyces pastorianus
atgttttccagattatccagatcccactcaaaggcattgccgatcgctttaggtactgcagctatcgcagcagcagcagcattctactttgctaatcgcaaccagcattcatttatcttcaacgactcgaacaaggtgttcaagggcgacgacaaatggatcgatttgcctatatctaagatagaggaagaatctcacgataccagaagattcactttcaaattaccttctgaagactcagaaatgggattagttctagcatcagctctatttgctaaatttgtcaccccaaagggttctaacgttgttagaccatatacccctgtaagcgatcttgctcagaagggtcacttccaattagtcatcaagcattatgaaggtggtaagatgagttcacatcttttcgaccttaagccaaatgacaccgtttcgttcaagggtccaataatgaagtggaaatggcaacctaactcgttcaagtcaattaccttgctaggtgctggtacaggcattaaccccttataccaattggctcacaacatagttcaaaaccctaatgacaagaccaaggttaacctgttatacgggaacaaaacacctcaagatattttgttgaagaaggagttggacgatttgcaggagagattccctgaaaaattcaccgttaattattttgtcgacgacaagcaagaagtcttagattttgacggcgaagtcggattcatttctaaggacttcattcaagagcacattccaggcccaaaggaggacacccacctgtttgtctgtggccctccaccattcatgaatgcttattccggtgaaaagaaatcgcctaaggatcaaggtgaattaatcggtattttgaacaatttgggctattcaaaggaccaagtcttcaagttttaa

SEQ ID NO: 1524 - DNA, 639 bp, Saccharomyces pastorianus
atgttcattctttcaaagatctcggatttggtacgaattccgccagatcaatttcatcgcgatacaatatcggcaatcactcaccagctaaacaataagttcgcaaacaaaattattcccaatatcggtctttgcattacaatttatgacttgttaactgtcgaagaaggccaattgaagccaggcgatggctcttcctatatcagtgtcacatttcgagccattgtgtttaagccatttttaggtgaaataataactggatggatttccaagtgtacagctgaaggtataaaggtttcgttgttgggtatatttgatgatatattcattccgcaaaatatgttatttgaagggtgttattatacgcctgaagagagcgcatggatttggcccatggatgaagaaacgaaactatatttcgatgtgaatgaaaaaatcaggtttagaatcgaaagagaagtatttgttgacgtgaaacccaaatcccccaaggaacgagaattggaggaaagagcccaattagagaaagaaatcgatggcaagggcgaagaaactccacaaactgaaaaacctccagcatatgccctactaggtagttgccaaacagatggcatggggctcgttagctggtgggaatga

SEQ ID NO: 1525 - DNA, 660 bp, Saccharomyces pastorianus
atggcgaacgaaattgaattactgcagaaacaaatcagcgaattgcaagacttggtcaagaagcaaagtttgatcatctcgaagaccggggaacgtgttctcgagttgcaagtggccaaacaaaagcatgatgtgaccgatttcgactcgaaatactccaaatccgtctcaaagaagtcagggtccgccactcagtttgactcgaccgattttgccacaaacgaggatctggtggaattggtcaaggaactacaaggtgagctgaatttcatcgaggaaaggtctatcagaagactcgtcaactccttgaaaaaagaggacgacgatgttatagcggcattgccaaacgccgacggtgacattcctgacgtttcaaacggagtgttccctaagacgttgaaagaattcgaaaatatttcagattctatgttgatcagactggctaaattctacgaaagactgccaccaaccataaaggagcaagaagatttcgaaaactttttggaaggaaaagtcgaggctttccatatcaatgagaccaccgacgaagagctttcaaaggaactggagaagttttccaaggtcgaactagacgacgcattcaatgacgttgcccgttatttaggtctctctttaagaagagggacagacatatggtga

SEQ ID NO: 1526 - DNA, 597 bp, Saccharomyces pastorianus
atgtccgtcatgttggtcaaactgggactcaacaaatctgctttgttattgaaaccatccgtcttctcaagagccgcagccttgagctcctcgaggagactgcttttcaatacagccagaacaagtctttgctccacctcatctttgaagaacgtagccaccgaaatgaacaccaaggctgctattgccgaggaacaagtgttaaacaaacagagagccaagagacctatttccccacatttgaccatttaccagccacaattgacctggtacctctcttctatacaccgtgtctcgctggtgtttatggggttgggattctacttgttgaccattctcttcggtgtttctggtctactaggtttgggtttgactactgacaaggtctctgattggtatcaccagaaattctccaaaattaccgaatggtccataaagggttccttcgcttacttatttgcgatccacttcggtgacaccattagacacctgttttgggacgcggccaaggaactgaccctcaaaggtgtatacagaaccggttacgccgttcttggcttcaccgccgtcctcggcacttatttattaactttatga

SEQ ID NO: 1527 - DNA, 210 bp, Saccharomyces pastorianus
atgaacgctaacaaactgaggcagtataaccagcttgctcacgaactcaaggagctgcaaacaaatttacaggaaacgacaagacaactagacattatgtcaaagcagagcaatgagaatttggttaaccaattaggcaaagtacacggaagctggttaattggtagttatatctactatatggagcagatgcttggaaaggcacagtag

SEQ ID NO: 1528 - DNA, 396 bp, Saccharomyces pastorianus
atgtttggtccatttaaattaacaagccctgtcgctggtggcctactatggaaaattccatggagaatgtccacgcatcaaaaatgccgtcaaagagaaaggcttagaaacgttgaccaagtaataaatcagttaacattaggcctacacgttcagagatgtcagggtaaagggctgacttaccaagaagccttggaaagtaagaagaaatacaagccaagaagtaaggtgttgagattattgaacaagccctctgtctttcccaaggagagccaaatgtcatccaaagacaaatattgggcatttgataaaaaagccaccggttacaggaagggtattcataaggtacctaagtggactaagctctccattaggaaaactccgaaattcttttga

SEQ ID NO: 1529 - DNA, 1308 bp, Saccharomyces pastorianus
atggttgacgtaatgagcgcagagcagacctttcctcgagcaattcgtctgttgaagtgcgctggaggctatatgagcagtttgaaaataatacatatagcaggaacaaatggtaaggaaacagtgtctacatttttaacatccatattacagggtacggaaccacagcggcagaaggttttggttggtagatatactacttctttcttgcttaacgatagagaagctatcagcgttaacaatgaatccatttctttgaaagagtattctgagattgcgaacagccttataaaactagacgaatctttaaatttacagtgtaacaccattgagctgctaacaagtatagcattcgtatatttcgccaagaaatgttgccagtggtgcattatagaaaccggactaggtggcaaatgggatcctgcaaacttgattcctcgccaaaacaaaatttgttgtgctattaccaacgtcgggataagcgacgagaagctcttatgtgatgctttatctctaattacgtacgaatattcaaaaaaaaaagtgcacactataccgtttgcggtattggatgggtctaatgatgaatttgtacgaaacgcaatatcgagggagtgtagcaacgttggttgcaagttacacatcacggatccctcccttgacaattgcagtgtacgtacagactcatggggcacacttgaaattcggcaggtgccatataatgaggaggatcagatatttaacctaagggtagcaattgccgtcttagatttcctgaaaaaggaaggaaaagtttgtatttcgaagggccaactatccaagggcttaatatctgtcgactggccgaaaagcttacaccaattggactactgttacgaagcaaatagaggaaagagaatagcgctactactagacaacgcaaacaatgcaaaggcagcacagaatttagctagctatttaaggacaaaatacggcgatactccactaacttttgtcgtagctataacaatgggtaagaaattaccgcccttacttgatccgttgatccgtacgcaagatcatgttatagtgactaggttcggatctgtggttggtatgccttggattcaatctttcgagccaatgcaacttttcacatttatcaaagaccgttacacgaaaaatgtagatatacaaccagatcttcatagtgtttggacttttctagaagcaaacaggcttcaaactatggcgcctgttatcgtatgcgggtcactgtatctttgtaaagagttattataccaacacaattgtcatttgagggtataa

SEQ ID NO: 1530 - DNA, 741 bp, Saccharomyces pastorianus
atgagtacagataaagagattagggtttcacctggtatctgtacaaaagttgagcaaatattagacttgatctcccgttatttgtcatcttacattcatgttctgaacaagtttatcagtcatttacgcagagtggccacgctacgattcgaaagaactactttaattaaatttgttaaaaaattaagattttacaatgattgtgtactaaactacaatgcatcagactttatcaatgaaggtacaaacgaatcgggttcagatgccgaccctctggataaggtcatcttaccaatagcttcgatgtttgtcaaatgcgtcgaaacatttgatttactgaactattatctaacacaatcgttacaaaaggaaattatatctaagactttgaatgaagatctgacgctaacgactgaatctatattagctattgacgatacttacaatcattttgtgaagttttcccaatggatgattgaatcattgcgcattggcagcaacttgctagatttggaagtggtacaatttgtcattaaatgtgctgatgaagacggtacaaacaccggagaaactgacaatatcttcttacaggaaattgttcctgtcaattcagaagaagaatttttctctttgtcagctgcatggcactctatcttagatggtaaactaaatattatggatcaagagttcgatgtcgtcgccactaaatggcacgacaaatttggtaagttgaaaaattga

SEQ ID NO: 1531 - DNA, 1875 bp, Saccharomyces pastorianus
atgatggcttttgagaatacaagtaagcgaacaccccaggagttcgtagcacctgtggatccaaagaaaagaaaggttcaattctccaatagtaccgggctagtaacactgcaatcagaggaaatgaaagatgaagtgttttcgacagctatgtatgccaggttcgtgaaatctgccttagatgatctagacaagaatgactcaacccaaatcagcataattgccaaccaagtagcacttccgacaaagaattctgaaagaatcgaggataagaatttcaatgttcttttggatatcttatctagtaacattaacaggatagaatcctccaggggaactttcctgatacaatctattataaactttgagaagtggtgggaattacctccacaaactctaagtaaatatatatatttcattaaaatcctttgctcgagtatacccaaatggtggcaagacgtttcgatgatattggtatcttgttttgttttaccagtcgaacaaacggtatgtcatcatgacatgcttaaatatttcttaaggatgatcccctcttcgatgggattcatagatacatatttggccaaatttttccccaataagaatgatactcagaaaaagttggttaattatacttcaaacttactaaaattgagaggctactgctctgaactgggattccaaatctggtccttactaatagaaagaactatttcgattgatgttgaactacaaaacgaattggatgaattggatgacgatgaactagagaatgcagagttagtggatgatgaagacacagaggacgaagacttgggagatgacgatgaaagtgacgaagataacgataatgaaggggcaaaatctggcataactgacatcaatcaaagcgatgatgaagacatggacgtcattgagggtatggacggtgctgaagagtataatgtggagctgacacaaggaatcaaagaactatctactaaattggatgccattttaactttagtaagctcacatgtagaagagcaagtaacgccagaaagcttagaaaatggtgacggtgttggcgtattcaatactttaacaacactgtttaaaactcatgtcttacccacttactataccagatcaatccaatatatcatgttccatgtctcgcaacaacaactagaactaatggactcatttttggttactcttatagacatttcgtttgccgcaaatgaagctgccgagaaaaagatcaagtcgttgcaatacttgggatcttacattgcaagagctaagaaactttccagaactcaaattatatttgttgcaagctatttgacttcgtggttgaacagatatgttatcgaaagagaagaagaagtggaccaacgtgggggaatggaaagatttaaacacttttatgctgcgttccaggcattatgttacatattttgctttagacatggtattttcagggacactgacggtaactgggagtgcgaactggacaaattctttcaaagaatggttatatcaaaattcaatcctttgaagttttgcaacgaaaatgtcatgctaatgtttgctcgtatcgcccaacaggaaagcgttgcttactgcttcagcataatagaaaataacaacaatgaaaggttgagaggtattattggcaaggctgatagtgacagaaaggaaagctcggtgcaagcaaacactgcgtcatcctcttggtcattagccaccagacaacaattcattgatttacagagttactttccttttgatcctttgtttttgaaaaattacaagatattaatgaaggagtattacatagaatggagcgaagcaagcggtgaatacgaaagtgatgggtcggatgactag

SEQ ID NO: 1532 - DNA, 510 bp, Saccharomyces pastorianus
atgtctgtgaagcccattgacaacttcatcatgaatagcgttcgcctattcgaggtgaatccatctcagacactattttctatatcgtataaaccacccacaccaaaaaaaaacactaaagtatctttcagaactcataactcgcatctgtcctcgaactacaaatttaccacgaataagagcaaagatgtttcgagattgcttagtgcattgggcccaagaggtgtatctgtaaccccaggcaaaatcgaaaaaaaagcacaattaaagaaaaagcaaaagaacgctaaggtaaaagaatctgataagaagataaaaaccaaaaatattcaaaatgttgtcggtctggtcactttaatcgtgaatactgatgttaagaaaagcgaacctacggccacgaaaacggctgcagggcagaagcaaggtgccaatactgtgcagaataataatggtggctcttcagcttcgaagaagaagaaaaacaagaacaagggcaaaaagaagcgttaa

SEQ ID NO: 1533 - DNA, 2583 bp, Saccharomyces pastorianus
atgttcaagctgaagacaagcgccccaaactacgatgaaactttaaactctaataagggtgatcaaaattcgaccgctgtaaatggtaaggaaacgagccaaatgagacatttgagtattccacataatcaataccagaatccgtccattgcagagtcaaggagaagctctactaggtatgatggaggttattctgccgatataacccctgctcaaataagaattattgataatatagacaacagagcaagactaagaaagacacttcaaagaaattcaaaggtcttgcatggatacagtagcctcagcgagaacgaccgatggtatttcgatctattcgatagaaagtattttgaaaattatctcgaagaaccctcctatatcaagatctttaaaaaaaaggaagagttgaaacagtttgaaaggatgtttttagctcaggagttgaaaattcctgatgtatatagatcacccaattatcaaggagaatcaacaggggccaattccgaactcttcaaaaattcaatatgctgttctacattcagtcacgatggtaaatatatggttgttggttgcaaagatggttctttacatctttggaaagtcatgaactcaccagttaagaggtgggaaatggctcgatcagaaaaatcggttagtttaactagagcgaactctttaaaaatccagagacatttagctagcattagttctcacaacggatccatgtcaagtaatgatttaaaaccaagcgaccagttcgatgcagcttcgaaacaattacatctatacgcaccagttttctattccgatgtgttcagagttttcatggaacataccttagatatcttagatgcgaattggtccaaaaatggatttctaataacagcttcgatggacaaaactgcaaaactatggcatcctgagaggaaatactcattgaaaactttcgttcatcctgattttgtcacttctgcaatatttttccccagtgacgatcgtttcgtaataaccggatgtttagaccacaaatgcaggttgtggtctatacttgataacgaagtctcctatacctttgattgtaaagacttgataacgtctttaactctatctccttctgatggagaatatactattgtcggcacgttcaatgggtacgtttatgttttattaacgtatggtttaaaatttgtttcttcatttcatgtgattgacaaaagcacgcaagggactaccaaaaatagcttctacccgtctttcgaatttgggaaaactcaacacggccctaggattacgggccttcaatgctttttctctgaggtagataaaaatttacgattaatagttactacaaatgattcgagaatccaaattttcgatctaaatgaaaaaagagcactggaagtattaaaaggatttcaaagtggctcttcaaggcatagagctcaactattaatgatgaaaaatgagccagtagtatttacgggtagcgatgatcattggttttacgcctggaaaatgcagacctacaacttatcagcagaaacgaatagcataattccaaatagaaaaaagaggctgagcggtaatatgagtttcaaagggcttttgaggattgtctccaataaaagtacgaatgacgaagcctcgacagaagcctcaaaccaaggtgggtctcgcacaaaccaaaactcttcaaaaactgcccctcagactcaacatgttggtagccaagctatcaaaaataatcattacatatcgttccatgcccatagtgcaccagtcacttgtgctagtattgctcccgatgttgcacttaaaaacgtttcattatcaaatgatttgattttcgagctgacttcacagtattttaaagagttgaatcaaaataataataatgcggaaaataatggcgcaaatgatagcaaacccaccttgcaggctattaaagagtcgggaggatttagcacaaatttatcaaacgtcgtaaataatgttggtacaattttaatcacgacagataatcagggttcgattcgtgttttcagaactgatatcttgccagaaatacgtaagagaatcattgagaaattccacgcttataactcgttccacagtgaagctactgacaaaagaaacagccaaaataatgacagtttattcgttagtaaaatggatgagacagagccggaagaagttgacgaatttagcactgccccaccttcaaatgtagataacaaaagagatcaagaaagtaggttgagcaatgatttttatgagcaaaatttgaacaataaccaagtggtttcaggtaagtcgccaagagccggtgctattttcaaaaactcgatattcaacaaatccaatggcagttttatgtcattaaagtcaagaagcgagagcactaattctacgttattcgggccgcatgatattccgcaaagctctacctcggatccgaagctaaagtgcgacgtttgcaatggatctaagtttgaatgcgtctcaagaaatccgattagtggaggcgaggattatttcacttgcactgactgtggtacgatactcaataatttcagataa

SEQ ID NO: 1534 - DNA, 975 bp, Saccharomyces pastorianus
atgtcatctgaaaattctaaacaggagaatcaagttgagaaaacagcagctcaaaaaatatcaaagtttggttcgtttgtagctggtggcctagcagcatgtatagcggtcactgttaccaatccgatcgaattgattaagattagaatgcaacttcaaggtgaaatgtccgcttcagctgcgaaagtttacaagaatccaattcaaggtatggcggtgatctttaaaaacgaaggtatcaaaggtctacaaaagggtttaaacgctgcttacatctatcaaattggattaaacggttctagattggggttttatgagccaattagaacatcattaaatcaagttttctttccaggtcaagaaccacacaaggtacaaagtgtcggagttaacgttgtttctggtgctacctctggtataattggtgccgtcgttggttctccattgtttttagtaaagacaagacttcaatcgtattctgagtttataaaaattggtgagcaaactcattatactggtgtttggaacgggctggtcacaattttcaagactgaaggtgttaaagggctgttcagaggtatcgatgccgctattcttagaacaggtgctggttcctctgttcaactaccaatttacaacacagcaaagggatttttggtaaagaatgatataatgaaggatggaccagccttacatttaaccgcaagtactatatctgggttaggtgttgccgtggttatgaacccttgggatgttattttgacaagaatctataaccaaaagggtaacttgtacaagggacctatcgattgtttagtaaaaacagtaaaaattgaaggtgtttctgccttgtataaaggtttcgtggctcaagtcttcagaattgcccctcatacgatcatgtgtttgacctttatggaacaaacaatgaagctggtttattcagtggagtcaagagttttaggccataattga

SEQ ID NO: 1535 - DNA, 648 bp, Saccharomyces pastorianus
atgtttgacattaagctgaataggaagacaacagagtttctgcgaaagttcaagagcagtggaagatcaaacaaaagtattgatgaggacattgaggtgtttttacaagggcacgctgtccccattaattcactgctattttatgtaaaggagtacacgaaggataatgatttgccctgctcaatgagagaactgttgacaccactcgaattcgaattcaaaccaaaagttgcgaaaggttcgcattattcagagagttttaagaagaatttagagtttttaaaatatcaggaacaagagcttgaataccaaacaatggtcaagagaaataaacctatctcgtcacttcgagaagaagacgagcttacaccttcgcaaatcaataagcaaattaaagaacaagttactactgttttcaacgttcttgtaagtgtcgtttctgttgtcgtggctatttggtactggaccgggacctctacaaatttcccagtacatgttcgtctcttattgtgtctattttttgggatattagtcttagtagcagatgtggttgtttataacagttacttaaagaagcttgaagaagcgaaagtgaaagagagagtaaaagttgaaaaaaagaaagtgctgaagaagatcacgctgtaa

SEQ ID NO: 1536 - DNA, 705 bp, Saccharomyces pastorianus
atgtccgaaaaagttatcaatcctcaagtttcatgggctcaaaggtctagcaccactgatccagagagaaattacgtcttaatgaccgtgtcaattgctgactgtgatgccccagacttaactatcaaaccaacttacattgaattgaaggctcaatcaaagcctcatgtcggtgacgagactgttcatcattatcaactgcatattgatctgtataaggaaatcatacctgaaaaaacaatgcataaagtcgctaatggtcaacactatttcttgaaactgtacaaaaaggatttggaagccgaatactggccacgtttgacaaaggaaaagatgaagtactcttacattaagactgatttcgataaatgggtcgatgtagatgaacaagatgaagtcgaagctgaaggtaacgatgccgcccaaggcatggacttaagccaaatgatgggtggtgctggcggccctggtggcgctcaaggcatggacttcagtcaaatgatgggcggtgctggcggtgctggtggagctcaaggcatggacttcagtaaaatgatgggcggtgccggaggtgccggctctccagatatggctcaattgcaacaattattggcccaaagtggtggtaatttgaacatgggcgatttccaagaaaatgacgaaggagatgaggaagatgaagaagaaccggaagtgaaagcatga

SEQ ID NO: 1537 - DNA, 1554 bp, Saccharomyces pastorianus
atggatgaatttagtaggctcttttcacagccaaagacacctcagttgaaacaagacggattttcggactccactgacaagcaacaggaaaggacatcacctattaaaaataaggagggaaaccaaaaagctcctttcattgtacccactagcgaaacttgcactacgcccttgactgtgtctattccaacgttcgagaatgttcaaactttacccacaccgatgacctatactccgttatccccaggaaatctcagtatgtcacccatagatcaatcttcattaaatattcccaaaaggcgaagtcatgcacgcttattggatgacatgctttccattgcgcagccaaaccaaagagttgtttctgagcttgttgcacctgcgaatttattgcctcaaagagtggtttctttaccaacagtcgctgaggagacattcaatagtgattctgctgctgatagtaacacttcaaaaaaatcatgtttgtcagaaagtggtgactacacggacaaatacgatgatgaaacgctccagggctttcttctggatcattgggaccagccattgttatggagaaaggtaaggccaattggttcaggaaactttagtaatgtgcttttatatgaatcgatggaccaaagtgatcctaaatcagcgcaagtggctgtaaaaaggctcaaatatcctgaagaattatcacatgtcgaacaaattaacacatcattacgatataaagaaactttatcccgtttggaaaattctttgactagagaacttcaagttttgaaatcgctaaaccatccatgtatagtcaaactacttggaattaacaatccaatttttattaccagcaagaagcctttacacgatttgattaaaaagaacccaagagctctaccgccctgtgacatgattatgtcctattgttctgcaggagatttattagctgccgtcatggcccgtaacggtggcttagagttatggctaattcaaaggatctttgcagagttggctctggcagtaaaatacttgcatgaaagtaatgttattcatcgtgacttgaagttagaaaacgtattattgaaatacacatttgatgatatcaatagttttaaggattcaccaatttactacaggcagaatgttattgaactagcggacttcggtctttgtaaaaaaattgagaatgatgaaatgtgtacagcaaggtgtggatcagaggactatgtgtctccagaaatattgatgggagttccatatgatggtcacttgagtgatacgtgggctttaggcgtcatattatatagtttatttgaggataggttaccatttgatccgcctccaaacgcttcaatgagacagcgtagcagggccacgtcacaccgtatagctagattcgattggagatggtataggttaagtgatgatgatactaatacggggaaaaaaatcgtggagaacactttaacgaggaaaaaccaacgttggtcgattgacgagatttacgattccccgttcgttaaagatatcgttgataaactagatttttcttga

SEQ ID NO: 1538 - DNA, 1149 bp, Saccharomyces pastorianus
atgggtatcaaaggtttaaatgcaattatttcagaacacgtgccctccgctatcaggaaaagcgacatcaagagcttttttggcagaaaagtggccatcgatgcctctatgtcgctatatcaattcttgattgcagtgaggcagcaggatggtgggcaattgaccaatgaagccggcgaaactacatcgcatttgatgggtatgttctacaggacgctgagaatgatcgaccacggaatcaagccttgctatgtctttgatggtaagcctccagatatgaaatctcatgagttgaccaagcggtccacgagaagacaagaaactgagaaaaaactggcggaggctaccaccgaactagagaagatgaagcaagaaagacggttggttaaggtctccaaagagcataacgaagaagctcaaaaattattaggactcatgggcattccgttcataatagcgcccacggaagcagaggcccagtgtgctgaattggccaaaaagggtaaggtttacgcggcagcaagtgaagatatggacactctttgttacagaacgccctttttgttaagacacttgacattttcagaggccaagaaggagccgattcatgaaatagacaccgagctggtcttgagaggcctcgatttgaccatagaacagttcgttgacctttgtattatgctcggttgtgactactgtgaaagcatcagaggtgttggtccagtgaccgctttgaaactcatgaaaacgcatggatccattgagaaaattatagagttcatcgagtctggcgagtcaaacaacactaagtggaaaatccctgaaaactggccctacaaacaggcaaggctgttatttctagaccctgaagttatcgatggtagcgaagtgaacttgaagtggtcgccaccaaatgaaaaggaactgatccagtatttatgcgatgagaagaaatttagtgaggaaagagttaaatccggcataacaaggttgaaaaaagggctaaggtcaggcattcagggtagactagatgggttctttcaagttgtacccaagacaaaagagcagttggctgccgcagccaagaaggctcaagaaaccaagaaatcaagtaaaaataaaaacaaagtaacgaagggtagaagatag

SEQ ID NO: 1539 - DNA, 942 bp, Saccharomyces pastorianus
atgccgctagtgctttttacaggatacccatgcagtggtaaaacaacgctcgccaaacatctagtgcagctactacaatctaaaatcgatgcaaccccatcactaagtaaatattccatagtttatcattccgatgagacgctgggaatcaagcattcagactacataacttcacaagacgaaagaaaactgagatcggagatcatctccgcggtgaaaagagacttgtccaggaacaaaatagtcatagtagattccttgaactatattaagggtttccggtatcaacttcactgtgaagtgaaaaacttgtccaccacgttctgcgtaattcaaactctttgtccaccagaaacgatatttgaatggaacaatacctcgaacgtaaatccctgggaaccagaattattgaaccagttgatccaaagatacgaagaacctaattcaaacaatcgttgggattctccgcttttcgctattctcactccacaggacaatataaccgagtgtattgatgatctctacaaagtagtcttccaaacttccaaatcggccaaaaacagcggacacaatgacccattgaataaaggcctacagaaaccaaactccgcaaccgtgctaaaacccgcatctcaatccaatttcattcaagtcctcgatgtggaaaccaccaagataataaaagtgataatgaaccacattaaaagtctgacctcgattggcggggtgagcaacggtacaagagtcattgtttctgaaggtgtcacggacatcaatgacgacggatgctttttcgtggatctgcccatcggtaatgtcgtcactttggcgcaattgcagagattaaaaagacaattcatcaactttaatagactaagagatatagatcaagatagaataggcgtccttttcgcggactatctcaataagaacttaaattga

SEQ ID NO: 1540 - DNA, 1689 bp, Saccharomyces pastorianus
atgaccgcaaagacttttttactacaggcatcttctactcgtccccgcggtaatcacttcaaatgtgagagtagtaatattcctttagcccctgtaccgatcgcgccaagcacccatcatcaagcttacaacgcgcaagagctggaaaacgataacaattccatcggcaacaagaagaagaagaaatccggtttagtggtcagaacctccaagcattgggttttgcctcctaggccaaggcctggtagaaggtcttcttcccacaataccatcgcatctagcaaccctaatagcatcaacaacctaaatattgctgccaacagtaggaacaatagcaacaacggcaccgcttcgagcaagaggcaaccttccaaggaaaagaggaaaccaagacacgttcaaacaatcgatgaaaagttaataaatgactcaaattatttggcttttctgaaattcgatgatttagataatgaaaaattccagtcttccgcctcttctatttcatctccatcctattcttccccaactttttcaagttatagaaatagaaaaaaaacagaatatatggacgatgaaagttgcaccgatgtagaaactattgccgcccacaacggcttgctgtctaaaaatcacaacatagattccacttcaaacattcatccaccaccctcaaagaaatcaaaactaaacgacttcgacttactctctttatcttccacctcttcatcggctactccagttccgcaattgacaaaagatttaaacctaaatctgaatttccacaagactcctcacaaatcttcgttccctgaatctccttcagacttttccccttcggattcagtttccctgattagaaaccattccttacccaccaatttgcaaataaaggacaaaatcaatgatttgaacgagattaaattcttcaacgattttgagaaactagaattcttcaataagtacgctaaagccaacacaaacaatggcatgaatgaaaacaatgatctttggaactcatatttgcaatcagtggaaaaccacaacagcacgaaccataccgaagggcaacaagaagacaatgacgacaatatgtccttattgaatttgcccatcccagaagaacccgtttcctctgaacaagacattaaggccaaagaaaatgatgaagacatttggaattatctaccaagttcaagcacgcagcaagattcgttacaacttttgaacaaaaactgtaattccaataaagaaaactcacaaaccgattatgaagagaatttcctgttcattcaagaccagaatgaaaacacatcaaagccacaccatgatgagttgagttcggaaatcacgttggctgatagcaagttttcttacttgccgcccactttagaagaattgatggaagaacaagacggtaataataataggtctttcaagaacttcatgttttctaatgatagcgggatgacatgttcaaacatcgacagcaataccactacaaacaacaatgatgatgactatacaaaagtactaaaatctaaaaaaattgctacctccaagtcgaacgtgaatctctatgacttaaacgagaacaacaatggtgccactgctactaacgagttcgaccaaaacagcttcattgatgacctcgatgaagacgttgattttctaaaggttcaagttttctaa

SEQ ID NO: 1541 - DNA, 1356 bp, Saccharomyces pastorianus
atgctaaggacgagacctttcaattggggtcttttgaggccctattttacatcatcactttgtaaggtgcccagagcacctccagataaagttttggggctgtctgaacatttcaagaaagacaaaaatattcataaaattgatttgaccgtagggatatataaagacgcttggggcaaagttactacttttccctctgtagcaaaagcccaaaaattaatcgattctcatttggagctgaataaaaatttatcatatctaccgataactggatctaaagagtttcaagaaaatgttatgaatttcctattcaaggaatcatgtcctcaatttggtccgttctacttggcacacgatcgaatcagctttgttcaaactctaagtggtactggtgccctagctgtagcagctaagtttttagcactgttcatatcaaaggatatttggatacctgatccgtcttgggcaaatcacaaaaacatcttccaaaacaacggttttgaaaatattcatcggtactcctactataaggacggccaaatagatattgacggatggatcaagcaactgaagactctggcacataaccagaaaaaagaaaatgataaacagttacattgcatcattctgcatgcatgctgtcataacccaactggccttgacccaacaaaggaacaatggaaagaaatcatagacacgatatatgaactaaaaatggtacctattgtcgatatggcttatcaaggtttagagtccggtgatatgctaaaggacgcgtatttgatgaggttgtgcctagatgtagatagatatccaaattggagtaatggtgtttttctttgtcaatcatttgccaagaacatggggctttatggtgaaagggttggatccttaagtgttatcacacccgccactgccgatgacgaaaacttaaatcctttacaacgggggaactcattgcagcagaacattgattcacaattaaaacagatagttagaggtatgtattcctctccaccaggttatggttcccgtgtggttaacgtggttttgtcaaataccaagttgaagcatcaatggttcaaagacgtagagtttatggctcagaggttgcattacgtcagaaaagagatgtttgaacgtcttcgctggccagatctaataaactttgcacaacagcacggtatgttttactatacaaggtttaacccaagacaagttgaagttttgaagaataaattttccgtctatttaacaggtgacggtagattgtcacttagcggagtcaatgattcaaatattgactacttgtgtgaagctctcgacgctgtttcaaaaatgagcgaaattgcataa

SEQ ID NO: 1542 - DNA, 2154 bp, Saccharomyces pastorianus
atgtgtggtatctttggttattgtaactatctggttgaaaggtccagaggtgaaatcatcgacactttggtggacggtctacaaagactggagtatagaggctatgactccaccggtattgctatcgatggtgacgaagttgactctactttgatttataagcaaatcggtaaagtcagtgctttgaaagaagaaatagctagggaaaagccaaacagggatgtcacttttgtctctcattgcggcattgcccatactagatgggccacccacggccaacctgagaaaatcaactgtcatcctcaaagatctgatccggagagccaatttgtgattgttcataatggtatcatcacaaattttagagaactgaagacccttttacttaataaagggtacaagttcgaaagtgacactgatactgaatgtatcgctaaattatatttgcacttgtataacacaaacttacaaaatggtcatgatttggatttccatgaattaaccaagttggttcttttggaactagaaggttcgtatgggttattatgcaaatcctgtcactatccaaatgaagttattgccaccagaaaagggtctcctttattaatcggtgtcaaatctgacaaaaaactaaaggttgattttgtggacgtggaatttcctgaagacaacgctggtcaaccagaaactcccttgagatcaaataacagaccatttggtttgggtccaaagaaagctcgtgaatttgaagctggttcccaaaacggcaatttactaccaattgctgccaacgaattcaatttaagacattcccaatccagagctttcctatcagaagacggctctccaactccagtggagtttttcgtgtcttcagatgcggcatctgttgtcaaacataccaagaaggtcttgttcttagaggatgatgaccttgctcatatctatgatggtgaattacatatccatagatcaagaagagaagtgggcgcatccatgacaagatccattcaaactttagaaatggaactagctcaaatcatgaaaggtccttacgaccattttatgcaaaaggaaatttatgaacaacctgaatctacattcaacactatgagaggtagaattgacttcgataacaataaggtaatattaggtggtctaaaggcctggctgccagttgttagaagagcgcgtagactaattatgattgcctgcggtacttcttatcattcatgtttggccactcgtgctatctttgaagagttgtcagatatcccagttagtgtggaattagcatcagatttcttggatagaaaatgtccagtctttagagacgatgtaggtgtctttgtttcacagagtggtgaaactgctgatactatgttggctttgaattactgtctagaaagaggggccttgactgtagggatagttaacagtgttggttcttcaatttctcgtgtcactcactgtggtgttcatatcaatgccggcccagaaattggtgttgcctctaccaaagcttacacttctcagtatattgccttggtaatgtttgctttgtcattgtcagatgaccgtgtatcaaaggtagacagaagaatcgaaattattcaaggtttgaagatgattcctggacaaatcaaacaagtgttgaatttggaaccaagaataaaagagctatgtgccactgaattgaaagatcaaaaatctttattattgttaggcagaggctaccaatttgctgccgccttagagggtgctttgaagatcaaagagatttcttatatgcattctgaaggtgtcttggctggtgaattgaaacatggtgttttggccctggtcgatgaaaacttaccaatcattgcatttggtaccagagattctttgttccccaaggtcgtttcctccatcgaacaagtcactgcaagaaagggccatccaattattatttgtaacgaaaatgatgaagtatgggctgaaaaatccaaaaccatcaaacttcaaaccttggaggttccacaaactgtcgactgtctgcaaggcctagtcaatattattcccctgcaactaatgtcatattggttggctgttaacaaaggtattgacgttgactttccaagaaacttggccaaatccgttactgtcgaatag

SEQ ID NO: 1543 - DNA, 300 bp, Saccharomyces pastorianus
atgcaattctctactgtcgtttccgtcgctttcgtcgccttggccaactttgttgccgctgaatctgctgccgccatctctcaaattactgatggtcaaatccaagctaccactgctaccaccactgctccatccaccactgccgctccatccaccactgctgctccatcttcttcccacgttgaaaccgtttctgcttccagcactgaaaccatttctcaacaaactgaaaatggtgctgctaaggccgctgtcggtatgggtgccggtgctctagctgccgctgctatgttgttgtaa

SEQ ID NO: 1544 - DNA, 747 bp, Saccharomyces pastorianus
atgagattttctactgctttatctgtcgctttgttagccttggccaagatggtcgccgccgactctgaagaattcggtttgctaagtatccgttctggttccgacttacaatacttgagtgtttacagtgacaacggcgctttgaagctaggtggtggtagcaactctttaagcgctactgtcaccgatgacggtaagttgaaatttgacgacggcaaatacgctgttgtcagtgacgatggttccctaaaggaaggttccgaaagcgacgctactacaggcttctccatcaaaaacagctacttgaactacaagacttcctctgggttctatgctgtcaaagatggttcctcttacatattctcttccaagcaatctagcgacgctactggtattgccatcagacctaccagcaaaaccggttcagtcgttccagacttttctccaagtgattctaattcctccacctccaccacagaatctgcttctacttctgcttcttcttcttccgcttctgaatccaccaaggtttctacaactgtttccaccaccgaatccaccaaggcttccacctccacatccgcttccactgctagttctggcgctgcttctgtcatctctcaaattaccgatggtcaaatccaagctccaaaaaccgtttctcaacaaactgaaaatggtgccgtcaaggctgccgtcggaatgggtgctggtgctttagctgctgccgccgctatgctgctataa

SEQ ID NO: 1545 - DNA, 942 bp, Saccharomyces pastorianus
atggttgagtatccttataaagtgcaaacgaaaacgccggaactgcagtatgagaccttcgatggtgccaagttcgggtacatgctttggcccgtccagaatggcactaacgaggtcaaaggtagaatcttgctagtccatgggtttggcgagtacacaaaaattcaattccgtcttatggaccacttgtccctcaatgggtacgagtcattcacgtttgaccaaagaggcgcaggtgttacatcgccgggcaaattgaggggtgtaacaaacgagtaccaagtgttcaatgaccttgaacattttgtggagaaaaacttgagcgagtgtaaagccaagggcatccccttattcatgtggggacactccatggggggcggtatctgcttaaactatgcgtgccaaggtaagcacaagaacgaaataagcgggtacattggttcagggccgttaataatcttacatccgcacactatgtacagcaagccaacccaaatagccgcccccttactggctaagttcctgcccaaagtgaggattgacactggtttagacttgaacggtatgacgtccgataaagcgtaccgcgatttcttgggtagcgaccctatgtctgttccaatgtacgggtcattcaggcagatccacgactttatgcaacgtggtgccaagctgtacaagaaccagaataactatgtccagaagaactttgccaaaaataaacccgtcattgtcatgcacggcgaagacgatactatcaacgaccccaaggggtccaagaaattcattcaggattgtccctctgacgacaaggaactgaagctctacccaggtgcaagacactccattttctcgctagagacagacgaaaacttcaacactgtgttcaatgacttgaagcagtggctggaccaacacaccgcatccgaggctaaaccataa

SEQ ID NO: 1546 - DNA, 1026 bp, Saccharomyces pastorianus
atgaggatggacaagccaacagatagaccacaatctgtaagagaaacgaatgctgactattctgggattccggtggacgatatggactgtttgaactttttcgaaagaggtgtccaggacccatgctgcgaggcctgtgacactgaagacgcagatgatgaactgagggcaaagcttaacagttttaatttcaagtcggattccactccttgtagtgggaaatgtcaacacacactaaaccccctgtgcaaaatcgatgaaattcaaccggccaacttggacttggctccttcgagaaacggttcggtatctgacgcaaattcagatgcgaattctattgcatcctctatccatgactctagagaccccaaatacggagctatgcccgggttgaggaaggccaaaactacttcgtactttacctcctcttcctcctcctccaataacaccacgatgagaaactcactaaaaaagtgtaatacaaacataaatggtcttttggcgaatggaagaaattccagctcttcaagacaatctataccagagctttttaatggcgcatattccaaaatgaagggcaatacattaatgaagaacgataccccccgtttggatttatcatccaattcacttgaacattccaatacaagatcgttctcgctacctaggtcaagatcgagatcctccgccatagcgataccaactcatctgtatggcctggagaagtacgtttctcctgaattggacactttaactgccgatcctgaagtcggcgctggaaattttttaagcgcaaggcagcgtgcgaattcatcctcttcttcaaacactacaggggacaccaatccaccctcaccaaattcaaataattcatcaatgctcaatttccctctaggtgcaaatacgaatcaatgtaatttattaagacagcagcagcaacaacagcagtttgcaaaatcaagctttggtgctggaagaaaaaaatctttcatcgaaatgtcattggcaaattcatttgcaggatag

SEQ ID NO: 1547 - DNA, 1323 bp, Saccharomyces pastorianus
atgaacatgaatggcaatgatgactatgattcccaaatatcgatcttgatggatatgtttccaactgtttctggatccatattacaagagcatttactcaaaaataataatgacctagaattagcaatatgcctgctactaaaggagaacgacgaagtggctactaccgataatgagctacatcaactatacgatatgtttcctcacattgattgcgatattataaaggaccaatttacagccaatgagatgtctgtggaattgactatttctgatcttttaaattatgaaatcttacaaaagcttaaagaagaccaaaccccctcccatgacagcgtacagcaggatggaacaaaaaacaactggaagctaacaaacgatcacatacagactataataaaatttactgacgctcccaaaaatattgcacagaaatactttgtcgaaaatagctttgactcaataagcgctgttatcaagattgtattagattactatgataaagatcattttacacaaactccaaccactgtcaactcaaaaataagactcactgctcctgtgaaaggcggtcgagttcagtcatcaatgggactcgcacatgtgttaaaacaaggggaaaagtcgacaaaagaaagtggagaaaatatcaaaagggtgaaaacttacgagcactcatcgagtagcccccaaatgattgaattaaatgaaatgattgaaggaaaccatgacctgaaagccataaaccatgaattcctgcaaaaatgcttgcaattttacgatggagatataatgaaagtattagacctatcctccttactgataaaagatgacaaaagtatcaccaagacttggaattttgacggaggctttactttgacatcgcaagataactgtaagcaacattcaagtaagccctcaacgccaccgaattcccacaaaaactgtgtaaaaaaatcacccttccaaaataaggaaactcatgaagaagccgtcgcaattataaacaatcttttccaaacataccgattagatttccacggctttctacctaacgaggcggtttcaatcttgaagcttgcattaaacaaatggtggtctaaggagttcacagaacgagagctaaactctcataatatcaatgcttatggctctaaagtacaattcgtgagcccgttagttgtagttactggtagaggtatccatagtgtcggcgggatctcgaaagttcgactgcaagttaaaaattttttggataagaaccactacgtcttttgggaagagtcttctttttttagagtcgagggtaagaagaggaaataa

SEQ ID NO: 1548 - DNA, 1647 bp, Saccharomyces pastorianus
atggactacatgaacctgggactgaggtcccgtaaaactggtattgatgttaaacaaaacatacccaaggatgaatacagtatggagaatattgatgattttttcaaagatgatgaaactagtcttatcagtatgaggagaaaaagcagaagaaaatcatcactgtttttaccgtcatcattaaacaacaacaccgataacgtattaccgccattcctacagtcataccgacctcaagaaaaggaagctgctcagaatccatccagtaatgacggctcaagaagatcctctttgttaagtcatcagtccagttttcaaagcccagctaatgaatttgaaccgattcaggaggatccagaggaagaagaaaaaggcagcagaagcaatgggattggaacgccaaaaaccaacaatttaagcaagcctagttttaaaagaaaatattctacccattatgaccttgatatttcggaagacccctccgtgaggttgactcccgataggataactaataaaaacttgtactcagacgttcctgacttggttgctgatgaagatgatgacgataggggaaacacttctttaaacacatctgataatgcgttattagaagatgagttagaagatgacgggtttgtacctgaaagtgaagaggacagagactatattggaagtgattcttccctggattccagctcggattccccaagtgatgttaatggtgatgatacttaccaagaagtagaagaggaggctcaagtgagtgaaaatgataatgaagatgactatataaaacgacaagcgaccgatgtggttcgaacagactcaataatcgatagaaacggactgcgaaaatccacgagggttaaagtcgcacctttgcaatattggagaaacgagaaaatagtgtacaagagaaaatccagcaaacctgttctcgatatagacaaaattgtcacatatgatgaatcggaagacgaagaggaaatcctggcagctcaaagaaagaaaagacagaaaaagaaacctacacaaactaggccatacaattatgtgcctacaggaagaccaagaggtagaccgaagaagaatccaaatacaacagaaaaccccgttccagaagatcccaatgaggagattatagaaaggatagaatccggaggtatagaaaacggagaatggctgagacacgggatactagaggctaatgtgaaaatcagtgacaatattgaggagatgaaggacgaaatcatcgcatttgcacctaacttatcacaagctgaacaagtaaaagatacaaaggatgagaatttttcccttgagataatgtttgacaaacataaagagcattttgcaagtgggatattaaagttgccagccatatctggacagaaaaaattaagtaactcatttagaacttatatcacattccatgtgatacaagggatcgttgaagttactgtatgtaagaataaattcttgagtgtcaaaggttctacttttcagataccagcattcaatgaatatgccattgtcaataagggaaacgatgaagccagaatgttcttcgtgcaggtgaccatttcgcaagacactaatgatgataatgataaagatctagaaaccactttcgacactttcgggtga

SEQ ID NO: 1549 - DNA, 672 bp, Saccharomyces pastorianus
atgaccgcttcagaccaacaggggaaatgtcctgtcgacgaggaaaccaggcagctgtggctgcgagaacacactaaagaatcagttccgggggccacggtcccgcccagtgagctggagtgttctgcaaacccgcaactgaacgataaggaccctcagtatgttaccgacgtggggttgtcgcagtccagagaggtctccaccattccaagaaccgactccgataaaaactggatatacccttcggaaaagcaattctacgaggccatgatgaagaaaaactgggacccgaactcaaacgatatgaaggtcgtcgtgccactgcacaactccatcaacgagcgggtctggaattacatcagaagctgggaggacaagcaaggtggcgaagcgtgcggcggtatcaaactgtctaatttcaaaggcgattccaaaaaacttacgccaagagcttggtttagatcgcgtatcttacatctggccaagccatttgatagacatgactggcaaattgacagatgtggcaagactatagattacgtgatcgacttttattcaaacgaccaaaatgcccccgagcagcagcagccacttatttatctggacgtcagaccgaaactgaacagttttgaaggctttaggctgaggttttggaaatatctgggcttttga

SEQ ID NO: 1550 - DNA, 1005 bp, Saccharomyces pastorianus
atgttatccagagtagccagacgtgccttctcctcgacagttgccaacccttataaagtcaccgttttgggtgcaggtggtggtattgggcagccattgtcgctgcttctaaagctgaatcacaaagtcaccgacttgagactgtacgacttgaaaggtgctaagggtgttgccacagacttgtcgcatatcccaaccaactccgtcgtcaaggggttttctccagaagagccggacggattgagcaatgctttgaaggacacagacatggtgctgatccccgccggtgtgcccagaaagccaggtatgacacgtgacgatttgttcgccatcaatgcaagcatcgtgcacgacttggcagttgccgccgcggaatccgctcccaacgccgccatcttggtcatctccaacccggttaactccaccgtacctattgtcgcccaggtcttgaagagcaagggtgtatacaaccccaaaaagctgttcggtgtgaccaccttggactccatcagagcctccagattcatctccgaagtggaacacaccgaccccactcaggaaagagtcaacgtcattggtggtcactcaggtatcaccatcatcccattgatctcccagactacccataagttgatgtccgacgacaagaagcaagagctgatccacaggatacagtttggtggggacgaagtcgtcaaggccaagaacggtgctggttccgccaccctgtccatggcgcacgctggtgctaagttcgccaacgccgtgttgtcgggcttcaagggcgaaagagacgtcatcgaaccctcatttgtagactctcctctattcaagtccgaaggcatcgacttcttcgcatctccggtcaccttgggcccagacggtatcgagaagattcatcctattggcgaactttcctctcaagaagaagaaatgctagagaaatgcaaagaaactctaaagaagaacatcgaaaagggtgtgagctttgtcgctagtaaatag

SEQ ID NO: 1551 - DNA, 345 bp, Saccharomyces pastorianus
atgcccgacgtcaccatacatggcaagacagtggatgatcaatctcggtgtgttcactggcatctgccgaacgacgtaatagccatcaaattcaagtgctgtgccacatactttgcctgtttcgagtgccaccaagaattaagttcccattccttgcagaagtacgatcttcacgacgatactgatgaaaagttgatcgtgtgtggagtttgccgtcatgagatgacattcgcggaataccataacgctcaactcgtctgccccaattgccaatctcccttcaatccaggttgcaaactacactaccacttgtacttccataatccgccttcgatgacttgttga

SEQ ID NO: 1552 - DNA, 771 bp, Saccharomyces pastorianus
atgagcagttcatcaaacacaacttacttcattatcggtggtaaccgtggaattggttttaacttagtcaaaacgttgagtgcctctacagacaatgttgttatagcttcttttcgtggattaccttcgttgcccaagaataaacagttggaagatttgaagaaaagtagagacaatattcatactgtgcagcttgacattaccgacgacgaaagtgtcaataaaattgcagatgaaattaggaaaacaccatcattccagggcattgatatttttattgcaaactctgggatctcgaattcctactatgaggtcttaaaggccccaaaaagggtttggattgaccattacacgaccaacgctttaggaccaatattgactcttcagaaggtgtaccctttgcttcttttgaaaaagactaggaaattatttttcatttccagcctcgcaggatccatcactggttatgtaccaatttctgtttctgcttacggtcagtcgaaagctgccttgaattttgccataaaggaactaagttttgaattgaaacctgagggcttcactgttgttgcgttccaccctggtatggtaaccactgatatgggtcaacagggtttaggtagttttgcgaaaaaaggcacagatatcagctctttaaaggttattacgcccgaggaaagcgcttccgcattagttaatgtttttagcaaaatatcacctgaacataatggaaagttcatggattatgatggcagtgaggatactttttga

SEQ ID NO: 1553 - DNA, 543 bp, Saccharomyces pastorianus
atgggttcatctagcgggttccatcatgccgatcacgccaactatgcgtcaatcttaagtaaggaagaaacccttgaacaactcttattatcgtacgaggcactatctgacgatcaaaccaattgggtttgtaatttgtctaatgcctcgtctttgatttggcatgcgtacaagtcgttgggtgtcaatgtgaattgggccgggttttacgttagtcatggaaatgaaaaggatacattgatactgggcccgtttcaagggaaggttgcctgtcaaacgattcaatttggtaaaggtgtttgcgggactgcagcctcaaaaaaagagacacaagttgtccatgatgttaacaaatatcccggtcatatcgcgtgcgatggagaaactaagagtgagatcgttgtcccgatcatatccaatgatggtattacattggctgttattgatattgattgtttagattacaaggggtttgatgaagtagacaaaaaatttttggaaaggctcggtaatctaataaataaatcatgcacttttaaatag

SEQ ID NO: 1554 - DNA, 462 bp, Saccharomyces pastorianus
atgtccagccaaactgaaagaacttttattgcagttaagccagatggtgttcaaagaggtttagtctctcaaattttatctcgttttgaaaaaagaggttataagttggttgctatcaaattagtccaagctgacgacaaattactagagcaacattatgctgaacacgttggtaaaccatttttcccaaaaatggcttctttcatgaaatctggcccaatcttggctactgtatgggaaggtaaagatgtggtcaagcaaggtaggtccattcttggtgccactaacccattggccagtgctccgggcaccatcagaggtgacttcggtgttgatctaggcagaaacgtttgtcatggtagtgattctgttgaaagcgctgaacgtgaaattaacttatggttcaagaaggaagatttaattagttgggaatccaaccaagcaaaatggctttatgaatga

SEQ ID NO: 1555 - DNA, 621 bp, Saccharomyces pastorianus
atgagtttatattttacagctttattcctaatgctcaccgttgagatggtgatgctcttcattttcgttttgcctctgccattccggatccgtagaggtatttttagcagctataaccaattgacggctaagcagcagataaaaaccgtaattgtcataatgggcggtcttgttgggctgttgtttatcgattcgtggaagaggtcacaaatccgcgtttcattataccataacgataacagcggttcaatggggtcatctgctgtcaccccaatacaggccttggcatcaagagcttacaaccaaaggaacatgtacatttctgggttcatattgtatttctctatttgcatcccaacggtcatgtctattgtcaagagattggtgaaatatcagggattgatcaacgagcaaaaaaagcagaagttgaccaaaacttctccaagaaccgagaaagttccaaagcaggccgactctactaaattggaagaacaactaaagaaaaagcaaatttctttggaaggcttgcaaaagcaagtcaagaacttggagaaatacttcgacgaaaaaaaccaaccaggcaacttggccgccgctgaagctgctaagaagggaaactaa

SEQ ID NO: 1556 - DNA, 528 bp, Saccharomyces pastorianus
atgcaaggtgatatcagaagaaaaaaagatctcttgcctcgttataaaacggggagcaaatacaattccagaagaaagggcgggtttttgactactccaatgaaaaagatcgtattgtatatgttacttttgtgcggtgtttattatgttatacaactcgcctattctgacctaaataaggaaactgaaatcgtgttggaaggtcacacttctgatactcctactaccggtaatgaacataataatggtgctatgatgggtgcatcggacccaaatagcaataagcaacagcagcagcagcagcagcagcagcagcaggtcaaagtacccaaggagaaattcaataatgaagttgcaaagcaacaagaagtaaaaaacttggaaaacgatcttaagcctcaggtcgactcagaaaagcagaagcaaataaacaaggacaagaaagaacaaaagcagcagctacaaaaggaaaaacaagatatcgccaaagagaagttggctaatagtaacgaaatacttgataattaa

SEQ ID NO: 1557 - DNA, 1950 bp, Saccharomyces pastorianus
  modified_base (724)..(771): a, c, g, t, unknown, or other
atgctagcttttggtcctaaaaacggtcttattccatcggagaaagattttccccgtcacactattagcaagaaacaagaagatccgtccatgttaaccgggtcgactgggttggtggatccagtgttgaacacgaccaatggctctgtttcttcttcctctaatgacacttctgctaacaatagtatatcctctccagaatacacattcggccagttctcgatggattctcctcatagaacagatgtcactaataccccattcctaacaacaactactaatactaccgctaataatagtttgatgaatctaaaggatactgccgctttgcccatgaattggaaatggaaaaactctaataacatgcaattcttgaatggaattgaaaacgaaagcggtaatgacaacggtaataaagatggcgacgataaggtgtgtctttcgatagctaccccgcatgctctcaatgaagaattgaagaatttggaacagctggagaaggtgttctcgccgatgagctcagcgaataatagcaatttcaaagaaaacattgagctatctccacaccaacatacgacatctcccaaggctaaaacccttgaggcagaaccttctatatattccaattttttcttagatgctaagttcccgaacaactccaacgtttcagcagaatcgaacgacaactactatagcttggatgacgcaaataacaacagcagcnnnnnnnnnnnnnnnnnnnnnnnnnnnnnnnnnnnnnnnnnnnnnnnncagtcgattttggaagactttgtatcttcagaagaggcgttaaagttgatgcctgacactagttccgacacaaggcgatacagcgaggtggtcacttcttcgtttccttccatgacggattccagaaattccatttctcattcaatagaattttggaatttaaaccataaaaattacaataacaggaaatccactcaacaaatcattcctgaggacactactacggaaagacgtgactcgaccatttcaccaactacgacggcaaacaatcccgatccgaccttcaaactgctagatcataacgtttctcaagttctcaatggttatagcatggatttttctaaagacgctggcgttacaaagccaaaaaacacatccttctcttcaaaccgtatctataataacggtaacaataagaaaaaccaacgggcttctttgcccttgattcatgacatcgaatcctttgcaaatgatacagtaatgaccaaccctctttcttactcagcttcattcttctcagaggaaaatgatgatgatatgtttgccaaagtaaactataacagtttagatgccgctgcaatgtcgacctacgatcgtgacgcagatccttttaacattattaagtctcctactcaagatcagcaatttatcaaaccttcgatgatgctgtccgacaacgcctcagctgctgctaaattggcaacctctggtgtagataatctcaacactgcaccagctttccaaagaaaaagctatgacatttcgatgaatccctcgttcaaactaattcctaataatcatattcatcatgctgctcatcatcaacagcaatctacgaaacaagcgtctgtaagcccaaacctaagaagaagaaagtcgtcgagcatcactttaagtccaactatctctcacaataacaacaatggtaagattccagttcaaccacgtaaaaggaaatccattgctaccattgaccaaaacaactacgataaaaacaagccctttaactgcaaagactgtgagaaggcatttagacgcagcgaacacttgaaaaggcatatcagatccgttcattcggctgaacgtccttttgcttgcatgttctgtgagaaaaaattcagtagaagtgacaacttatcacaacacttaaaaactcacaagaagcacggcgatttttag

SEQ ID NO: 1558 - DNA, 342 bp, Saccharomyces pastorianus
atgggtgaacaaaacaacttatactatcacgtcgagaaactggtgaattgtttgcaagaggatttcgatttagattgcgctcaaggtgtatctctcttcactagtaaatctagaagaaatgaagcttggcttgaagaattggacaacaagttcaaagtaaaggataacgttgagctcgatgatgtggaaaatttaaaagctgaaattgacgcaaaattggacacactggaagttaaggtagactattatgaaaaacttttcaaagagttggaagagtttcaaaatgaaatgaaaatcaaaactgttgttaataagagaagacaatcgcaggttccaaaatag

SEQ ID NO: 1559 - DNA, 1080 bp, Saccharomyces pastorianus
atgggtgttgaacaaattttaaagagaaagaccggtgtcatcgttggtgaagatgtctacaacttattcacttacgctaagcaacacaagttcgctattccagctattaacgttacctcttcttctactgccgtcgctgctttagaagctgctagagacgctaagtccccaatcattttgcaaacctctaacggtggtgccgcttacttcgctggtaaaggtgtctctaacgagggtcaaaatgcctccatcaagggttctattgctgctgcccactacatcagatccattgctccagcttacggtatcccagttgtcttacactctgaccattgtgctaagaaattgttgccatggttcgatggtatgttagaagccgatgaagcttacttcaagttgcacggtgaaccattgttctcttcccacatgttggatttgtctgaagaatccgatgaagaaaacattggtacttgtgtcaagtacttcaagaagatggccgctatgggtcaatggttagaaatggaaatcggtatcaccggtggtgaagaagatggtgtcaacaacgaaaatgctgacaaggatgacttatacaccaagccagaacaagtttacaacgtctacaaggctttgcaaccaatctctccaaacttctccattgctgctgctttcggtaactgtcacggtttgtacgctggtgacatcgctttgagaccagaaatcttagctgaccaccaaaagtacaccaaggaacaaactggttccaaggacgacaagccattattcttggtcttccacggtggttccggttctaccgtccaagaattccacactggtattgacaacggtgttgtcaaggtcaacttggacactgactgtcaatacgcttacttgatcggtatcagagactacgtcttgaacaagaaggactacataatgtccccagtcggtaacccagaaggcccagaaaagccaaacaagaagtacttcgacccaagagtctgggttagagaaggtgaaaagaccatgtccgctaagatctccaagtctttggaaactttccgtactgtcaacactttataa

SEQ ID NO: 1560 - DNA, 369 bp, Saccharomyces pastorianus
atggcagtacccgggtattacgaactatatcgtagaagtactatagggaatagtttggtggatgctctagatactctaattagtgatgggaggatagaagcttcattggctatgcgtgtcctagagaagtttgacaaggttgtggcagaaacattgaaggataacacccaatccaagctgacggtaaagggtaatcttgacacatatgggttttgtgatgatgtttggactttcattgtgaaaaattgtcaggttactgttgaggacagtaatcatgatgcttcccagaacgggtctggagacagccagagtgttatttccgtcgacaagttgaggatcgtcgcatgcaactcaaagaagagcgaatag

SEQ ID NO: 1561 - DNA, 504 bp, Saccharomyces pastorianus
atgattatttacaaggatatcttctctaacgacgaattgttgtctgatgcttacgacgccaagttggtagatgacgttatctacgaagctgactgtgctatggtcaatgtcggtaatgataacatcgatatcggtgctaacccatctgctgacggtggtgaagacgatgttgaagaaggtgctgaaatggtcaacaacgttgtccactctttccgtttacaacaaaccgccttcgacaagaagtccttcttgacctacattaagggttacatgaaggctgttaaggctaagttgcaagaatctaacccagacgaaatttccaagttcgaaaaaggtgctcaaacctacgtcaagaaggttattggttctttcaaggactgggaattcttcactggtgaatccatggacccagatgccatgatcgtcatgttgaactaccgtgaagatggtactactccatttgttgccatctggaagcacggtatcgtagaagaaaagatctaa

SEQ ID NO: 1562 - DNA, 261 bp, Saccharomyces pastorianus
atggggaatataatgtcagccagtttcgcacccgaatgtaccgatttgaaaacgaaatacgacagctgttttaatgaatggtacagcgagaagttcctgaaggggaaatctgttgagaacgaatgctccaaacagtgggatgcctacacgacctgtgtcaacgctgcactcgtcaagcaaggtatcaaaccagccctagatgaggccagagacgaagcgccatttgaaaacggcggcaaactaaaagacgttgacaaataa

SEQ ID NO: 1563 - DNA, 1350 bp, Saccharomyces pastorianus
atgctcgtgaacaaattcgtagggttactgagcgtactctttgcgacaaggtttacgaatgctgtcgaattagatttagacaactaccagcctttacaaaatgctacgtcactggtcgcttacggtttaatggattattacaccggtaatcaatatgggaaaacagtcggtatgttctctgatccatactattggtgggaagccggtggtgcatggggctgcatgttggactactggttctacatggagaacgatacttataatgacgaaattacagctgctatgatacatcaggccggtgacgacaatgactacattccactgaatcaatctactactgaaggtaatgatgatcaagccttttggggtattgctgccatgactgccgctgaaaggaatttcaccaatcctccttcagatcaaccccaatggttatatttggcacaagccgtcttcaatacaatggctttgcgttgggatgcagactcttgtggtggtggtttgagatggcagattttcgtttggaactctggttatgactacaaaaacaccgtttccaatggtgctttgttccacatcgctgcaagattggcaagatatacaggtaaccaaacttatgtcgattgggccgaaaaagtttacgaatggatggttggtgtcgacttaatttccaatggtacctataagtatgtttacgatggtgttagtattggtgacaactgtactaaagtcacctcgtaccaatggacttacaaccaagggttactattggccggttcggcttacctgtacaactacaccggatcagatctctggcacacaagaacaaaggagtttttgaacgcctcccaagtgtttttccatgacggtatagtgtacgaagctgcttgtcaaggtccaaattcttgtaatacagatcaacgttctttcaaagcttactttgcccgtttcttaggtgccactgcacaactggtgccagaaactagaaatcaaattatgtcctggttaaacacatccgcaattgctgccgctaagtcatgttctggtggtattgatggtcacacctgtgggctgaattggtttaatggtacgtgggatagtatgtacggtttaggtgaacaaatggccgctttagaagtcatggtcaacacaagggccttagatagacctgctccgtatactgcagaagatggcggttcgtctgttggtgatggggcagctggtacccaagcacagcctacaaatttgtctcctttaaatatcacgaagggttccaaggcgggtgcaggtatcattactgctgtcattggtatttcaatcgtcgcatgtgctttatggctggtcttttga

SEQ ID NO: 1564 - DNA, 1107 bp, Saccharomyces pastorianus
atgtaccatgttcctgaaatgaggctgcattaccccttggtgagcccccaatctaccgctgcaactgttcccaccagaaattacgataatattcttccttcgttcaacgaactatctcatcaaaacacgatcaatcttcctttcgtccagcgtgaagccgcggacgcatatacaaacgttgctcctgtaacggcatcatcatctcagactgaatcgggctattactgccgttactacgctttccctctgcctccctactcacagcaccctcagtctcaataccaacaggctgtgcttccttacgctaccattccaggcaataacttcccaccatcgtctttccccatgatgaccatggtgccatcagaagttcagtctgaaagatcttttttaaaccctttgcacgctcatactgatctgcccccaatcatccaaaactccaatgatatccaaatcacgccccaaaacagtgctaagtcaatgacgaccacgatggcggcaaccaaaaaaattcctggacttcgttccaccgtagttcttaaaccgcgtgtgattacaacaatgtgggaagacgaaagtaccatctgctatcaagtcgaggcgaacggcatatctgtcgtgcgcagggcggataacgatatgattaacggtacaaagttactgaacgtcacgaagatgacgaggggaagaagagacggcatactaagatcggaaaagattagagaagtcgtaaagatcggctctatgcacctcaaaggtgtttggattcctttcgaaagagcgtatatcctggctcagcgtgaacaaattctggaccatttatacccactttttgttaaggacatagaatccattgttgataccaacaaacgcaataacaaaaaatcttcttccccagaacttaaccctggaaattatcattctgttaagcaagaatcatccgaaaacaaggacaaactttatactgaagttaagcatgagggcgttagagccctctcgaatgaagtgtcttcccagaatgtgggaggaacggataactcaaagaacattgatatcgacagtgaggcccaaaacagaacaagcagagccaaaaatgaaataacctaa

SEQ ID NO: 1565 - DNA, 1101 bp, Saccharomyces pastorianus
atgaacggatctcccacacctaagcgatattcatccaaatcttcaagactctacgacgactattacaatatcccatatcaatattccaacccaattccaatgaatagagactacaacgacataggttcacgcatgaatgccgataagctcgtgccagaggagtacaaacggaacacagaatttatcaacaaagctgtgcaacaaaacaaagagctgaacttcaaactgagagaaaagcaaaacgagatatttgagctcaagaagatagctgaaactctacgctcgaaattggaaaaatacgtcgatataaccaaaaggctcgaagaccaaaacctcaatctacaaataaaggcaaacgatttggaaaagaaactttctgaggccaacgtgattatcaaagatagacgctactccaatatcaaagagccagtggttgatgaaaatgtcatttctcaggactacgatcaaataaatgtacctaaaaacagacctccagatgcaggaatcaatccccgctcaaacaacaaggcctataatggttcggaacaagataataggctaaaagcgattgaaaaaactctttcagtccttacagattacgtcatgaggacagaagagaataataatgatagagcatccttgccatctcctttgaatacgatgtcgccaataaataatcgtttgaattttcaagaagcaaaaaaatacaaccccacgctcaaatcaaatccatcggatgatgacattatgatgtatgagagcgcagaattaaagcgtgttgaagaacaaatagaagagttaaagaggaaaatactggtaagaaaaaaacatgatttaaggaaactgtctctaaataaccagcttcaagaactacaaaatattatggatggcgatgaaaacgtaaaagaagacaatccatcgaaacacaacaaggcgcaccacagtacgcatcatcatccttcacattcccatcgggattattcaccatcttctaatgcttgcttagagtgttctgccaatgagctgtacgagagaaacaaaggtaagtcagagaataatttatctgagacgtttgcaactcccactcctaacaaccgataa

SEQ ID NO: 1566 - DNA, 675 bp, Saccharomyces pastorianus
atggattatatcaagaaggcaatttgggggcctgatcctaaggaacaacagaggcggatcaagtcggtactaaggaaaaatggccgaagtatagaaaagtcgttgcgagagctagcagtcttgcagaataagacccagcagcttatcaagaaatccgcaaagaagaatgacatcaggacagttcgattgtatgccaaagaactataccaaatcaataaacagtatgatagaatgtacacctccaaagcacagttagactctgttcgaatgaagatagatgaagcgatcaggatgaatgtgttatctaatcaaatggcggatagcgcaggcttgatgagggaagtcaattccctagtgaggcttcctcagttgaggaatacaatgatcgaactagaaaaggaattgatgaaatcaggtattataagtgaaatggttgatgacaccatggagagtgttggtgacacagaggtcgaaatggacgaggccgttgatgaagaagttaataagattgttgaacaatatacaaacgagaaattcaagaatgtcgatcatgttccaacggcagacttaccaacgaatgacgaagaaaaagagataccggacgaaagagtcgatgaagaagcagatagaatggtaaatgaaatgcgtgaaaggctcaaggcgttacaaaactaa

SEQ ID NO: 1567 - DNA, 3585 bp, Saccharomyces pastorianus
atgagtgagctgaatactgtttcgacgaactccagtgattccgccaaaaacggtggtatgtcaaatagtcccgaggatatggactctgcagctgctgccagtcatgctataaagaaaagaacaaaggcttctcgcgcttgcgatcaatgtcgtaaaaagaaaatcaaatgtgactacaaggatgaaaggggactctgctcaaactgtcaaagaaatggagaccgttgcagttttgaaagggttcctttaaaaagagggccctcaaaaggttatacgaggagttctagtcattcaagacctaacgaaatacaagagtataataacgctaaatcatataatacagtggaaagtaataacagcacgaacaataataacggtcccaatagcaataccgtcccgagtaccccttcgagatcaaattcagttcttttacctcctctgacacaatatattccccaagctaacggcgtgcctcccagtttcccaaacactgcaatccaacctactatgcctgctggcaatcttggtcagcagcagttttggaaagtgccttaccacgaatttcaacatcagagaaagggttctattgactctttgcagagtgatatatcggtgagaactttgaacccgaacgagcagttgtcttataatactgtacaacagtcccccataacaaaaacgactcatgattctggcaatgcgcacggaagtatcacaggctcaggcagtgcctctggtagcggtggttactggtcctttataagaacgtctggtttattagctcctactgatgatcacaatgaggaacaaacaagaagatcaagctctataccttctttgttacgaaatacttcaaactcgcttttattgggtggccagcctcaactaccgccccctcaacagccgtcacagtcgcaatcacaatcacaaccacaatcacaatcacaatcacaatcacaatcgcaaccgcaactgcaactgcaactacaactacaaccacaaccacagccgccgcagcaacaacaacaacaaaaattgcagcaagggcagaatttgtattcatattctcaattttctcaacagcagccatacaatccatcgatatcatccttcggccaattcgctgcgaatggattccattctaggcaaggatcagtggctagcgaggcaatgtcccccagtgcgcctgctatgtttgccagcgcatctacaaacccaacgagtaacgtacagcaagcacaaagacctcaggagcaacaagggcaacaattttcgtccgagtcagatgctaatagaagacgacaatcagccccagtatcagtaacgttgtccgcggttaggctgaacgggaatgaaaacaacgatcgtaatatgaataacaatgctggtagcaacagtaataataacagtggttcttctaaagacatatctcaaaattctcaagaatctacgaccacaacgccagtagctctagaggcgacgagccctgggtctacttcccacagaggtacaaagaaacgtagaaaaagttatgtgtctaagaaaccaaagccaaagagggactcgtctatttccatatcatcgaggggctcatcacacccaatatcttcttcttctactatcgtatatggacaaatttccgatgttgatctgattgatgcttattatgaattcatacacgcaggattcccaataatacctttgaataaaacaactctgacgaatgatttgttgttggtgaacactcagccaatttctaatatccacgaagtaaactcttacgttattttgtggtttagaaactcgttagaactattggttcgtgtggctttgaaacaaaaacagggcgggagattttttgataatatagtgggtatgcccctatcgcctggaaacgataataataagcctggctttaccaccgctgtggtaagagatgatgctgagaaaacaagaaacgactcaaataatgaagtacaggagactttagaagtacaaagtgttttcattgcggctttgaacgagtgtttccaaaaaatcgtggatatccatcccaaattcagagaaaacaacgaacaaatctcgcccaagatcaaagttatctacttatctactttcattcttttgaattacatcttggcgtttgttggttacgataactcatttgtgctgggaatgtccgtgacaattttcaacgaattcaaactatataaattgatattgttccccgggacagatatcgatgagacgagggcagccgttggtggtgaggctatcacggagaatggaagcacgaacccctcagaatttgaaattggatccggaagtgctggacatataaatccatccaactcgccaaattccatggacgaagacatgaatcactactctgtgctattcaaaagactgtacattttactttcagtttttgattctttgcaaagttgcgcatttggtggacccaaactgttaaacatctccatccagggctccacggaaagatttttctccaatgaattaggttccaaatggtgcctggagcaaagccaattgagattgaaatgcgtcttgcgaagtttgaaactgggtgaattattaagtgaattggccagaaacagaatatcaatgaatgtggttagcaagcccggtttcgacatcgccaaattgtccttccttctatccgagtttgtgggaaatcaacccgtatcggtggcgcaattgttttgtaagctgttgattgggaagcacaacttcatcaattgcttattgtcgttgcatgatgccgaaacaggcgtttactcggaactaacattggaactgagttcgaaactggcagactccttatgttcattgatatcgataatcctgcaaatactaacactgattttaaggttgaaccccacaaacagcatcgacttcaattatagaccacccaacccgcccacgacggaccccaccgtgcaagagacatcgccgacaggagccggaaacactggcgctacgacgccatctgagggaaacccagatttttacaaaaagctactgggcctgaagcaagacagcgagaccatcctctccgacctgtgccggggagttatctcgccttttgcaattgccatactgcacgagatctacaacatcactgagctggttaagcagatgccaacgtcgctgattagcataatgatgaccgccaccaccacacagaacagccaggataccaagaagtctcaaggcctagtaatgaagctgtccaactccatgaacgaggtggtgcagatcaccagcgtgttgacgatgatcaagccgttcaagattttcgagcacgagctgaacaagcccgtggcgtcacacacgggggtgctttccccctcgtccagaacagacgtcctgtgggccagatcgggccaaagcatccgcgagacgcccgtgatgaaggcattgttcggcgaaggccaggcctcgagtacacagaccccagctactgctgcaccggcggagtccaggctcgagaacgtggccctcgagaacttcgtcagtatcggctggaaacttctagacgattccgagctgggctggtactga

SEQ ID NO: 1568 - DNA, 1500 bp, Saccharomyces pastorianus
atgtctactaagaagcataccaagacacattccacctatgcattcgagagcaacacaaacagtgtggccgcctcgcaaatgagaaacgcgttaaacaagttggcggactccagcaaggtccaggacgctgaccgcaccagatttgagagcgaactggattcgttttttactcttttcaggagatatctggtggaaaagtcctccagaaccactttggagtgggacaagatcaattcacccaacccagaacaggtggtcaagtacgaaatcatttctcagcagccggaaaacgtctctaacctggccaaactggccgtattaaaactgaacggtgggctgggtacctccatgggttgtgtcggacccaaatctgttattgaagtgagagagggaaacacatttttggacctgtccgttcgtcaaatcgaatatttgaacaggcaatacgacagtgacgttccattgttgttgatgaactctttcaacactgacaaggacaccgaacatttgatcaagaagtactccgccaacaggatcagaatcagatctttcaaccaatccaggttcccaagagtctacaaggactccttgttgccagtccccaccgaatacgactctcctctcgacgcctggtacccaccgggccacggtgatttgttcgagtccctgcatgcctctggtgaactagacgctttgattgctcaaggcagagaagtgcttttcgtttctaatggtgacaacttgggtgccactgtcgacttaaagatcttaaatcacatgatcgagaccggcgccgagtatataatggaattaaccgataagaccagagcagatgtcaaaggtggtactttgatctcctatgacggacaagtccgtttattggaagtcgcccaagtcccaaaggagcacattgacgaatttaaaaacataagaaaattcacgaatttcaacacgaataacctgtggattaacttgaaagccgtcaaaaagttgatcgagtcaagtaatttggaaatggaaattattccaaaccaaaaaaccataaccagagacggtcacgaaattaatgtcttacaactggaaaccgcttgtggtgccgctatcagacatttcgaaggtgctcacggtgttgtcgttccaagatcaagattcttacccgtcaagacctgttccgatttgttgttagtcaagtcagatctgttccgtttggaacatggttctttgaaactagatccatcccgtttcggtccaaacccattaatcaagttgggctctcatttcaaaaaagtatctggctttaacgcaagaatccctcacatcccgaagattgttgaactagaccacttgaccattaccggtaacgtcttcttaggtaagggcgtcaccttgaggggcactgtcattattgtttgctcagacggtcacaaaatagatattccaaacggttccatattagaaaacgtcgttgttactggtaatttgcaaatcttggagcattga

SEQ ID NO: 1569 - DNA, 2277 bp, Saccharomyces pastorianus
atggaaattgatggcaacaccttagtgttcataatagtgattcttttcctattcttctccacacccggtggtgacggagtgtcctcacagtacgagtttaaccagctacaaagattgaagcaacagttccaaacagaacataatgtgttcctcaatatgacacatacggataatttccgaaatatcactggtttcaaattaagctatcaagatacgttgaacaaccctttgcagaatgctacttatccactaccagggaaggaatatgaccgatggttgcccaaccagaactacatggtaatgcctaatgaagtcatagatactataaactctcaagtctggaatacttcgaatggtgacacctcaaatattttcccccctaatattacaagcacgctgttgggaaagatcaacgttgtgtcaaatagcaagtacgaaaggataagaatgcctatacccagattttatgaacctgcaaacgatttctcggaagatattcctcctgagggagaaacatactggtcagattggccctcttacggcgagcttcataacgtgacttttcaacatggtgagattgctattcaaatcactcatatgaacaaccttcagaatagcaacaattacttcaggagaaatttcataaataaggaaaatgatcgttggaaattattgaatctacaaatcgatttttcagataaaaccgaaaaggaaaagcactccatttcatcaaaggcggtctacgatatccaacgtggtagaattttatccatctcccaaagttctaaatttcattcattatttgcacttccccactacatgtctttacaggatgaatatgatgaagatatgttcaatgatgtcaaacagcttgtcgatgaattctggaatttcacggattacacggatgttatgaccatgaatgatgtacaggatgcatacaatagtgctaatcttaaatgtgaatacatgacttttcttcaattagaaccttggaatcaatataccaaggaccaaattaaattgatagatgatgaattgaactggccattggggcgtcctgtgaacctttctagtctacctcctataaatgtcgtttctgggatattatattctcctgattgtggtcttagattggcaattcatgatgtaaagggtaaacgatatgaactaaaaatcatgtcgattagaacgcacttaatgtttggtattgcgttattcgcagctcaaatatatttattgctgactcaaatgcatcaaacaaacacgccttccatggtcaataaaatttcgttttattgcttctcaatgatcaatttagtcgacggttccctagctacgttatattttgtggctgctagcgttgtccctgaattgtacttgcccttggtgataagtgcattttcatgttttatccttgcatccatattcgaaatacgttacttgatatcgatttatgcttcacaagttaacgaacaaaacgtcgggatagctaatttgttgcgtggtaataccggcacatatgatgagaataggccaaggcctgcatttatccctgatgaaggttccatcggcggctcactatatggtagatttttctttacgttaatcattttcacctttttgatattgagttcaacatcatggccccgtcagttgagaatgatatttgagtatatccttattttcatcttaaactcctactggattccccaaattttccgtaacgctgttaagggtatcccttctagaagagagagaacaagagctaccaacggaggaaatagaaatcaaaataagatgcctttattatggagttttgtgataggtacaacaataattagaagtttaccggtcatatatgttttcacttattcttcaaacgtctttaggcatcataaagatgttcgttttgttgtatttctatcgctgtggctactgttccaaatcagtattttgtattctcaagacatattgggatcgcgctggttcttacctcaacacacgattcccgaaggatattcgtatttcaagccactttcgaaccagtatattttagagcatggtggtgggaccgttcaaaacactgttgactgtgcgatatgtatgtcagatgttccaatctatattgaagaaattccagaaactcatatagtggaccaacatacttatatggtgacaccctgtaaccacgttttccatacttcatgtttggaaaattggatgagttataagttacaatgtcctgtgtgtaggtcaccgttgcctcccttgtag

SEQ ID NO: 1570 - DNA, 1833 bp, Saccharomyces pastorianus
atgaacaccggaatctcgcccaaacaggacgacggctccaactccaacctgctcaacatcggccaggaccattcgctgcagtaccaggccctcgaccacaacgacccgcagtatagagacgcgtcccaccagacccctcatcagtacttgaaccagtttcaagcacaaccccaacaaccccaacaacaacagcagcaacatcagcagcagcagcagcagcatcagcagcatcaacaacaacaggcgcagtaccaagcgcaatatcagcagtcgccgcaacaacagcagaatgtgtatttccctgctcctccgcaatcgctgagacagcctacttcgcagtcacaacagtcgcagcaacaacagcagcagcaacagcaacagcaacagtatgcggtttcgaactcgaactcgaactcgaattcgaactcaaacaacaacgtcaatgttaactcaatgcctcaggatttcggctacatgcagcaaaatgtttctggccaaaactaccaaacaataaatccgcagcaattctccgagttgtataactccttcttgagccatttgacccagaagcaaacaaacccacctgccgcaggctcgaattcctctgccagcaacaacaacaacaacaacattaatagcaacaacaaccccagcagcggtaacaacagcaccagcagcaatcctgcccaactggctgcttctcatttgaacccggccactgctgccgccgccgccaacaacgccaacagcgcagcttctttcttgacccagcctccccaagtgcagagatactacacgaacaacgtgaacacgctctctaatcttttggatccagcctccgcctccgcccaagacaaccccaactccgccgcccacctcggcctgttgccgcccaacttgccacctcagctgtctcaacaccaacagcagctacaacaacaacagctgcaattgcaacaacaacaacagctgcagttgcaacagcagcagcaactgcaaatgcaacagcaacagcaacatcaacaccaactccaacagcagcagcaccaacagcagcagcaccaacagcagcagcaacaacatccagtggtgaagaaactatcttccacccagagcagaatcgaaagaagaaaacagttgaagaagcaaggcccaaaaagaccctcttctgcttacttcttgttctcaatgtctataagaaacgagttgctgcaacagttccctgaagcgaaagtgcccgaactgtccaagttggcctcagccagatggaaggaactgaccgatgaccaaaagaaaccgttctacgaagagttcagaaccaactgggagaagtacagggtcgtcagagacgagtacgaaaagactctaccaccaaagagaccctccggtcctttcattcaattcacccaggaaatcagacccacagtcgtcaaggaaaacccggacaagggtctgatcgaaatcaccaagataatcggtgaaaaatggcgcgaactggatcctgccaagaaggccgaatacacggaaacctacaagaaaagattaaaggaatgggaaagttgttatcccgacgaaaacgacccgagcggcaacacaacccctcacccactaaagaccatgaacatgaatttgaatatggacactaaaataatggaaaaccatgacagcatcgttaacgaccccgtcgcgggcagcaatggcaacaccaccggctcaaacacccccgtgtcatcgtcgatgtcattgcaacagcagccactccaacagcaacaacagcaacacatgctcttggctgaccccactgcaaatggttcgatcataaaaaatgaataa

SEQ ID NO: 1571 - DNA, 2013 bp, Saccharomyces pastorianus
atgcttagaaccaaactgtccgtttcgatcgctgcgagatcccagttagcaagatctttgacagcgtcaaggacgtcgtcattgagaatatggtccgctcaacaacagccgcgtttgtattcttccaacacaagaccaaacaaggccaccacaacaagggaaaacaccttccaaaaaccatacaatgaccaagaagtgaccaagacaccagtcgggtcgcacgccagaaagatcttcgaggccccacacccaaaagccacccgtttgaccgtggagggtgccattgaatgccccctagagagcttccaactactaaactcccccttgtacaacaagggttctgcattcacacaagaggaaagggaagcgttcaacctggaggcattgctgccaccacaggtaaattctctagatgagcaactggagagaagttacaagcagttatgctacttgaaaacacccttggccaagaacgactttatgacgtcattgagggtacagaacaaagtgctgtattttgcattaatcagaaagcatatcaaggagctagtccccatcatatacacccccactgaaggtgacgccattgcggcctattcgcaccggttcagaaaaccagaaggtgtgtttttggacatcaccgaaccggactccatcgaacgcagactggccacttacggtggagacaaggacgtagactacatcgtcgtgtccgactcagagggtatcctgggaatcggtgaccaaggtatcggtggtgtgcgtattgccatctccaagctggcgttgatgacgctgtgcggtggtatccaccctggccgtgtgctgcccgtgtgtctggacgtaggcacaaacaacaaaaagctggcccgcgatgagttgtacatgggtaacaagtttgccagaatcagaggcaagcaatacgacgacttcttggaaaaattcatccaagccgtgaaaaaagtctacccaagcgcggtcctgcatttcgaagatttcggtgtcaagaacgcaagaagactactggaaaaatacagatacgaattgccatccttcaacgacgacattcaaggtacgggtgccgtggtcatggcctcgctaatcgccgctttgaagcacaccaacagagacctaaaggacatcagagtcttagtgtacggcgccggctccgcaggactcggtatcgcggaccagatcgtaaaccacatggtaacgcacggcgttgccaaggaagacgcgcgcaagaagatcttcctaatggacagacgtgggttgatcctgcaatcctacgaagcaaactcgacccctgcacaaaacgccttcgccaaaagcgacgcggaatgggcaggcgtcaacaccaagtcgctacacgacgtggtgcaaaacgtcaagcccacatgtctggtgggctgctccacccaggcgggcgccttcactcaagacgtagtggaggagatgcacaagcacaaccctagacccatcatcttcccgctatctaacccaacaagactacacgaggccgttccagcggatctaatgaaatggaccgataataacgccttggtggccacggggtcacccttcccggccgtcgatggataccgtatctcagagaacaataactgttactccttcccgggaattggtcttggtgccgtgctttcgcgcgccaccatcattacggacaagatgatttctgctgcagtggaccaactggccgaattgtcaccactgagagagggtgactccaggccggggctgttgcccggcctggacaccatcaccaacacctcggcccgtctagccaccgcagtgatcctgcaggcgctagaagagggcacagcccgcatcgaacaggagcaggtgcccggcggtgttcccggtgagacggtcaaggtgcctcgtgactttgacgagtgtttgcaatgggtcaaggcgcagatgtgggagcctatgtacaggcccatgatcaaggtgcagcacgatccctcggtgcataccaaccagttgtag

SEQ ID NO: 1572 - DNA, 1470 bp, Saccharomyces pastorianus
atggatagacctatagatgacattgtaaaaagtcttttgaagtttgtcgtcagagggttttatggcggctcctttgtactcgtactcgacgctatactgtttcactctgtactagctgaagatgacttgaagcagcttttgagcataaataagacggaattgggtccactcattgccagactaaggtccgataggctaatatccatacataagcaaagagaatacccgcccaactccaaaagtgtggaaagagtctattattatgtaaaatacccccatgctattgacgccatcaagtggaaagtccatcaagtggtacagagactgaaggatgacttagacaaaaattcagaaccaaacggttacatgtgctctatttgtgagaccaagtacacccaattagaggcggtacaattactaaattttgacaggacagaatttttatgttcgttatgtgatgaaccgttagtggaagatgattctggcaaaaaaaacaaagaaaagcaggataagctgaacaggctgatggaccaaatccaacccatcattgattctttgaaaaagattgatgactcgagaattgaagaaaacactttcgaaattgcattagctcgtttgatacctcctcaaaatcaatcccatgccgcttacacatacaatccaaaaaaaggcagcaccatgtttagacccggtgattctgccccattaccaaatcttatgggcactgctcttaacaacgatagcagtagacgtgcgggcgctaactctcaagctactctacacatcaatatcaccacagcaagtgacgaagtggctcaaagagagcttcaagaaagacaggctgaagagaaaagaaagcaaaacgccgttcccgaatggcacaaacaaagtaccatcggtaaatcagcccttggaagattggataatgaagaagaatttgatcctgcggtcactgcatctgccatggattccatgaatgcgaacaacgaatccgtgcaagaaaactcttaccaaactaataatagaattttgactgagcaagaaatggaagaaagagaaaacgaaaagactttgaatgattactatgctgcgttagcaaagaaacaagcaaagctaaacaaggaacaggaagaagaagaagaggaggaggaagaggaagaagacgtagaagaggatatggaagatgtaggagatgaagatgatgaagatgcggctgaaaacgcattcgaggatgagtttgaagatgtgactgatgcaactgatacagtcaaaacagaaccaaaagacagtaatttaaacagcgttaaacaaaaccccaatgacagcaatatcgaagaaaactcaaaaacatctgccgcttcaactgctgcagatacaaaggtggacgcagatgcagaagcaggcgcaaaatcaaatgctaatgacgatgatgacgatgatgagatggacattgaatttgaagacgtttag

SEQ ID NO: 1573 - DNA, 2046 bp, Saccharomyces pastorianus
atggaaaagatcaaccctgactgggcgaaggacatttcgtgcagaaatatcaccatatatggctattgcaaaaaggagaaagaaggttgccctttcaaacataacgataatgctaccactactactaccatcactaccgccactaacgacgtttcttctctcctagacgctagcgaagcggctaccccaaccatggcgtctgttcccaagttcaatgccaaggtttcggccagttttactccaatgacaattggcagtgattctttagccactgccagtaccaccacttccgctactacgagtactggtggtagcatcactgtagcagctacctccgccactactgttaactcaatggccagccccgtggtcgataacactttgcccagcaacaataacaacagtagcaacataagcatatcgatacctgccaccgcctcgagttccaattacgacccattcaatgcccccatttttaccccttcttccacttcttcgattcacaccagtacgaatgcaccttcgtacccattccctaccatgaccaattctggaggcataaatataaacgttaatgatgaaaacaatagcaacatgagcatgacaaacaacgtgccacctccaatgccaccgccccctatggagaataacgatctcaaatatccaagaatctatccgcctccacatagtcttttacaataccatctctatgcccctgagcaaccaccatcgttgaaatcgcttttaaaaccgaacgaaaggtctgctgaccaactattcatcccgaataatattagagaagacttgactaagaaaaacctttcgactctgcagattttcccctcatccggtaaggtcataccaagcgttgttcaagattatttcaacttagtcccactaaatttcaataataacgattttttaaataaaactacccttttcaaagtcttttccaattacgacggtaagccatacgttttaaagagactgcctaatattgataaatcgatgaatccaagcaaaatatccaaaatttatcaaatatggtcaaaggtaaactgtaccaatctaataaaatttagagatattttccaaaccaccaaattcggtgacctatctatctgtttgatatttgattattatccgaattcattatctttgtacgattaccattttgtcaatttccccaaatttcccattacaatgaactatctatggacttacttagttcaattaaccaatgtgatgaattccatccattcgcaaaacttgaacattggaaatacattaaactggacgaaagttttaattactggtgacccaggtagaatcaaattgtcacattgcgactttatggactcgttgtttaatgaagatgttgactcagtagtgtcttccggcgggagtaccaaggaaagacaacaacaactggattacaagcacttgggacaactattattcaacttatcaatcaatactgataacttcaacaacaataacacgccaagagaatatcaaatagatgaaattactttacaatcaatcgacgatatgaaacagatagatgacaaattcaaagacgtgttgaagtatttattagctgatggcgatgtaaagaagagtgtccatgacctgaccagtcatttttatgataaaatgttcatggtcttggagtcatcacaaacttacacagaatacatagaatccgtcttatcaagagaactggaaaatggcaggttattcagactggtcaataaactaaattgtatctttggtagaatcgaatctagaatagacataaattggtccgaatcaggtacgaagttccccattatactattttacgactacgtatttcatcaagtggattcaaatgggaagccaataatggatttaacccatgtactaagatgcttgaacaaattagatgcaggtattcaagaaaaattaatgttagtcacgccggatgagttgaactgtattattatatcctacaaggagttaaaagacttgatagactccacttttagatctatcacccaatag

SEQ ID NO: 1574 - DNA, 615 bp, Saccharomyces pastorianus
atgaccgctgctacgaaaacaacaccggctttctcgccagaccaagtctctgtggtcttcgttctaggaggacccggtgcaggcaagggcactcagtgtgaaaaactggttaatgattattcgtttgtccacctagcagcaggcgacttgttgcgtgctgaacagaacagggaaggctccgaattcggtgaattgatcaaaaactacatcaaggaggggctgatcgttcctcaggagatcactctggcgctattacgtaacgccatttccgaaaacgtcaagaacaacagacacaaattcttgatcgacggattcccccggaagatggaccaagctatttcatttgaaagggacatcgttgaaagcaagttcatcctgttcttcgattgtcccgaagacgtcatgctccagaggctgttggaacgtggtaagactagtggcagaagtgacgacaacatcgagtccatcaagaagagattcaagactttcaaagacaccagcatgcccgttatcgagtacttcgaaaccaaatccaatgtcgtccgtattcgttgtgacaagcctgtcgacgacgtctataaggacgttcaagccgccattcgtgatagactatag

SEQ ID NO: 1575 - DNA, 819 bp, Saccharomyces pastorianus
atgaatcaggaagagttgctgggtttcctgctgaacgatagtggtaacagccagaaaaaatgcgtcgcggatgagcacgtctactccaattggttgaagaacggtagcgacgatcaaaatgcgtcccgtgagaggtcgcaggctgcagctgcagctgcagctgctccggcgcggaaggtgccggtagatgctatgcaagaggatgtggacgagctgttgagcggcctagaaggtatcatcggaagcgcagacgctctcagttcgaagactaagtcaaagggcaaaactaaaaaggctagatcaaaacctaagaaggagaacgtgcaggtcgacaaacagtctatgctgttcgagaccgaagatgctggcgaggagagcacccaagacgccaaagagccgtctgtgtcgccagatctcgagcgctcaaagaggaaagagaaaggaaggaaaaacgccaaggagctgtcgtacgatgaactgaaagataagctagagatcaccacccgcaaatcacgtctcgagtgcaaagatttgaagaaaaaattgaataggctggaaaggagaaacgtcgaacttgagcaacgcctggaagagttggcaattgaaaatcaaaccctgatacagattaacaaaaggctctcaaaagatgcggaccatgacgaagaggcttcgaaggaccagaaaagcaaggaaaaggaccggaaaagaagggaaaaaagaacagcaagaaggaaagaggaaaggaaacgagaaaagcacataataccggaagcaattccttcatcaaccgacacggatggacaacctatagaattctga

SEQ ID NO: 1576 - DNA, 3213 bp, Saccharomyces pastorianus
atgatgagtggcactggaaacgtttcctcgctggttcacagctacaacaacaacacacagcacaacgatggggcccaagacctggatctgttagagtcagagctgttggatatcgcactgctaaatcctgggtcgtctctgcaagatcctgccctactgtccatcaatccggacgaaatgactgctgctcacacccctgtaccgataaaggaagtagatcgggaactaagggatgacgtcccttccttgcagggcttactcgatcggcacatccagtttggtagaagactaccgctgaggacgccatacgccaacccgctggatttcatcaatattaatccgcagtcgctgccattggcattggaaatcatcgggttgcccaaggtctctagagtggagacccaaatgaagctggggtttcgcatcagaaatgcacatgaaagaaagaactactttattcatctaccctccgattgtattgcaaaggacaagttttttatccactcggacgatccgaccaatttgaccatacccaacaaggacatcaacgaaaggaccctcttcttggacgctttcctcttgtctgcatccaacagcagtaacaacaacttcaaacagacctatgtttgcaacagatgcatcaacagagaaaaaagaagagcttcgagaagaaagtccgggttgaatgacaattccatctggcaaagtaacgaaaataaaagagcaatcatattcaacagtaaacagatattcatcatcaataataacggctcgagcgatgacgccagtgccgttgatttcgatttaccaacccgaatcgtctgctattgcaggcaccataaggccactaacggatttgtgattttgttcctcttgaaagatcataatggcgatatcatggccaagaccataactgagcccattatgatcatggacaaaaagaacgccggcaacgtcactaccccaataagcaccagcaatgctcaaatatcgcccatgacaaacgacaataggtcgttttcatctccccaaagcgacgtaaatttcccaccagatttccccattgcttcgaataataaggaatttatcatttccacaaattgcatgcttaataataacaataatattaataccaatacctcaacgaccaacaataacagacatttcccatctccaaagtcttctagtgaagacagcaaccattcattttcagatattcatttttcaaacaacaaagactccaattttcaccgttcattggattcctggtcttccgcaggcttcaataactcgtcaaatcccgcgcttaccacgctcaccagtgatttcagtaccacttccacaagaaatacaggcaagagacagcattcaataaaggaacccttttcgtccgctccaaactcatttgcacgtctttctcaaaattttaccgattcatctactcacatttcgaaccacggcactattcccatgggcctcaataacaacccctccattcaacgtgtcatccccgcacaagggtctattaatggaggtattgaggttactctactaggttcgaagttcaagcaaggcctaatcatcaaatttggcgaaaacatagcactttctagccaatgctggaacgaatctacaatggtaacttacttaccaccatcgtcgaaaccgggacctgtattggtaactatcctcgacccgagtgaagcatccatgagaaacaatagcaacagtagtatttctacttgtaatagcggcaacgatatattacaatcgaataaatacaccggcggtaaagctattttcacttatgttgatgacactgacagacaactaattgaattggctttgcagatcgttggattgaaaatgaacggtaaactagaagatgcaagaagtattgctaaaagaattgtcggtagtgattcgccgtcatccagcaatgacacaaaatctgatgctcaaaatatttcgccaaattcgtactcgagtatgatggtggacatcaatgatgaacaactgatcattgaagttattaagtccttcaaacaaaataacaacatttccattaatctttccatgtgtgatgttagaggtagaactttactacatttagcggcatttaataactactatagccttgtctcattattggtcaaatatggttcgcgcttaaatgatcaagatatttttggttttactccgttacatatggcttgtattaatggggatttgagaattgtaagactactattggaatgtaacgtggatatcatgaagaaaacaaaaaacggctttattgccaaacaattctttttgatgaattacactgtcaataaagtaaaatactctgattatgaaactagtttgtttgacagtatcttaaccagattgaccccgaataccacaacgaactctaagaatgaaccattcgaaaggaattcatctcagtctagtttcaattctagtttatttgatgatgatgctgatagtcatgctcaacaaaaaagggagcatccaccagtcaactctgctgtttccatttctcatctatccggtttcaataatgatgcgtcatttgcagacatggatttagattcgggatatgacgtaagtgactgcgaatcctcttcagatgaaattgccctagagtttttcaatacccataaaatcaaggacgcctcattcaaacaaaatcaacaacgacaaaccacggaaactaacacagaaaacgacgggtctttatggaacaggatgctgactcgtctaaatgacgaactacccaagtatgaagatctcttccctaaaaaatccaaaaattgggaacttggtagtaagtctgtcgaaatcgggctacacgacaacaccattcaagagagcatggatgattcccaaacctcttctgaagaagatgagttggaagctttacaaattggatttaattcaatcttctccaagaagcaaaatttccagaatgataaaatgctgctatttttttggatcccattgactttggtattattattatgttttacactgtcaaacttagggaaagatgacgacatgttccacaacctgtctaaagtcgtccaggaatacttgagaatcggattagcaaacattttattaggcaatgaaagaatgaaagcctctttcaaaatgaaattatcgaactttcaaaacaataacattctaaatgacatgcgagccagttga

SEQ ID NO: 1577 - DNA, 951 bp, Saccharomyces pastorianus
atgcaagagtacgactattcagacatcacgccgttgcccatccagacaggcctgcaggatgaactgtgccagatcatgtacacagatgagtacaagcagttgatggggctggcaagggccatgctcagcgccaacgaactgtctccaagggccctacagttgacgtctcggatcatcgatgtcgcgccagctttctacaccatgtggaactacaggttcaacatcatcaggcataacgtggccggatgcgacgacgccgtctcgtacttaaacaaagagctggactggttggacgaggtcactttgaacaacccaaagaactaccagatatggtcttatagacagtctcttctaaaattgcatccctctccctctttcaaaagagaactgccagttttaaagctcatgatcgatgacgactccaagaactaccacgtttggtcgtacaggaagtggtgctgtctgttcttcagcgatttccaacacgaacttgcgtacaccaacgatctcatcgatgcagacatctacaacaacagcgcatggactcacagaatgttctactggacgaatgccaaacgcgtggcctcagaagtggagctggctgacgagctgcaattcgtcttggacaagatacaactggtcccacagaacataagttcgtggacgtatttgcgcgggttccaagaactcgcccatgatgctggtcaatggaacgacaaattggtccagttcgccacatcgttcattgggaacgttttctcactgccggtcaattcaccacaggatctacccgaaattgagtcctcgtatgctctggagttcttggcacaccgttggagcgtggactcatcgactcgagagaacgccataagagcctacaacttgcttgcaactaagtacgatcccatcaggaagaacttgtggcaacataagctaaaaaatctgaactga

SEQ ID NO: 1578 - DNA, 300 bp, Saccharomyces pastorianus
atgttaggaatgataagatgggtgctcgaaggaacgttggtggcgatgcttctatcggcaataagaagagagaccggaatgatattcttttacaaccactatcagctgggcgggtggatacataaatatatgtcctggggggagatgtgttattcaaggacgctaaaaatggtaaaaggttctagtcttttcagaaagcagttgaacgaggacggatttggacgtatcaatgacaatggcataaaacgaaggggaagagatcagccccagtctggcagtaggttcgtggagttagattaa

SEQ ID NO: 1579 - DNA, 990 bp, Saccharomyces pastorianus
atgactaccatgccgattagcaaacccaatttgctaaaattcaaacacgtcaagagcttccaaccacaagaaaaggactacggtccggttacttcattgaatttcgatgataatggccagtttttactgacttcatcctccaacgatacaatgcagctatacagtgccacaaattgcaaattcctggatacaattgcctccaagaaatacggctgccattctgctatttttacacacgcccagaacgaatgtatctattcatccacaatgaagaattttgatattaaatatcttaatctagagacaaatcaatatttgagatatttttccggccacggtgccctagtgaatgatttgaagatgaacccaatcaacgatactttcctgtcgtcatcatatgatgaatctgtaagactttgggacttgaaaatttcgaaaccacaagtcattataccaagtctcgtaccaaattgcattgcatatgacccaagtggtctcgtctttgcattggggaacccagagaattttgagattggcctgtacaatttgaaaaaagtccaagagggaccgtttttgataatcaagatcagtgattcaacttttaatcaatggaacaaactagagttctccaacaacggaaaatatttactcgtcgggtcctcaatgggtaaacacttaatctttgatgcattcactggccaacaattattcgaactaataggaacaaaggccttccccatgagagagtttctggattccggatcagcttgctttaccccagacggtgaatttgttctcgggacagactacgaaggcaagattgccatctggaaccattctgactcgatcagtaacaaaactttaaaaccacaagggttcataccctgtgtttcccatgagacttgccccaggtcaattgcattcaaccccaaatactccatgttcgttaccgcggatgaaacagtggatttttacgtttatgacgaatga

SEQ ID NO: 1580 - DNA, 2052 bp, Saccharomyces pastorianus
atgaacaaggaattggcatccacattcttatcgagtatcaaccatgaacgcgaacaagacattcaaataacttctcgactgttgacaacgctgtctattcaacaattggtgcaaaacggcctggcaataaataatatacatctagaaaacataaggtctggccttattggtaaactgtacatggaactagggcccaacttagaaatcaatgacaaaatcagaagaggcgacatcaagataggcgacattgttctgatacgacccgccaagaccaagaccgagacaaaggccaaggccaaaaaggcaactgaagactccagtgaggaccaagcggaatgttcaggtgtcatttacaaaatgaatgacacccaaatcaccatagctttggaagagtctcaagaagtcgttgccaccacgttctactcctatagcaaactttacattttgaagaccactaatacaatcacgtataagagaatggaatctactatgcgaaagctatctgagttcagttcaccagtacaagacaaaattgtgcagtatttagtgaatgagcgtccttttattcctagctctagccaagtccaaaatgtaaaggatttcataaacccgaatttgaatgattctcagaaaactgccatcaattttgccatcgacaatgacttgaccatcatacacggtcctcccggcacgggtaaaacgtttaccttggttgaattgattcaacaactgttaatcaaatatcccgaaaagagaatcctgatctgtggaccttccaatatttccgtggatactattctggaaagattaacacctcttgtttctaataacttactactaagaattggtcatcctgcaaggttattagattccaataaaagacattctctcgatatactcagtaagcagaactctattgtaaaggatatttctcaagagattgataacttgattcaagaaaataaaaaactgaagaactataaacagcgtaaggacaattggaatgaaattaaattactacgcaaagatttgaaaaaaagagaatttaagactatcaaagatttgattatccaatctaggatagtggttaccactttacatggctcatcatcgagggagctgtgctccctttatagagatgacccaaacttcaaacttttcgatacattaatcatcgacgaagtgtcacaagccatggagccacagtgctggattccactaattgcccaccaaaaccaatttcacaagttaattcttgctggtgataataaacaattaccgcccacaatcaaaactgaagacgaccgaaaagttattcacaatttagaaaccacactgtttgatagattaatcaagctttttcctaagagggaaatggtcaaatttctaaacgttcagtacagaatgaataaaaatatcatggaattcccatcacggtcaatgtatcacggccagttattagccgatgaaaccgtggcaaaccgacttttaatagatttacccatcgttgacgctactccatccgatgatgataatgacgttgacacgaaatttcccctcatttggtatgacactcaaggtgatgagttccccgaaactgcagacgacgcgaccattctcgggtccaagtataatgaaggtgaaatttctattgtgaaggagcatattgaaaatttgagatctttaaacgtcccacaagattccatcggtgttatttcaccatacaatgcacaggtttcacatttaaaaaaacagattcatgatgaactgaaattaaccgatattgaaatatctacagtggacggattccaaggccgtgaaaaggacgttattatcctaagtttagtccgtagcaacgaaaaatttgaggttggtttcttgaaggaagaaagaagactaaacgtcgccatgacaagacccaggagacaattggttgtcgtgggcaacatggaagcgctacaaagatgtggtaacaaatatttaaagaactggtcggaatggtgtgaagaaaacgctgacgtaagataccctaacattgatgattatttataa

SEQ ID NO: 1581 - DNA, 525 bp, Saccharomyces pastorianus
atgtctttggccaaatctgctgctaacaaacttgactgggcaaaagtcatctcttctttacgtataacagggtccacagccactcaattgtccagtttcaagaagagaaacgacgaggcacgtaggcaattattagagttacaaagtcaacccaccgaggtagacttcggccattataaatccgtattgaaaaatagccaagtcatcgacaaaatagagtcctacgtgaaacagtaccagccggtcaaaatcaatgcttctaaacaattacaagtgattgagtccttcgaaaaacacgcaatgaccaacgccaaggaaaccgaatccctagtctcccaggagttgaaggatttgaagagcactttagataacattcaatcagcaagaccattcgatgaactaactgttgaagatttggtaaagatcaagcctgaaatcgatgcgaaggtcgaagaaatggtcaagaaaggtaaatgggacgttcctggttataaagagaaattcggtagtttgaatgtgatgtaa

SEQ ID NO: 1582 - DNA, 2997 bp, Saccharomyces pastorianus
atggtgacggaccaacaaaacaggcatccgatactatctaagcaagcagcctacgttcacaagcaacggcaaagaaagcaaccgagatcagctgtcgcgtgtctttcttgtaggaaacgtcatattaagtgtcccggcggtaatccatgccagaaatgcattacgagcagcgccatatgcgaatatttggagccgtcaaagaagatcgtcgtgtcgacaaagtatctgcaacaactgcagaacgacctgaacgacaagactagagagaataatcgcctaaaggatttgcttttggaaaaaacgatcagtggcaatggcgacagccacagccacagccaaagcgctgatgagcgcccgaatgaaccgccaataagcgactcgttagaagtatctagcgctccgcctgcccctatattcgaccttatgtccaatagcaacactacatcggataatgacgatgacggaaatcgcaacggcaacgataacggcaataatgccggaggtagcaacaaagcgactttttctttgttcagtaatagaaattacgatcacagtttggaaaaatattacaacaagtccatcagtatccttgcgccttcaaccaatgccaatagcggcaataacgatggaggcggtgatgacgatgacaatgacgatgaagaaatatcgacgaatttcgcccaaagaagcgggagactcatagaatctcataacgggttccattattttgttgggtcttcttcgatgaccttatttggactggagattcaatctctagtcacaaagtatgtttccgttaaaaatttcaaacctttaccaataaacgctaagaatgatattttgaactccaatttgaacccgactataaattcctttattaattcgaataattatcttttttcttccttcaattttctgaatcctatatcgaaaattgttaatttaaattcaatcaatgataatctttctccattgatgttcaaaatcgttttgaagaatgataatgacgatgatagcagtcagcaagacgaaatacattttcaattaccctcatataattatgcgaaactattaatagactgcttcataaactacaatgatggctgtttttactttttcaacgaaggcctggttaagtgtggtatcaacaaactatatttggaaaataaatggctatactacgataacgccaagagaatttttgacaatgaaaatgacccaattttacaagctatttggttttgtaaaatattactaatcttagcggtaggcgagatgtatctaggctctatcaataatgagatgttgaaaaactactctaaccagccaaaattacctggttcaaaattctttcaaatgggatccaaaattttcaattgtctgttctctagcgaaaggttagaaaatgtgactaaaaagggcggtattgaagtcttgctactatacgcgtttttcttacaagtggcagattatactttggcctcttatttttactttggtcaagctttgcgaagttgtttaatcttaggtttacatgtagactcacaaagtgatactttatctaggttcgaaattgagcatcatagaaggctttggtggaccgtttatatgttcgaaagaatgctcagttccaaagctggcttaccattaagttttactgattatacaatctccactgaattaccagcagatattgatgacgaaagtactcggtccaagaataatcattacgttttcagaaaggctgaattgatttcgaactgtgttacaatcgttaaaattaatgctcaaattttgagtaaactatatcaaaggcaacccgaaaccaacataatgataactttaaaagtcgttatcaagcaattgttacagtggagaaataatttatctgattttttacaagtcgattttactcaaaaggatgaagatttcagaatatcgagattgtcaacaaacatgttcacagaatattttcaaggtatcaacctggctatacggcctctattatttcatttcgcatctattcagttaaaaagattcaagacaagtaatacttttatcaacttgcaaaattattccaccacagtctcttctttgttaacttgttccttacatgcttcggttaatacagttagatctttatggagtctattgcaaaataatatgcttgccatgtttggctatatggacagagaatatctttttacttcttcttgcactttattattattcaatactgcctttggtgttcatgaacaaacgctatatcatttggatcattctttggaaatttttactcaaatgaggaacctagggaatatcccagcagggttaagaagagcgcaattacttaccttgatggctaatctggatttccatggtataatgaacgatttgattaccaaatacaatgacatcttgaaattcgattccttgaactgtgaaaatgataatggagcagataattacaacgaagtcaaaccacaaaacgaaaatgaaaaccacaacgaaaaaaacaataagcctagccatgatgatagttcaaatttgaactctgataaaacaaattcaagcacaagcttaatcaaaaccgaatccatgcctaatacggccagcatacttccagaaagtgctactaaatcagatacaaatgattatagtaacggaaatggacacgataatgataccaatatcaacaatgcagaaccttccactttcttcgatattataactgcaactttggaaaattcataccaaaccactttgactaaaaaagaatctcaagtaatggaaaaaaacatggatcaattagattctgtccacaacttaaatgatgacgacttacaacagttgttagaagatttggggaatatcgatcattccgatgaaaaactttggaaagaaatcaccgatcaagcaatgtggctaggtaataccatggatccaaccgcagcagcagggagtgaaattgactttacagattatttaggaccatga

SEQ ID NO: 1583 - DNA, 5298 bp, Saccharomyces pastorianus
atgagtagttatagtggagcctatgggtcccgcgatcagcgaaaagagaagtatactcaaggtaaagaattcgatgacggtactttagaaacactggaaggtataattactgcccttgaggacgaaacagtctcaaaggatttccaacccctcataatgttctttcaaaaagggtttgctgctcaatcggtacaggcttggtcatactatgctcaggtaaataaccatgggaggttttcgaaaacaactacactattaactagaactttacgggctttatcatctgacagtagtacactagctactggaagcggtcttattaaactaatactgacgggatataccaaagttctttatagagggttaactaacatgcgtgctcaattaaccaatcctattcttcgtttgctcaaacaaatagtcaacttcaacaacggccaacatctcgaggaatttgtgtcttatttcgatttttcactacctgtcttaccaagactgctaacaccaagcaagtctgagttagccgatggcaattcctctgcacccaagaacgattcaataagatttacgttcatcaaattctggttgacattgatttcaaaggcttcccccttcgtaagaaaagaacttttaacagaaaactttaagattatgagcaacttatttaagttcatgaataaggttgattctgacaagctttccgaacatatactgtcggtattcataaatgacatcttgaaagagaaatctttcaagaggactactaaaaccaaaatattaaacgagttagcagcctccaaaatccatcacttttattattcatcaaacggggacttggttaagaaaaccaatgagtttttcttaacttttggagcctcgaatgagtttagtgtggcttttcctgataattgtgtttggtttacgaattcagttactgatggggcctctcatggggcgctgataacggttaaccaagtagaatttcaagtgcacaataaacttttgtttaacactttacgtgttttcaagccatgggaggatattcagcagttgaatactctgattaaaatattggagaatgttccagaacttgtagcaccttacagcatctttttgactacaaatggtaaccacgaccctaagatgacttcctattggtttggtacaacattattactaaacaaaattattaacttaaagataccacaatttatggagagtgttgagagcaatattccaccctccacttccttagtcatagaaaatattttgccttctttactcactaaatcttcgttaacaaagtctttacagtctgaaacgccaatcataagacaattggcttgtcaattaatagtcttagcgttcaaaaaattagaaaaggtttctatactttatgataaaaagggctggaaaaatgaaaaggccattttactaaacaagtttcatactagaatacctgagttgccaatatttgtatccacattgaacaacgctttggccacaaataaagataataaaatcttaccattatccatatccgttatattcaattactatagcaaattattcccaaatttattctcaataaacttaccatcatcaaacctttatacagacatcatgcaaaagcctacaatttctggaatggaatttgctattctggacaactacttgcaatttcaagaatttaactccactcaaaccaaatggtggaactcaaattccaacggaaattctttattcactttattattaaaattagcctcttccaaaaacgcctctaatatggtagctaccagaatatctaacttgctagatgagttaacaagagcaagtgtcatcttcaatccaacactaatttcaccattaatggctttagtaaacagtctccagggtacttgtctccaggatttcgaagctgaaagcatgaagaagatttggaaatggtttgatgagactatatcccgtgtcatgaaaacaccatacaaatatgtcgattcggcaaaagaatataattacatttctcctttcatcatgggtctttcagaacaatggaaatacgttgataagaataatatttcagttctggttaacaaatggcttttactattcttaagaaatatgattttcattggagaaaatcatacaggaataattaagcttgttaaagacgctttcccggaaatcaatgagcatgatgcaaatctgtatttgaaattcgattcatttgaagaaaatatcaaagaactgaacaactcggattctttaatctctgcaatgaaggactcgtcattctttcaatatatttctttgcttccatctaaagctctgacaaatatttctagattaccagtgaacagattggacgcagctggaattctttttagggttcaactactggtaaaagacgattctatttcctatgataatcgctttgaaacgattgcttgtgaattagtaggcaaggttgccagttatatggtgactgatacagaatttccaatcatcaaagttttggaaaggtatttgaaatttgctttacccaagctaatcacagaaaaagaaaacagtttactgatggaaaagtcacggttgatctgcaacttaattggggcgatatgctttgaaacagggcaacaattagcaacattccaagagacaatacaaaagaccgtttttgatagtgaaaatattgaagaacgtgtcagctatgatggatcttatagtgaaaaatatattaatgctttactgaaaagtgtcagtgagtatttgggtacaccagtattaacttccttgctcatgtacggcattacacttgagttttcaagaaatattctgaaaaaggtacacaacgaaggaagaagtataggtatgtcccttgtgagaaatgtattgaacaaaactaagaacgaggactccactttagtcaaagaaattaatttttttctaaccaaactcttcgagacaaacaaagttgacgttgatgctatatctgcacccgaaggtgtactatcaccttcagaaactgcttccttcattgacagtgttgtttcgaatgatttgaattatccggtgttagaagctttttacaaatgtgaattcttctctttctcatcattcataccaaatattgagaaaattaaaaacttgcctttactaagcattgtaacggcaacagcactgtccgagcatatggaggataacgatttcagcgtctttgctcatgaagtacttaaaaaatatgataatgatattgggaaatatacgtctagtgccacttttaagagggacatttttgatgaggtagtagacatgatcactacttatattagaatttatgacgattcaaaaaaactgaaaattttagaatgcgttttggcgcagaatgatcacagataccatgcggccacggtaaattatattactgcaaataacgactttgcttatccaggagtgaccacatggttaaataaaacacttctttatgtcacaaaatatctttcagaaagagaaattttatccgattcgttcttcaaactattgcatgccatgactaagctattaagcaatgaaaaggcatcaaaggtgctcaattccaagattgtcaatgctcaattagaggtcattttgggtagcaaatggattgaaaaaacagatatacttgagtacgtcaacatactaattctctgcattaagcaaaaatcaatcaaatccgaaagaatggttcagttattattgaacaacgaaaagtattcatcaattatgattacagacaatgatgaaaattcttcatataagaaatttttaagcacaatgatattattcactttattcaacttcaatcccgtcataaactctacgccaactgttcaagaaaagctattgactttttactctggtactatttctagcgatgataagctaatcataaaaatgttagagattatcgaatctcaaacctctaactcatggacaaacatgattttttcgtgggaatttatccaggaggaagaagaggaagaagtcttggaaactattggggacacaaggttgattactaaagaaaaagaaggtttgataataacattgagaaagcgtttgattgagaagtctattgacggatacgtattagaaagaccacaaattcctgaattttgcatatcttctaataaagacagctttgatattactactagatggaatttgctcaagaagtactatgaacaaactgagagatgtggtactgctatgtatgatccattgttgctattgttactggtgcttcataataaagaactagtaaagatggtcaaagaagaagatggcagtttaacatacaagtatgaatttaagaaattcctagattcgaaacttttccaattcattatttgttcactaagtgacgatgaggctattaccaacataagttacgaacacttgacgaatttagcggtttcattagagaagaaaagtgtccaagcgaatcctgtcaagaaagtcactgataaagatgacgaagagaaggaagaggataacggtttgatcaaatataacagcatttaccaaattttgatcaagaggattctgtaccataggcaacaaaaccaagattcaattaggccattaatttggttttctatctctagaattgttgatttactgaaaaatccaactttaccattacacgagaaggcgtatcgctgggtattatcaagttccactatacgtggttgggatatccctatggtttccgatgtgatgatgtcctacaacaagaggcaacaagacgacgataacaagaaagagattgatatggaaatttattatggggagctgagttgggtcttggcgacaattggtaagggaatcaaaactgacgaagatttcaagatgttggataaaaaaggtgtattcgaatggttattaaacttaatcaatgtaccttacttgaaagagagattacgcaaattgatttttctggttttttacaaggtgcaaagagtagctgatgatggcggactgaatatgattagtagaaacggtattgtttcatttttggaaattttgaacaacaacatcaaatctaaattaccaaaggacaatgtgctgaacagtgctgatgtcttacaaaatgagaataaaaatacattgaataatacctttaagttggttcaagaacagaatgggattgaaaaattgttgttaggttataatgaacttgtcaaatcacagaaaagattgatattatggacggaaggtgatagcgacaatgttgtcaaaagactacgtaaatga

SEQ ID NO: 1584 - DNA, 516 bp, Saccharomyces pastorianus
atgtcacaatcactacgtccatacctaacagccgttcgttactctctggaggctgccttaactttgagcaatttctcttctcaagaagtagaaagacacaatagaccggaagttgaagtacccaatactagcgccgaattgttgctccaaccaatgcatatatctcgtaatgaaaacgaacaagtgttgattgagcccagtgtgaactctgtccgtatgagtttgatggttaaacaagcagatgagatcgaacagattttggtccataagtttaccagatttttggagcagcgtgctgaagcattctatatcctaagacgtgtcccaatacctggctatagcatttcctttctaataaccaacaagcatactgaatcgatgaaaactgggaaattagtcgactttatcattgaattcatggaggaagtagacaaagaaattagtgaaatcaagttgtttttgaatgctagagcaagatttgtggcagaggcctaccttgatgaatttgtttactaa

SEQ ID NO: 1585 - DNA, 1062 bp, Saccharomyces pastorianus
atgatgacgtccagcaaggcaaaggttttgcagctcgttgattcttattgccagaatgcaaaggctggacagttaaagtctttctcgttccttattggagcagcaaatggcactacaaaagaactcaagagaaataacattcaaaaacaatgtgaatttctagagcaattacgacaacagaaaacaaggcaagggcaaattagtatattgtccatggatgctggtgtttcaaattttgctttctctaaatttcagttgtgtgataatagtcctttacccaaactcctagactggcaaaaggttaacttagaagagaaattctttcagaaagttaagaagctcagtttaaatccggtagaaacgtcccagcttgtttttaacttaacagaatatctattcaaatctgaaccgatacctgatgtgtttacgatcgagagacaacgtacaaggaccatgtcttctaggtatatattagagcccattttaaaagtaaatattctcgaacagattctcttctccaatctggaaaataagatgaggtatacaaatagtacattgaatgcttctaagctgcagtatacggtacgctcgtctgatccacatcggatgacctcatattggtgtattcctaaagaagaaacgccagtcggttcgaaaaagtcgaaatctaataagcatagcaaagattcgaggataaaactagtcaaagaaatattgtcaagctcaattcttgagaacaattcgagaagccccaccaaatttgttgatttctctgatctttgggggaacaggatacgagatgcactttctaaaaagagaagttttaaactctgtgatattttagagatccaagatagctctggagttagaaaggatgacgatttggcagactcattccttcattctttgtcgtggatcgagtggattaaaaattatgaaaatattgctagtcttttgaattccacagcactctccaaagatcagtgcaaaaaagtcttcgactattgtgaaaataaaatacaaagcttaaaatacttacaaaatacctataattctaactaa

SEQ ID NO: 1586 - DNA, 4443 bp, Saccharomyces pastorianus
atgcctgaaaataattcgcataacttcgatgatcatgagtcccacagtgaaaacagtgattatatgatggacactcaagtagaggatggccatgtacagggcgaatactcttattatcctgatgatgatgaagatgaacatatgctctccagcgtaggaagctttgaggctgacgaggatgaggatggtgataatgattaccacaacgaagaagattccgagcttttatacggatataatagacgtcataacagtgggaacgcagacggaaacggtgaagaagaagaactggatcatcctcacgacaataatgaatttggcggtaacccctttcgcttacctgatattttggaaacttttgcacaaagactagaagaaaggagacaagcaggcagaggacaagtccagcatgcagctgggaggacacttcctgagatcttgtcaatgattggaggaaggatggaaagaagtacggagagttcagcaaggaatgaacggatttccaaattgatagagaatactggaaatgcgcctgacgacccgtatattgcaatggaaagtttaagagaactttccgagaacatattaatgatgaatcaaatggttgtcgatagagtcataccgatggaaacgttgatagggaacattactaccatcctctctgataaaatcttgaaggaagaactagaactacaaatgcaagcctgtagatgcatgtataacctttttgaagtttgcccagaatccatctcaatagctgttgatgagcatgtcatacctattctacaggagaaattagtagagattagttatattgaccttgcggaacaagttctagaaactgtggagtatatctctagagtgcatgggagggacattttaaaaacgggtcaattatcgatttacgttcagttttttgattttttaactatacatgcacaaagaaaagctgttgcaattgtttcaaacgcctgtagcagtgttcgaatggatgattttaacgcagtcgtagaagtgctcccaacattaaaacccatctttactaatacaactgatcagccaatcgtaactaggcttgtaaatgctttgtatggcatttgtggggcgttgtacaggaacgaaaagttcgaatcattgttttcgctagatctaacagaaagaattgtccagctagttgctattcaggacactccgttggagaacaaactaaaatgcctggatattcttaccgtattggcaatgagcagtaaagttctgtcaagagaactgagagagaagaccgatattatcgatatgactacccggtcgttccaacactatagtaaaacttcgaacgctgggctacacgaaacactaatatatgtcccgaacagtttgttggttagtatttctagatttatagtcgtgttgttccctccagaagacgaacggatactatctgcaaataaagaggatactgcaaacaatggacatgatattattgtcagccaggaaaaatttgatgctttagtacagtccttaattccaattctcattgaaatttatacgaacgctgctgattttgacgtaagaagatacgtgcttattgctttgctaagggttgtatcgtgtatgaacagttctacagctaaatcaataaatgatcaacttatcaagttagttgggtctatcttggctcaaaaggaaacaacttttaatgctagcggctctcattcaactgaagctggtacccttttagtcggtggtctctccctgctcgacctcatctgtaaaaaatttgcagagctgttcttgccttctattaaaagggaaggcatttttgatttggtaaaggatttatctgtggatttcaatagcatcgatatgaaagagaacggaaatgaagatatgtcactttctgatgaagaagaggatctgcatagcagtattgaagaagatggagaggctgatgacgactatgattatgagtttggtgatatggagattcctgattcagttaaaccaaaaaaaattactttacacattttcagaaccctgtctttgggttacattaagaagaaaggagtagacctagttaacagggtactttcacaagttaacgttgagcaagaggcaatgacagaggaactgcatcaaattgagagcgtcgtttctattttagaagatccttccactcctgacaaaacggaagaagactggaagaaaatttggacagttttgcgaaagtgtattttccatgaggaatttgacgtatcaggttttgaatttacttcaacagggttagcatcctccatcgcaaaaagaatttcctcttcaaccgtatcccattttattcttgtgaaatcatttttagaagtatttgaggataacgtggatcgatttttagaaattctgcaatcagctcttacaagacttgaaaatttttcaatagttgattgtggtttgcatgacggtgggggcgtatcatcattggcaaaagaaatacgaatcaagttggtttatgacggtgatgcaaccagagataatatcggtactgatttgtcatccactatcgtttcagttcattgcatagcatcgtttacttctcttaatgaatttttgaggcacaggatggtaagaatgcgcttcttgagctcgttaattccgaatattgcttctcctactactgatgctaacagggaagaagaagaggaaaattctttggacgatatgagaaaaaagaactttgatttcttttacgatgacgagaaagttgacatggagtccactgtatttggggtcatattcaataaatttgtaaagcaaaatcaggacttgaagactttatggaacgatacccagtcaattaaatttcgcaaaagtttagaaaatgatgatagcgaacacgaggcagctgaagaggctaaagaggtaaaacggttaagagatttttacaaaaagagagaatttactgaggttgatactggatcttcagcggatatcctcgcattgttggatttcctacatagttccaacatcgaaagtgattgcttcatcaattcaaagctaagtgctaagttggctaggcaattagatgaaccactggtcgttgcaagcggcgccctgccaaattggtcactgtttttaacaagaagatatccatttttgtttccctttgatacgagaatgtttttcttacaatgtacatcttttggttatggaaggttgattcaaatctggaaacacaaaactaaaagctcaaaagactctagaaatgatgaagctttacaacaacttggaagaattactagacgtaagttgcgtatttcaagaaaaaccgtatttgctactggtctcaagatcttatctaaatatggtggcagtccagatgtattagaaattgaataccaagaagaagcaggaacaggtttaggcccaactttggaattctattccttagtttcaaaatattttgcgagaaaatcactaaacatgtggcgttgtaattcctatagctatagaagcgaaatgaacatggatacaactgatgattacattaccactttattgttcccagaacctctcgaccctaccgcgaataacgagaaaattcttgaactctttggatatttggggacgttcgtcgccaggtctttgcttgataataggatccttgacttcagattcagtagagtcttttttgaattactgcacaggatgtgtacacccaatttgacaacggtaccaagtgatgtcgaaagctgtctatcgatgatcgagttggtagatccgttactggctaaatccctaaaatacatagtcgcaaataagaacaacaataatacgctggaagaactgttcttaacattcaccgtacctggtaacgatgacatcgaattgattccagatggtagcaataaattcctgaattcttctaatgttgaagaatatatttgtgcaattattgatcagattttgggtaaaggcatcgaaaggcaattgaaagcattttccgaaggtttctcgaaagttttcctctacgaaagaatgctgatactctttccagaagaattagtggacatgttcggacgggttgaggaagattggtctgtgggaaccttatacacaaatttaaacgccgaacatggctacacaatggactcttcaatcattcatgatttcatatcaataatatccacatttaataagcaagaaaggagattatttttgcagtttttaactgggtctcccaaacttccaatcggaggctttaaaagtttgaatcctaaatttacagttgttctaaaacatgctgaagatggcctgacagcaaatgaatacttaccaagtgtaatgacgtgtgctaactacttgaaactacctaaatattctaacaaagacataatgcggtctcgtctttgccaagccattgaagaaggtgccggagctttcttactctcttga

SEQ ID NO: 1587 - DNA, 711 bp, Saccharomyces pastorianus
atgccaagatcaaaacgttccaagctagttactttagcacaaaccgataagaaaggtagagaaaacaaagaaagaatttttgatgaggtgagggaagcattagacacttacagatacgcttgggtcttgcatctggacgacgtaagaactccagttttgcaagaaattagaacatcttgggcaggttctaagttgatcatgggtaagagaaaggttttgcaaaaggcattgggtgaaaagagagaagaagaatacaaagagaacttatatcaattgactaaactttgtggtggtgttactggtttattgttcactaatgaagacgtaaatactgtcaaggaatattttgaatcatacgctcgttcagactattcaagaccgaactccaaggctccattaacattcaccattcctgaaggcatcatttactcacgtggtggtcaaatcccagttgaagaagatgtcccaatgatccattctttggagccaactatgagaaacaaattcgaaattccaactaaaatcaaagccggtaagattaccattgacagcccatatctggtttgtacaaaagacgaaaaattggatgttcgtcaagctttaatattgaagcaattcggtatcgctgcttctgaattcaaagtcaaagtttctgcttactatgacaatgattcttctactgttgaaaacactaacatcaacatggaataa

SEQ ID NO: 1588 - DNA, 1257 bp, Saccharomyces pastorianus
atgtcgactttaatgcaaaaatcctcgaacaataacctgaaagtaaggtccagaccaagacgtaagtcttccatagggaagatcgatctgggggacaccgtgcctagtttgggtacgatgttcgagaccaaggaatcgaaaaccgctgcaaaaaaacgtatgcaaaggctgtccgaagtcagcaaaaatgatagcgacctggtcaagaagatctggttttcatttagagaaataagttatcgtcatgcctggatagctcccttgctgattttaattgcggtgtacagcgcctatttcacctccggcaatactacaaagacaaacgtacttcataggtttgttgccgtatcatatcaagtcggcgacactgacgtatacggcaaaggtgtcaaggatctgtgctttgtattctactacatgatctttttcacattcttacgcgaatttttaatggacgtagttattaagcccttcgcagtcagcctgcatgtcacttccagacatagaatcaagagaatgatggaacaaatttacgccatcttttacaccggcttttccggacccttcggattgtattgcatgtaccattccaatgtatggttcttcgacacaaaggcaatgtacagaacttatccagactttacaaatccctttttattcaaggtcttttatttgggccaagctgcattttgggctcaacaagcttgtatccttgtgttgcaactggaaaaaccaagaaaagaccataatgaattgactttccatcatattgttactttgctattgatttggtcttcttacgtcttccacttcactaaaatggggttgccaatctatattacaatggacctttccgattttcttttgtccttgtccaaaactttaaactatttggattctgtttttgctcctttctctttttgcatttttgtcgtttcatggatttacttgcgtcattacatcaatttaaagatcctgtggtccgttttaacgcaattccgtacagaaggtaattacgtccttaattttgctactcagcagtacaaatgttggatttctttaccaattgtgtttgtattgataggcgctttacaattagtcaatctttattggttgttcttaattttcagagttctatacaggattctttggagaggtgttctaatagatgatagaagtgatagtgagtcagaagaagaaagtgatgaaagtgccactacaccaactgactctaccccaacgaaaaaagttatttaa

SEQ ID NO: 1589 - DNA, 807 bp, Saccharomyces pastorianus
atgtctagtagtaagttcgaagaggttgttaacaagatcataagcgacagccccccaggggagctgagagagatctatgacgatctgatcaagatcactagtgaaagctcgaagaatactatcttggatgccattgaaaactacaacgtgcagaactgcatccccatagatgtcgacgggaactccataatcatatctaaatacaacaaggaaggttcgaagtttttcgaccctgtacactccgtcattttttcagtcgaccatttagggcacagaggtctcgacatcgagccgtacgaatttacgcacccaaagctggacaaagagcaactgaaacggttgcacgatcaattgcgcgagtatcttgctcaaaacttcccaggcgacgtcagttttgccgtttatccagttcccgaggaacccagtaaaatatctatcattatagttagtaccaagtataacccgaataatttttggaatggccattggaaatcgagctatatttacgatttggacactaaggaactgaccggccacatttctactcaagtccattactacgaagatggtgacgttagtttccagtccgggaaggcgattggccagaataacgtagtcgacgttgtcagcacaataagagatgtagagacaagttttgagaatgaactggacttttctttctctgacctgaacgaaaagcagttcaaaactttaagaagaagactacctgtcacaagatcaaaaatcaactggggtaaggccattggtagctatagattaggtaaaaatgccgccgaagggaaataa

SEQ ID NO: 1590 - DNA, 1800 bp, Saccharomyces pastorianus
atgtctgttcgtacttctgcgagatctaacaagggtcagaataaatatatcgaatctctgttacaggaagaaagcgaaacacctaagaagaaacaaactaagaagagaacagatccgactactaaggagaatgagcagactgacgcttcacagagctcaaccaaagataatgagaaaaacggatcagatgaagcagacgaaggttatgttagatgcgtgtgtggggcaagcgatgagaactatgacgcacctgaatactcgcatggagacatggttcagtgtgatggctgcgattcttggcaacacatcaagtgtatgaccggtggtaaggaaaccatcgatgggctaatgaatgaagattccaaatactattgtgaattatgtgacccatcgctgtatgcacatttggagaagtctaaagaggctgaggtttcagaagaggatgattacgatgacgatatttataaacctgtcattgaccataatgacaacgatacagatttctttttagaagaggaaagtcccagaaaacgtaaaagaagtacttctagtagttcaataaaaatgccttcccaaaccagggaggttaagaaaaacaatgggccaaaaaaaaagaagaaaagtgctggtactattacagccaataccgaccaagacaaaacacctgttaagagagacttcgaatctgagaaagaacacaaattaaggttaaacgcaaggaatatgttttctgtcttgttcagtaaattcattatcccagaaacagtagaggcgaagctttatgatcttcctcacgggaaagacataacatcggtttcaaatggttttgcacaaaacttggaggatgaactttataaggcgtgccttaacgttgaatttggcaccttagacaagatatacactgaaaaagtgagatctttgtactccaacttgaaggacaagaagaatttaaaactaaaggcacacgtaatcgagggcaaattgccgttgaataaactagtgagtatgaatgcgtctgaactagcaaatcctgatttacaagagttcaaggagaaaagggagaaagccacttcagaaaattttatcgtagaaataccggacaaacccatatatgtcaagactcacaagggcgatgagctaatcgagaattccaccgagccccaagaggatgtattatactcgatggatagcataaggttacataatggagctgataatagtagtgacaataaagctgaaatggatcagacactagacatactgaaagcacctgctcaagaacacaggagtttggatcccaaccaaaatgcaacagcacagggagagtccttaaagtgcgcgtttctatatccggggttaggatttgaatttacaggttatttgagttatatcggaacttcaaaaaggttgaagagggatatatctaaagaggctatcggtgatgggaacctgtttgtagagggacgcttacctacaacaaccgctgcaccttatctgaaagaagtctcttcttctagagcgattttaatttaccaactgtttgcttctgatgatgaagaaagtcagaaaacttttgccgaagttgtagactccttggaaaccaaaggtcgcattgccggtataaagccaaagagcagatacgagaaagatttttatattattccgtcaaggaatggtgaagttcctgaaattttggacaacattttaggcaatcccaacggtgaaagatctttgtctgtgaaagctgatgaaagaacactgttcgcatttgtagtaataaagcaggaacttattcattaa

SEQ ID NO: 1591 - DNA, 1206 bp, Saccharomyces pastorianus
atggcaaaccccttctcgagatggtttctatcagagagacctccaaactgtcatgtagccgatctagaaacaagcttagacccccaccaaactctgttgaaggtacaaaagttcagaccgactttgagtgactgggtacattacctcttcttggggtccatcatgctcttcgtctttatcgctaatcctgcatcttggattttgaagattctctgttattgcctcttgggtgcgttaatcgtcattccggctacatcgcagtttttcttcaacgcattacctatcctaacatggctggcgctttatttcacttcgtcctatttcccggctgaccgcagacctcctattactgttaaggtgttaccggcagttgaaacaattctatatggtgataatctaagtgatatccttgcaacgtcgacaaattcctttttagatatcttagcatggttgccgtatggtctatttcattttggggccccatttgtcgttgccattattctgtttatattcgggccaccaaccgttttacagggttatgctttcgcatttggttatatgaatctgtttggtgttatcatgcaaaatgttttcccagccgccccaccttggtataaaataatatatggtttgcaatcggctaactatggaatgcacggctcgccaggtgggctagctagaattgataagctattgggaattagcatgtatacaacagcattttctaactcttcagttatttttggtgctttcccttcattgcattccggttgttctactatggaagccttgtttttttgctattgctttccaaaattgaagcctttgtttattacttatgtttgctggttatggtggtcaacaatgtatttaacacatcattattttgtggacctgatggcaggctcagtattgtcgtacgttatatttcagtacacaaagtatacacatttgccgatagtcgatacaagtcttttctgcaggtggtcgtacacttctattgaaaaatatgatgtatctaaaaacgatccattagccgcagattctaacgatatcgagagcgtccctttgtccaacttggaactcgactttgatctcaatatgactgacgaaccgagcgtaagcccttcgatatttgatggatctacttccgtctctcgttcgtcagaaacgtctataacatccctaggtgtgaagagggcttaa

SEQ ID NO: 1592 - DNA, 396 bp, Saccharomyces pastorianus
atgttgtatgaacttatcggactcgttcgtatagccaactcaaatgcgccgaagttagaagcgaaggaattatctaccacgattgggaaattgattattcaaaatagaggtgtcgtaagggatattatacccatgggtataaggtaccttcctaaaataatgaagaaagaccaagaaaaacattttcgagcataccattttttaatgctgtttgattcttcagctgcagtacaatcggaaattttaagaactttgaagaaagaccctcgtgtcataagatcgtctatcgttaaagctagtacagacaaacaacttgatgtggcttcatcgctacatcgctctttagggaagaagtctattttggagcgagtaaacgaagattatcaatccatctga

SEQ ID NO: 1593 - DNA, 609 bp, Saccharomyces pastorianus; identical to SEQ ID NO: 2

SEQ ID NO: 1594 - DNA, 2106 bp, Saccharomyces pastorianus
atggatgaacatttaatttctactattaacaagcttcaggacgctttagcccctttaggaggcggatctcaatctcctatcgatttacctcaaatcactgttgtaggctctcaatcttcaggaaaatcctccgttttggaaaatattgttggtagagatttcttgccaagaggtactggtatcgtcactagaaggcctttggtgttacaattgattaacaggagacccaaaaaggcggatcatgccaaagtcaatcaagccgcaaatgagttgatagacctaaatatcaacgaaaatgaaaagaaaaaagaggatccacatcaaaatgggcaatctgaggacaacacggaagaatggggtgagtttttacatttgcccggtaggaaattctataatttcgatgaaataagacaagaaatcgtcaaagaaactgacaaagttacaggtgctaattcaggtatctcttctgtaccaatcaatttgagaatttattctcctcatgttctaaccttgacattagtcgatttacctgggttgacaaaagttcctgtaggtgatcaacctcctgatattgaaagacaaattaaagacatgcttttgaaatatatatctaaaccaaatgctatcatattgtcagtcaatgccgccaacacagatttggccaacagtgatggtttgaaattggccagggaagtcgacccagaaggaacaagaacgatcggtgtgttgacaaaagttgatttaatggatcaaggtactgatgtcattgatattttagctggaagagtcattcctttgagatacggctatatcccagtcatcaacagaggccaaaaggatatcgaacacaagaaaacgatcagggaagcgctagaaaatgaaaagagattctttgaaaatcattcctcgtacagttctaaagctcattactgcggtacaccatatttggctaaaaaactaaactcgattttgttgcaccatattagacaaactttgcctgaaatcaaagcaaagattgaagccaccttaaagaaatatcaaaatgaacttataaacttgggtccagagactatggattccgctagttctgttgttttgagtatgattactgatttctctaatgaatatgctggtattttagatggtgaggcgaaggaactttccagccaggaactttctggtggtgccagaatttcttatgttttccatgaaactttcaagaatggtgtagactctttggatccgtttgaccagattaaagattctgacattagaaccatcatgtacaacagttcaggctcggcaccatccttgtttgtcggtactgaagcctttgaggttttggtaaaacagcaaatcagaagatttgaagagccatcgctgcgtttagttactttggtgtttgatgaacttgttcgcatgttgaaacagatcatctcacaaccaaaatattcaaggtatcccgctcttagagaagcgatctctaatcaatttgttcaattcttaaaagacgctactctccctacaaatgactttgttgttgatataatcaaggctgaacaaacttacatcaacacagcccatcctgatcttttgaagggttctcaagcaatggttatggtagaagaaaaattgcatcctcgccaagttactgttgatcctaagactggtaaacctttaccggctcaaccgccatccagtaaagctccagctatggaagaaaaatcaggcttttttggcggttttttctccactaaaaataagaagaaactggctgctttagaatcaccacctcctgttttaaaggccacgggccaaatgactgaaagggaaacaatggaaacagaagtgatcaagctgttaatcagcagttatttttctattgttaaaagaactatcgctgacattattccaaaagctttgatgcttaaactaattgtgaaaagtaaaaccgatattcaaaaggttttactcgaaaaactatacggaaagcaagatatcgaagaattaaccaaagaaaacgatatcacaatccaaagaaggaaagaatgtaacaaaatggttgagatattaagaaacgccagccagattgtttcatctgtataa

SEQ ID NO: 1595 - DNA, 1710 bp, Saccharomyces pastorianus
atgagctctcagaaagtttttggtattacgggacccgtatccactgtgggtcccacggcagctgaaaataaattgaatgatagtttaattcaagagttgaaaaaggaagggtctttcgagacagaacaagaaactgcaaatagggtacaggtactgaaaatattacaggaattggcccaaagatttgtttatgaagtatcgaagaaaaaaaatatgtctgatgggatggcaagggatgccggtgggaagatttttacctatggttcctacaggctgggcgtccatggacccggtagtgatatcgatactttagtggttgttccaaagcacgtaactcgggaagatttctttactgtatttgatgggctattaagagaaagaaaagaactggatgaaattgcccctgttcctgatgcatttgtccctattatcaagattaaatttagtggtatttctatcgatttgatttgcgcacgtctggaccagcctcaagtacctttatccctgactctatcagataaaaacttactgcgaaatctagatgagaaggatttgagagctttgaacggtaccagagtaacggacgagatattagaattagttccgaaacctaatgtttttagaattgctttgagagctatcaagctttgggcgcaaagaagagctgtttatgctaatatttttggttttcccggtggtgtggcctgggctatgctagttgctagaatctgtcaactatacccaaacgcttgcagtgcagttatattaaacagatttttcattattttgtcagaatggaattggccacagccggttattttaaggccaattgaggatggtccattacaggtccgtgtatggaatccaaagatttatgctcaagacaggtctcatagaatgcctgttattacaccggcctatccttcgatgtgtgctactcacaatattacagaatctactaaaaaagtgattttgaaagaattcgagaggggagtgcaaatcactaatgacattttttccaataaaaagccttgggctaatttatttgaaaaacatgattttttcttcagatacaagttctacttagagatcacagcgtatacaagaggcaacgatgagcaacatttgaaatggagcggccttgttgaaagtaaggtgaggcttctaattatgaaactagaagtgttggcaggaatcaaaattgcacatcccttcactaagccatttgaaagcagttattgctgtccaacagaagatgactatgaaatgattcaggacaaatacggtagccataaaactgagccagcattaaacgtgctcgaaaaggtcacagatgaaaataaagaggatgagagcatcaaagatgaacctaaggcatatctaaccaccatgtatataggccttgatttcaacattgagaacaaaaaggaaaaagttgatattcacattccatgtacagaattcgtaaacctgtgtcgaagtttcaatgaggattatggcgaccataaagtttttaacctagctctacgctttgttaaaggctatgatttaccggatgaggtttttgatgaagatgaaacaaggccatcaaaaaagagcaaaaggaggaatttagatgccactcgtgagaccgtaaaaagatctaagtctgatgctgcctcatcgagcgataatgtcaacggtgcgaccgccgcagttgacgtaaattaa

SEQ ID NO: 1596 - DNA, 1347 bp, Saccharomyces pastorianus
atgggatccaaaaaactaggcgtagggtctgattcccatcggttgagcagatccagttttacaagtagtaaatcgtcacagtcagcaagaaacagtcagccggttgatacagatgatatagatgaggatgatgaatcaggtcaaagtatcattttgaatattatctcacaattgagaccgggttgtgacttgaccaggattaccttgcccacgtttattcttgaaaagaaatcaatgcttgaacgtgtcacaaatcagctacagtttcctgagtttttattggaggcgcattctgaaaagaattccttggaaagatttctatatgtcatgaaatggtatttggcaggttggcatattgcgccaaaggccgtcaagaaaccgttgaacccagtccttggtgagtattttacagcttactgggatttgcccaacaagcagcaagcgtattacatagctgaacagacaagccaccaccctccagaatgtgcttatttttacatgattcctgaatcatcgatcagagtagatggggtggtaattcctaagtcaaaatttttgggaaattcgagtgctgccatgatggatggatcaacggttttgcaatttctggacattaaggatagaaacggaaaaccagaaaagtatgttcttacgcaaccaaatgtatatgttagaggaattttgtttgggaaaatgagaattgaactcggagaccacatgataatcaaatctcctgattatcaggttgatatagagttcaagacaaaggggtacatctctgggacttacgatgcaattgagggaactgttaaggactacgatggtaattcgtattatgagatatccggcaaatggaatgacgttatgtacataaaggatgcaaagcaatcacgctcttcaaaaaaagtcttcctcgacacacataaggaatctcctttgagaccgaaggtccgtccattgaatgagcaaggcgagtacgaatccaggaaattgtggaaaaaagttacagatgcattggctgttcgtgaccacactgtcgcaactgaagaaaaattccaaattgaagaccaacaaagaaagatagctaaaaagcgcatcgaagatggtgtggaattccatccaaagctatttagaagatcaaaacctggcgaggaccttcattattgtatatataaaaatattcctatcagcgaaaattcagagaaacagatacgaagcatattgcatatagcacctattttaccaggtcaacacttcactgacaaattttctatacctgcttttgaaaaaataaggttacaaaaaaagagaagtgagagcaaaaacgagcacgcagtagaacagtag

SEQ ID NO: 1597 - DNA, 861 bp, Saccharomyces pastorianus
atgaccattggacttttatttacaacacctgaaaacaaaacaatacacaacttgcatgaacagttattaaggggatatttccaagacagtagtatcttaaacataccgcattttctcattaaggaagtaaggctagttcaacggctactttgttcatcaagcaatcgcatcaataagtcgtcatctctttggatattataccgaaagttatatattctgtcccttcaagcaaagacaccaatttctacagatttttgctttatattcaactcttctggatctcagcacttttccaactattactgctggaacactgctagatggttctatgataatttgacgttcgataaaaggacggagctcttttgtttaactcgattattttgctttcagcatgttaaagactgttcatcatggagtactttagcatatatgatatgccagcaaaaacagaaaaaccagtacaatatttgtgattttcaaaggctaagaaactcctttgatgtatttagtacaccaaatacagaagacctaaattttcaactacccgatgctgatacttttatccaagaattagcggaatggattgagaaaacatataccgccgattggcccccatatctgtgtcttttggaaattaccaaactcattggaattgacataaattctatgctttcaatttggaaaagtgaagttcgaaatttcgagaaaaaacacggttctatcaaattggaaaataataatccagttgtgcctaaacagtttacaaatgatttactaatttccaagaattttatacactttggttacaaaaaactcttcctatacgtagctatagaaaaggaacgcccacgtagttag

SEQ ID NO: 1598 - DNA, 825 bp, Saccharomyces pastorianus
atgggcattcgacaggcagaaaggggacgtagcacaggtatgtcgtcactgctgagagtacattgtgttgggccgttcctaaaaggcttgccaccgcttactgctgctgctaagcagacggtcaggcctattcacacttcttctccaaacggggatttcatgtcgtggttcaagaggaagaagcaagaagaacacaaggagcccgttaaggacacgaaacagttgataaaggatatcgaagagggtagggctggagcgtcttccaagaacaagaatagattggaactaatacctgataactttattggtgacggtcccagacggtataaaaggaagaaggagttaaagcatgccatttctgctgccccattcaatcaatggttgactaggggcaaggtcacttccgagaatgaattagacgacgtaatatcgcaggcaatgcaaaaaacgctgggcaacgatgaccagaacgtccagtttccggatttagtggccaagttcgaattcaccaagtttttgcaagcgaaatcaggctatctaatctcagattataaactgactactctaaccactcccctacagttcaaaaagtattttatggagaaaattctaccatcggttaacgatcctgcacttattttcaaagaagctgagcctaatgccatccatccactttccgacaattatgcttcgccaaacgtttatgtcgttaacgatatcactcccaaagagcaaaaaattaaatatgatactattatgagagaagttcagaaactggaagatgatgcaacgaagaaagccttggaaacagcaagatctgcctag

SEQ ID NO: 1599 - DNA, 549 bp, Saccharomyces pastorianus
atggggatcgtcttaagttgttgcagagaccatggaagagaagagaacgaggccctgctgagggaacagcaggcaggttacggcacacaagggaacgccaacgatgaatacgatgccgagcaaattcgattgaaggagcaagagcagaaactgctggctagggagcatgagttgagggacattgttgctaacactaacgacaaactcatagacatatcgatgataaacaacagcggaatcgttattcagggaacagacctgcaagaagcccttgataaaaaagaacaggagcagggtgcaggcccgcgggaagacgatgccagtgcagaggaagacgacgccagtggacaatcagcgtcctcgagccgatctacagacgcagccagtcgccgcgccgctccgaagtcgaatacattcactgtacttacatctccggatttggccaaaatatcaaaggagcagctaaaaaaactccactcgaggataacgagcgagattttcagccagtcgcaagtagacaaaccgggcccattgactgtccccttctaa

SEQ ID NO: 1600 - DNA, 1890 bp, Saccharomyces pastorianus
atggtggttaagaagcggaagctaacaacggaatccggtggtagcgaagaaaggcgcaagtacttaccggggaaacatcctataaaccaagagaaaaccccgcatgtggattataacgcgccaataaaccctaaatctgaactgtttctagatgactggcatatacccaaatttaataggtttatcagctttactttggatgttctccttgacaaatacagggacattttcaaagatttcattaagttaccaagtaggaagtttcatcctcaatattattacaaaattcagcagccaatgtctatcaatgaaatcaaatcaagagactatgagtacgaagacggccccagcaattttcttttggatgtcgagctattgacaaagaattgtcaggcctataatgagtacgatagtttgattgtgaaaaactccatgcaagtagttatgtttattgaatttgaagtattgaaggccaaaaacttaaagagaaactatttgattaatagcgaggtcaaatcaaaattgctccactatttcaataagctggtggacggtactgaaaggaggatcaaccaagctctactaggctcttcttcgtcttctaaaagtttagatgacaagatcaaactaagtgaaccatttatggaattggtcgacaaagacgaactacccgaatattatgaaatagtacataatccaatggctttatcgattgttaagcaaaatctagaaattggtcactactccaaaatatacgacttcgttatcgatatgctattggttttccagaatgctcatatctttaatgatccaagcgctttgatttataatgacgcaacaactttatcgaattattttaaccatttaatgcaaaaagagtttttcccagaattacaagacttaagtgaacgtggtgaaattaatttagaatttgacaagttcgaattcgagaattacctagctattggtggtggtccaaccgcaacgagcgcattggctatatcagctctcgataacgatatcgaaccagagtcaatacgtgaagatctcattgaccaagcagattatgacttcaatcatttcgaaggtctgggtaacggctacaatcgttctttattgacagatgattacctactaaatccaaataatttcaagagatcaatgtctaaaccagttaccattataggagcaatgccatccgaagtcaaaaatgaacaattaatgactcctgaaatcgaaaaaacaaatcctttagaaagtgagcaactaaaaatccccaaatataatatagtgaagtctattcaaagagaaaagcaattactttcggagcagcatactatggaacgtaagccttatagactaatacaacaaatttacatcttctcgtcaaaaaatttgtattcacaagcaacaaaacctttgccaggttcaagaccatcgtgcaatcagaattgggtagagtacattttcaacggtaatgaattgagtcaaaatgaaaacgctttttccttcattctacaacccatgcaaacttttttaaccttgcaatcccatttgagcctatcatcaaaggattcagaaatccaattaacgattaataaggagcctgttagatcaagaaattcaaatgcaaataacagcttaacacaacctcagcaacaagaaaacaatgttactgataatgatacaaagcaaggtattgaaaatttggcaaatattagcagtaataatgaagttgttgacgataataatgacaaaccaaacaacaacataccagaaatttttgatgttcgcttatcagaaggattaaatcacttggtttttaagtgcgaagataaaaattcaaacgaagcagaatctatgagtttttggataaatgttttaccataa

SEQ ID NO: 1601 - DNA, 2703 bp, Saccharomyces pastorianus
atgtctgaaaagttatcctttaaagacagggttgtcgtaattactggtgctggaggaggactaggtaaagtttatgcgctagcttacgcagcaagaggcgctaaagtggttgttaatgatttaggcggcactttgggtggttcaggacacaattcgcgagctgcagatttggtagtggacgaaattaaaaaatctggcggtgttgcagtagcaaattatgattccgttaatgaaaacggagaaggaatcattcaaactgccgttaaagaatttggaagagttgatgtcttgattaacaatgctgggatactaagagatgtgtcttttgcaaagatgacagaaagtgaattcgcatcagtggtggatgtacatctgactggcggctataagctttcaaaggccgcttggcctcatatgcgttctcaaaagttcggcaggattatcaacactgcttccccagcaggactatttgggaattttggtcaagccaattattctgcagctaaattggggctcgttggtttgggcgagaccctcgcgaaagagggggctaaatataacatcaatgttaattcaatcgcaccattggcaagatcaagaatgacagaaaatgtcttaccgccacatatcctaaagcaattgggaccagaaaaaattgtcccattagtactctacttaacgcatgaatccacaaaagtatcaaactctatttttgaacttgctgctggattctacggacagattagatgggaaagatcttcaggacaaattttcaatcctgatcctaaaacgtatacgccggaagctattttgaataaatgggaagaaataactgattttaaggataaaccatttaacaaaactcaacatccgttccaactctcagactataacgaccttattactaaagctaaagaattgcccaaaaatgatcaaggctctgtcaaaatcaattcgcttcgcaataaagttgtaattattaccggcgcaggaggtggtctcggaaggtcacatgctcattggtttgcccgctacggtgcaaaagtgattgtgaatgacattaaaaatccattcacagttgttgaagaaatcaacaaattgtatggcgaaggaacagccattccagattctcatgatgtagttactgaagcttcgctgattattcaaactgcaactaataaatttcagaaagtggatattttagttaataatgctggtattttgcgcgataaatcctttttgaaaatgagagatgaagattggttttccgttttgaaggttcatctattctctacatttgcgttatcaaaggcagtgtggccaatattcaccaaacaaaagtcaggatttattatcaacactacctctacctcgggaatttatggaaattttgggcaagctaactatgctgctgcaaaagccgctatcttaggtttcagtagaacaattgctttggaaggtgccaaaaggggaatcatagtcaacgttattgctccccatgctgaaaccgccatgaccaaaactatcttctcagaaaaggaactatcgaatcatttcaacgcatcccaggtctctccattagttgttttattggcatctgaggaactacagaaaagtttaaaaaaatcaatcaatggtcaattgtttgaggttggcggtggttggtgtggacaaactagatggcaaagaagctctggttacgtctctataaatgaaatcattgaaccggaggaaattaagggaaattggcagcagataaccaattttagcagtaacaccattaatccgagctctacggagaattcctcaatggcaattttacaggctgtacaaaaggcacacacttcaaaggattccagtgacggagtgttcaaatttactagcaaagactgtatcctatataacttaggactcggctgtacgagtaaagagctgaagtacacctatgaaaatgatccaagctttcaggttttgccttcgtttgctgttattccgtttatgcaagctactgctacattatccatggataatttggtcgaaaactttaattatgcaatgttattgcatggggagcaatatttcaagctttgcgccccaaggtttccaactagtggatcattgaaaacagttgctaaacctttacaagttctcgataagaatggtaaagcagctgtagtagtcggtggtttcgaaacttatgacgtcaaaaccaaaaaactgatagcgtataatgaagggacattcttcatcagaggtgcacatgtatccccaaaaaagcaaataacgaatggaaacagagcaaggtttgccattcaaccatttaaagcaccacatggaaaagcaccagattttgaggtagaaatttctacgaataaggatcaagcggcactgtataggttatctggggatttgaatccgttacacattgacccagcattagccaaggcagtaaagtttccggcaccaatcctacatggtctttgtaccttaggtgttagttcaaaggcattatttgaacattatggtccatacgaggagatgaaagtaagatttaccaacgttgttttcccaggtgataccttaaaagtcaaggcttggaaagaaggtgcaatcgttatattccaaactattgatacgaccagaaatgttgttgtcttggataacgctgccattaaactatcacaagcaaaatctaaactataa

SEQ ID NO: 1602 - DNA, 1074 bp, Saccharomyces pastorianus
atgcccaacctagaaaccgtttacctgtacgccggtgaagaacagccacgtgtgaaattgacctgtatcaaggaaggtctcgcgctaccgcaggttatcaagtttgtacattccatccaggaaatgtacggcatagaactgcaaacgtccgagaccataacggaaaacctcaaaatagcctgtgctcctccgtatctgaagccgaactgtatccctcatttctatatcctggagtatgaggaggccgatgatacttttttcatttggaagtcggacggtcgctggcaactgaacaaagtttcggccctattgtatccagacagtgatgtcaatctagtcaagaacacttcatggagggacgtttttcagaatgaccacagatttaagaactacgacaaacaatcctggttgcgacaatgcctggaaaggatgaacgaggacctgtcaaagttgaacgttgaccaattctggtctcaattcgacaagatatgccacaacattgccaaacaacaaaagaacaatgaccggttcaacatggaccttttcaataccttcaagaacgtggtctccatggctatcctaaaaacgaaagtactttcgaataaacggcttttaacagctactttgagggattaccacgactcgctgaaacagaaacacgacgttcgtggccgcaacagcaacagcaacgtaaaggaaagtagttcggaatctttaaatatcaacggcccttccacctcaatggaaagcggctcaagaaacttttctccaataaattctctatccccgtcttccttgagtaccgacgacgacacggcccctacagactacgtatacaaggaccttgcatccaagccaagtatggagttcatgcattcaagtgctaccaacgatctgatcaagtcgaatttcgagagttatttcaagttgatggctgaagattacgaaaccttcgatttgaaagcgtggtcgagacaaagacctcgtaagttccagattgtagaaagaaaaaaaatcgccaaaaccccctccagcaatcgtcgtctgcctaaagacggtaagatatccttctag

SEQ ID NO: 1603 - DNA, 927 bp, Saccharomyces pastorianus
atgaaattctctaaagtctcgctattggctgcatctgcatccgtcgctttatctgtcccagtggctgtgaccgtcactcagcacgtccatgaagctgccaccgtgatggtgcaagggatcgtgtacgtggaaaatggccacactctaacctcgttggttaccgagggtgttcccaccgcaccaggcgctcctgccaccgccactgccactgctcctattgtagttgccaatgctcaggtggacaacgtagctccctccgctacccaggagggcacaccggttgtagaatcttctgtttccacacaaattcaagtctttaccaccgtttccaccattaaatcggtacaagccacccagcaggccgcccaggatgatgtgacttcgtcttcgtcctcgacaccatcaactccatccaccacctctgccactccatccaccacctctgccactccatcctccaccagcactcaatctaccgcctcagccgcccaatcttcttcaggctccgatttcgccacgtcaatggttaacgaacacaacacgaagagagctttgcacaaggacacaggctcgttgacttggtccgacaccttggctacatatgcgcaaaattacgccgactcctacgactgttcaggaaacttggtccattccggcggcgcttatggtgaaaatttggcactaggctatggcacaaccgcttctgtcgatgcttggtacaacgagatttcaagctacgactattccaacccaggtttcactgaagatgctggtcatttcacccaggtcgtctggaaggggacttcccaagtcggttgcggtttgaaatcttgtggtggccaatggggcgattacgtcatttgctcttaccagaaccctggtaattacattggcgaattcgctgaaaacgttatgccattggcttaa

SEQ ID NO: 1604 - DNA, 1656 bp, Saccharomyces pastorianus
atgagtagtggtggcgaagaagatcatttatatacttttgatgaaaatgactccgactctattgaactttacgaatctcaaaacacgtctgagttcaccatacatggactggccactccgaagttaattactgtaataagccaaggatccgagttcgacatcaatgaagatgaagatggggtcgataccatatacgaggggatgcttgacattcctattacgaaaagcagtaaaagagtactttgtgaaggaagcgtaccgaacctcaattatgagtgcttgaccactaagggtattttcgaaaggatactccaaagagtcgaccatttgcaacccatctttgcgatcccgtctgcagatatattgatattactacaacattacgattggaacgaagagcgtttattagaggtatggaccgaaaaaatggacgatttgcttgtagagcttggtttaagcactgcggcaaatgccaaggaagataaagattttagcttacactccagaaaagtggaatttaaagacgatttcgcttgtgttatctgttgtgatagtaaaaacacggaaacttttgcattagaatgtggtcatgaatattgcatcaactgttatcgccattatatccaagataagttgcatgagggaaacattattacatgtatggactgttctctggcgttgaaaaatgttgatatagataaagtgatgggacacgcttctagtagtaaactgatggattcctcaatcaaaagtttcgttcaaaaacataatcgtaattacaaatggtgcccatttgccgattgtaaatctatcatacatttacgagatacttcttcgttaccagaatacacccgtttgcattattcgccctttgtcaaatgtaattcgtctcatagattttgttttaactgtgggtttgaagtacatgccccagcagactgtaaaattaccagcgcttgggttaagaaggccagaaaagaatctgaaaatttgaattgggttttgtctcatactaaagaatgccccaaatgttccgtcaatattgaaaaaaatggtggttgtaaccacatgatttgctcgagctgtaaatacgagttttgttggatttgtgaaggcccatgggccccccatggtaagaatttcttccaatgtacgatgtacaaaaatattgaggatagcaaaagtaagaattctgaagacgtcaacaaaacattgaagaagtacacatttttttatagactatttaatgagcatgaggtttcagccaaattggattggaacttggggcaaacggtgggtacaaaagttcatgcattacaagaaagaataggcatttcgtggatcgatggacagtttttgtcagaaagtttgaaagtactaaatgagggacgaacagcattgaagtggtcgtttgctgtggcattttattcggatgcatctcaaaacttaactaagatctttgttgataatcaaatgcttttggcaaatgcagtagagtttctatcagagttattacaaataaaaaatcctgaagtcattatgaaacgaaaacctgagttctataataaggcgggatacgtggaaaatagaactactgcattgatggaatgtggtagagaactattatgcaaagggatttgcaaagttatggaatga

SEQ ID NO: 1605 - DNA, 2181 bp, Saccharomyces pastorianus
atgttcaaagtatttggttttggtgcaaaggaagaggctccggagctttcccaggaggaaaaaacgaaggctattttaaaacaggctcatgatttcgaacaggcgttacgtgccatggattatgttttggacgataatgctggtgagggtttggcgctgctagatgcaagtgacgctaaggaagcatccgaccaaacaatcaatgcgttggctcgtggagttattgaatttttggaagccactctagggtttgaagctgaggagatgaagaaggcctctgccactttagctaaggctgaaactctgtctctaaaaagtagagagaaggcgcagaaaagtggactgaagagcagttcgttgtatcccccagggacggtttatgcagtgacttatactgagtcctgtcttttgcatgccttattgatgattttcagtgaaagtatgatggaggcagccaaggcaatcctaaagctcaggaaatcatattacatgttgcaggaaatcttggaaactatcaaagccgccaacaagaccaagaagatgaggttattggccggcgatgaagacaaagactccacaccagcaacttttataaccggtggtgatgcgttcaattctgttgatattccttatgaactgacccctgaagaacaaaaggataaagatcttttgcagtttgccgaacaaattcatagcatgagggctgaaagactatcaggcgcccatatcggtaactcgcctgcgattaacaggctaaggggtgaattgggtttacaagcgatggaagatttgcccaaaaaggaaatcactgatcatcaagttctttcaggtgatctcgatttaagccaagccaccatcgacgaatttatccactctggtgtcaacttatgttttggtatcctacaagtcgtcatatcattgttgccacctgcaattggtgcggttctttctgtagttgggttcagaggttcccgagaagagggtctgagacttgtttggagagctacgaagcaaagaaacgttcatggatgtatcggattgttaggtttaatgttttactacgacggtccttttcaattcactgacgacgactttgatattcctgcagcagttaaggattccgacaaagatggtgaagattcggatgctgaagatatggacggccctacattgctgcatcccgggaagatcttagaagacgcgttgctgcaatcaagagcgttattccccaacagtgctctatggttgctgaacgaagcgaggatgttatcaggtaagggccgtttagaggaagcggtcacgttgatggactcgattgatgttagcaagattcgtatgagacaggttaaatctttgatgattttcgatcgtgctatcactttgatccatttgcatcaatacgatagagctgcagatgatatcttgtcgctgttggaaattagtgattggtcacatgccttttacacgtattttgccggttgctgttatttagaaaactggaggatgtgtgaaatgggaataatggagtcagataaaaaggatgaataccaagagaaggctagtgagcttattttcagttcggtcgacttgttgggcaagaagacgtttaaatcaaagaacctgccattagatagatttatactgagaaaagttgagcagttcaaggcaaaaaaggccgacctcggggtggacaatccactggacgccattgctacttcaccagtgcatgaaatcgcatacttctataacggttacaatagaatgtctgaagagcacttaaaattatcaaagaaaatgctaacggagtacaagaaccctgcgattgacgccttggactcagaccaagaactaatcaaggaccttttggtgtcactgacattaagaagactaggtcatatccaagaaggttgcgacttattggatgaaaaggttttgccagaatttttttcagttcaaggtggtagggcgaagtatatcaagaagaccgaagatccatgggcttacccaaccgccctttatgaacgtgctttatttacgtggaagctgaaaggtattgaaggcctttcggaaagcagagaatggttattaagagcccaaggctatgcagatgactatgagttaagcacgcgtataggcatgaagatcaaggctgccattgatcgtgttgaccattcattgtaa

SEQ ID NO: 1606 - DNA, 1842 bp, Saccharomyces pastorianus
atgaggctttcattcaacaaacaacgccatcacggcggaacaacagtagctttgactgaacaaggagcttccgattctctgcatgctgcgcaggctatcttccagaaccactccactgagggaaccaggccatgccctccatttacggtgaacacaaatgctcaaacaaggacgtctggaccatcgctaccgaggcaaagacaacaagaacaaaagaaggcacgcatacgaacgaaacaggtaccgtccatcaaaacaacaacgcccaacggtgttgagctgccaagagcgcacacaccagaaaccataaatagagacaatgccattaacgctgctcaaatggctgcggctttagcacactcacaatcgaaactaaactcagacaataatcacctcaattcttctccggtagacacgataagagtattggggactcctaaatcgagtgttccgctgggtcttcattcacgctcatattcaagaaatgcctctaatgattcattaacgcttggccaaaggactcccgagaatgactctcatgaaaacttgatcagcccacctagttctagcagaaggctatcctcatgttctggggaccctaccattaataaggaaagcgctaagtttgtacttaaatatagaccattaccacctttgcagccatcgttgaccgataacagtcttcagaacgaaaacgaaaatatgtcatcagttagcattgactccaagtatagtctcaatgtggacacttcagacgtcgcttcaaacaggtcgcaaacaagtctgtctcaaacaatcaaccagctctcgctttatgagtcagaaccttccattgcgagctcaagtactactactactaccgctaataaccaaggaggtggattgcaaaatctggtcccaaattactcatctgatatgaggaagaagaaactggtcagcaagttcaaacggaaagtatttggcgctaaacccaaaaattcgtcatcgcaatacgaaatggacgcacacgacgacgagcaccagcaacagcagtcctctatgaaatttagaacaacgctacgcaaaagttctgtgagcacaaatactgaaaatgatcaggtgaaaaaactgggggctggaaacgtgaagtacaagtacaaccctgacagcgacacgtatgatttctacgctgacaccgattctgactcgggatcggatccaaatcaggacactttatcgaagcctcgtaaaagagatagaattaaaaggaagatcaagaagtctgccaataaaacaacacatcataggcccattcatcgcactaggaaacagaaatttaatgaggacaaaccttggaaatcccatacagatataacctttgtcactgacagtgaaagaaagcgctatgaaagcatgtgggtgagcaatagacaccgccatctagatttgttaagctggtggcccgtctctgaggacgatcccactgtaatgaactctctaccggaagacgggttgatcctgaacattatcgtccacgatatttggaagcgctccaatgttcccagtagtttactggcggagatttacgcaaaggtggactcaagaaaggatggtacgctggacagaaaatcattcatcgtggggatgtggctcgtcgatcagtgcctgtacggtagaaaactgcccaacgttgtcgagcaatgtgtttgggacagtgtggatagatatgcatcaaccacggtggtaccagtaagcacactcaaggcaatggccaagcaaaaaaagaaacaaatgaaggaagaaatcaagaacatcaaaaaagaaaatagagtcgttcttgtagaccataatagcacatcgtga

SEQ ID NO: 1607 - DNA, 495 bp, Saccharomyces pastorianus
atggcagaacagatcagccacaagaagtccctgaggattaacaacttaaacaaggatagaaggttactgttgagagagttctacaacttgaaaaatgacccaaacgagggtaaacaagacgcgagcacagagggtgatactagcggacgccactcccgggatgagcacggtacagatgtaaatgaaagtgcagaagaaaatgctgacgagctggtgcagaatgacggtttgggagtagctgttgaggaccgaaacgaggggaaacaacaaataagcgaagagatacagaagctgcccttcaagagtcttgtccagatccacaacaagcttctgggcaaggagacggagactaataactccataaagaacactatttacgaaaactattacgatctgataaaagttaacgatcttctcaaagagattactgacgccaacaaagatcaagtgagcaagctaaaacaaacggtagagacgttgattaaggagctgtga

SEQ ID NO: 1608 - DNA, 1596 bp, Saccharomyces pastorianus
atgacaagacaacaggctattgactatgcgacaaagcagattccgcagatattgcccctagaagaatccgatgttagagcattgtgcgagcaagtgctgagcacgtcatctgataatccagagcagattgcttcaaaatttctagagtttctggggcacgaagatttgtccttcgagtttgtaatgagatttaacgaaatgttggcccagtctaataaaaaagtggtaaagaatacaaaaaacgcacaggtcgaacagactagagaagcaccctctgcatctaatattaagccaaagcagcacattagtcctgactctataaacatacctagagttgaacaaccaaaaaaaaagcaggaggaaaagaaatattcagcgaatcagcctaccatgcagccgtcgagtcaagctgttaaggctcaaccaaagaaggagaaaaaagagcataaaactaagcaaaaattgcaatcgctgcaagaaattgacgacgctataaaaatactagagctccgaggtagcggtttatctgatcaaacttgtcattgccaaggtgcaagacatccagtttttgaaatagcaccaaactgtcttcattgtggtaaagtgatctgtgttaaagagggattgaatagaggtaaatgcggtcactgtggtgaaccactcatatctgaggaagagaaagtacaaatgacgaagattttgaataatgagaaagacgaactgaacgatccttcatcattatccaacgcttcaaatggtgctaatgtcacaaaaaaaaaaagtaaaagttataagataacttccggtatgggtaaaaatttatttgctgaacaagacaaattatttgatttcattgaaaggaaaagggaaagagaaagaaagcgcaatgaagtgttaaaattgcaggaaaagcaagaaaataatagctcaaaagaagaaaaacttggcgagcaggagaatccagcggaggaaaatccagagttgttagctgcacaagaacggttggatagactgttacatttccaggacacttccgcagagagaacaaaaattatagataatgctagtgacttcagtatgaaccaggaggttgggttatggggcagtacaagagaaagagctcttgctctaaaaaagcaacagcgtaatttgagaaaatgggagaaagtggaaaaggaacgtaatggtaagggtgacaaatacgttgtcagcatgaacataggccccaatggcaaagtaaccatgacagaggttcccaaggacacaaaaaacgtggttgcagattcagatgataatttcagtggtctaagcgacgaagaagacatcaacgacctgaaacacatacacgctttgaaggatgaaataagtaccacaaaaaccatggagaattcgcatttgcagtctaaaatgtgggattctgaacgtgataagaagcaattcgataggcctacgtatgtgagcagaaatgcgaatggcgtgcaaagtggaaagaaagaacaatctcatgatgttaaagatcatgatttgaaatcaagagttcaagtcgatcaaaatgtagaagcttctttagaacaaaacattctcgcggtactttga

SEQ ID NO: 1609 - DNA, 2226 bp, Saccharomyces pastorianus
atgagtgacgatgattctatgctgttaaatttttccacgaatgacgatgctgccggaaattcgtacaagcaagctgccaaggtgacaggtggtagatggaaggatagacggagaatgaaaatgaagctagagggcaagacaggttcgagaaagagaagagcggatgttgctggagaccaaataccagggtcagaaagaggcggcgattccggtaaaaaagtgcatagagataatgctgacggtcctgctgagcaggaaggacctaaacgtagaaatgcccacaacacccaaggaaggatactaccagccgattctcagtttgtctcgtccttgtttacgtccaatagagagataacgactgccgtgaacaccaacatacatgacgaaagtgttgccatcaatccatccaacgcgccattgaaaactgacctgtttgcgtccctaggtgtttctgatgtcctggtttctcacctggagcaaaaaatgcgtattcaaaagcctactagtattcagaagctggccatccctcaagtgatagccaatgcggggaagaacgattttttcattcacgctcaaactggttcaggtaagactctatcttacctattacccataatatccactattttgaacatggaaacccgtgtcgatcgttcctccggtgcgtttgctctgattgtggctcctacacgtgaattggcttcgcaaatataccaggtctgttccactttgatttcatgttgccattatttggttccatgcctattgattggtggtgaacgtaaaaagtcggaaaaggctagattgcgtaagggctgtaatttcatcatcggtactccgggtcgtattttagatcatttgcaaaatacaaaggtcatcaaggagcaattgagccaatctttgaggtatattgtactggatgaaggtgataagttgatggaattggggttcgatgaaacaattagcgaaatcatcaagatcgtccatgatattcctatcaactccgacaagttccccaagttaccccataagttggtccacatgctatgtagtgccacactaaccgacggtgttaataagttaagaaacgtggccttgaaggactacaaattgattagtaatggtacgaagaaggacgccgacgctgtaacggtggcacccgaccaacttttacaaaggattactattgttccacccaagttacgtcttgtcacattggctgctaccttaaacaacattaccaaggattttgtcgccactgacccacaatccaaaacattgcgtacaatcgtattcgtgacgtgttcggacagtgtagaatttcattatgatgcattttccgggagtaatggtcatcacaaaaacctaataggtgattctgtaagagtgctcacaaaggggaacaccatatttccttgtttttcaaattctgaggatcccaacatggtgatttataaactgcatggttccttgtctcaacaaataagaagttccactttacaacattttgctcgtgataatgaggtcactaaaggaaagcatttgatcatgttttgtacagatgtggcaagtagaggtttggatcttcctcaagtcgggtctgttattgaattggaccctccgtttgctgttgaggaccatttgcatagagtgggtcgtaccgcgcgtgctggtgagaagggtgaaagtttgttgtttttacttcctggtgaagaagaaaaatacatggactacattcaaccataccatcccatgggttgggaattattgcaattcgataaagaactattgactccggctttcaaagatgtgaatgtcaacagaaatgacaaatatattagaaaagatgataaatcgtctaagaataagaacggagctgataaagagtatgagtgggacactaatgccaccacatggcacttgaatatagaaagacgtgtagtgggggattcaacatttaagaatctagcagttaaagggttcataagtcatgtgagagcttacgctacacatatatcgcaagaaaagaaattcttcaacgttaaatttttgcatctgggtcatttggctaagagttttgggctgcgtgaaagacctaaggctatggggctgcagagtagtaaggatggtgagaccgataagccaactaaggaaaattcaaagaataaaatgttccgcatggctcgtatggcagagaagcaaatagcaagtgagttcaattattaa

SEQ ID NO: 1610 - DNA, 918 bp, Saccharomyces pastorianus
atggcggagtttaatatcacagagacctatctaaggtttcttgcagaagataccgagatgacaatgccgattgctgccattgaagcattggtcacattgctaagaataaaaacgcccgaaacagcggctgaaatgattaataccataaagggctccacggaagaacttattggatccatccccaactcagtgtctttgagagccggttgtgatatcttcatgagatttgtcttgagaaatcttcatttatatggtgattgggagagctgtaaacaacatttgattgagaacggtcaacttttcgtgtccagagccaagaagtcccgtaataagattgcagaaataggggtggatttcatatccgatgatgatattattttggtacatggttattcaagagcagtgttttcattgttgaaccacgcagccaataagttcattagatttagatgtgtggtgacagaatcaagaccaagcatgcaggggaaccagctatactctttgcttgagcaaaagggtatacctgtgaccctgattgtcgatagtgcagttggtgcggtgatcgacaaagtcgataaagtatttgttggtgcagaaggtgtggcggaatccggtggtattataaatctcgtgggtacttactctgtaggtgtactagcacagaatgcaagaaaaccattttacgtggtcaccgaaagtcacaagttcgttcgtatgtttccgttgtcctctgatgacttgcccatggccggcccaccattagacttcacacgtcgtacagacgaatcagaaaatgcattgcgtggacccaccatcgactacaccgctcaagaatacatcactgcattgatcacggatttgggggtcttgaccccaagtgccgtttcagaggaattgatcaagatgtggtatgactga

SEQ ID NO: 1611 - DNA, 2298 bp, Saccharomyces pastorianus
atgagttttctatgggggtctacgaagtccaaaaaaaataaacacagaaaggctgccggatctcattccccaggtgctattccactgcaacgtgtcaagacggctcgtaaaggtgttcctatagactacccaaggactctggagaaaatgcatggtgaaagcttgttattcagaacgtccctcttgagtgaattggtaggcgctgggaagtccggcattgggccaccagacctggttcattgtacagagtgggataaatttcatgacgagaaaatcggtgagttcttccatattaccggaaccgatgtttccagcatatctatgccaattgcatttttgaagttgataaagtggaatgacggcaagaagctgaaatcagcatccctgaaaaatgataacatctctacatattgttcattcaacctctttcagaaattagacatcagattaagatacgaatctgaggacgtttatcaggtgaacgttacgaactgttcaaacggaaacaatgacataccattaagtgatctaatttgggaagaaacgtttgtgagctgttgcataagaagtatgattacaaatctagactgtgaaaggaaaatacctggactggtggaattaccatttgtttttgaaaacagaagtgcgactgactataaaagggtaattgatgtattatgtaggtttttacctagatttttggagtgtggttggaattccacgaaaagcgtatatgcaacaatactgaataactatctaactgaaacgctactgatatttttatcgataactccagcattcattaccgattatgcaatccaagtgttggacaatctgataacgaatgacccgttgaactttaaatattatgctattgtcgttatttccattatggagcaaagcaatgaccgggatatggaaatgattaagaaaatacatgcaatattagacatattgctaccagagctgtatgggctaccttcggacaaacctgacaattctgatataataaattgcatcactgacgtgttaaacatccaggcaagatttcttttgaatagcggtgactatgaactatccctatccgtcgctacaatggccaccaatttatcctcagatagttttgaatcttggtttctgttgtctagatgttatactttttcacaagaatacggtaaggccctgctttcgatcaactcgatgccctgtttgccagaatacgatatcatcaaacaatctttgactacagcattcaacttgactatgaactattataaagctccgttttttcacaccagagaacattgtactatgacatcgcacgagttgaatcatctgatgaatactatgcattatgagaatgaattggaattgaaaacgataatatttgggcgcactataatgcccaacgaatcaaagtacggttgtatcgacgatatctggaaaaagtcttgtcttgagttagggcccatttctgggcctcaaagtgataatttgataaactttgtctctcaacaagaggtagattctataggagatttgacgttactgaaaagaagtaaagaaacaagacaaagaagctggtttaatgagcaagttaaccttttgttgatggaactggttgcgagaatcggttggaatgctgtccttcaattaaggtctgacgtattcgttatggaaagcaagttcaaaatgatagactcttcggatgaactttccacagaacttcgcaaaaagagactgtgccaaagatggtttgatacgatctttctggatatttacgaagatttaagcatcagcacttcatcacaagaaaataaggccacagcgaaatacagtggattagaatgggaattacttggcctgactttgcttcgagtcggtgatttatccgatgcagtggcatgtctacgaaccagtattttggcgaggttcgaccctatcagttgccaccagctcttaagtctctatttatccttggatttcaacgatgtgtatatgaaaagattcgacgttgacattgttttggacctactcgtgaaactgatctccttccgtatacgattttacgataagttccagatatttgctcttcaggtactgaggaaattaaaagggcaattgagccctgagatcatcaaaaataaaataatcaactcacctcatggtcaagagggaatcgcagtgataatagattacatgctcgaatgcctttcagaagatggcaacgaaacagacttagcttctgaacgtccacacgaaaatgcctctttcaccactggagagcttgcaaattag

SEQ ID NO: 1612 - DNA, 2268 bp, Saccharomyces pastorianus
atgtcattacctacttccaaggaacagtcgctcctagatgatgcatccacgttattgctgttttccaagggaaagaagcctgaagaggtttcaacagcggattcaaaagctggaatcgctggatgtgacgatgactacgaaagggaaaaaaaaggagcagtagccatggccgcagcagcgctagctacagctgcatcggtccctttgcctctgaaaacgtctacccagcatatgatgccaaaagcaaccgcagctattaccacagaggaggaggaggaggaggaggaggaggaggagaaggagaaggaggtcgaaaaacgcacccaatggccagtccctgacacgtacatagtcgaccctgatgctgggataattacatgtatatgtgatatgaacgacgatgatggtttcactattcaatgcgaccactgcaataggtggcagcatgctatttgttatggtattaaagatgttgaaatggcacctgatgattacctttgtaactcctgtgatccgagaaaagtagatattgagttggctaggcgaatacagcatagccgattgggtgtgaaaacaacggtctctgcccctagtgacattaacagtaataggaacaacagccgtgacagagccctgagtacgactggcaatgatagtggcgaaactttgtcaacagaccaagagaatagcagccacaaagacaaaaaaaggaaaagaaacccatcaaataatagtttagaatccaagactgaaagtacttcagcaaccccttctgaggtatcagctaatatacaaaagaaaaaagaacattttttaagtgctaaagacgcatacggcgcaatatacttgcctttgaagaagtatgtgtttaagagcgacttaattgaattgtttttgaaaatgcatatggacgatgagtgggtagtacaatactctcataggacattcaaagctatacccattgaagtcagaccatatgctgatattgcgtattcaaggacatatccaggctttacgaaactgggagtttatctaaaaaggaactgttttaaaggcgattttgtccaagaattcctgggagagctggattttcaaaaaaactatttaacagatccacgaaatcattacagaatatggggcactactaagaggagggttatttttcatcctcactggccaatatacatagacgcacgttcatcagggaacctgacgaggtatttaagaagaagttgccagccgaatgttgaattagtaaccataagactacaagagctggatcacacaaatgataataataatagaatgaacgtaaacaagataaagtttgctttacgagcgttgagggacatatcagaggaagaggagttatatatcaagtggcagtgggatttgaaacaccctatatcaaaactaatcaacggctcagcgacaatagaatctttaactgatctggaaaaatatggcttgatagactccatagaaaccattctaagtaacggtgaatgcggctgtggaagtaattccaaagactgctatttactaaaagtgaagagattctcccagagtctctataaatctgttaagcttaggatgaaaataagcaacagatataagctaaatgaaattctcaacaaatatgaaaacaaaaagagacgtgaaccaccgattttgaattggctagaggagaaggcacaaaccgcgattgaaagagctccgatacttttagaaaagtatcatcaacaaaagtttctaaatcgaaatgatggcatcaccattactcaaagtactatggttaatacagacgaagtttgtaatattgcgaagccctttaaaatcaatctactctcacgatactcttcgaatgtcaatacccctgaagaaaatgacactgaggggaagtataatacaatcaagaaaagctcggattatgatgaatctcatatcacgaatatcaaagaattaccaatcccaatacatttacctgtagcaaaggcaccagggcaaattacatgtgagctcaacaacggacaattaaagaatgaacatatattgacaagaagcccttccctatcaagtttcaacaatgacttatcagaggaaaaggaacatcacgttgccaaggaacctatgacagacgcttcaatgagttctaggcacgaactatcaccagagagtataaggcatttggcggatttctcgtcatcacagttacattcaaagaaaaagttaagctttgcagattatagaaaaaagctgctgaaatga

SEQ ID NO: 1613 - DNA, 825 bp, Saccharomyces pastorianus
atgtcatatttgccgacttattctgatgactttccgactggacagcccggtcgtaggcagcggagcaatggtaatgataatgctcaacagcaagaatatagccaacaatcagtgccgatggtaattaagagacttttcaagacgccaaagaatttggacctcgagacagccagttgggaaatgtttcatctgattttacacccaagaaaggcttatagatcgatatattatcaacgacaaacgaaaaatcaatgggcaagagatgatccttctttcttcatctttcagatagttctgatttccataagctccgtcatttggtcgatttataattcagggttcaacaatgagaacggcaatatggggttttttggcattataggtcatttttttaaaagtttgataatgatggtttttttggattttttcatatttgggttcgttatggcaactattttctactttttgttgaacagatcatatttcaaattcaaatcgagtcaaaatactgtggttgagtgggcttattgttttgatgttcattgcaattcatttttgatcatcttactatgcttgtatttcattcagtttttattgttaccgataattaatttgcaaaattggatctctctgctcattgggaattctctgtattgtttcgccattggccattactttattttgactttttatgggtataaccagctccctttcctaaaaaatttgaacttcatacttttaccaacattaggattatcaataatatatctaatcagtttatttggtatcgacctttccaaaaggttgagtttctacaattattga

SEQ ID NO: 1614 - DNA, 615 bp, Saccharomyces pastorianus
atgtcacgtaattccgccgcaggcttggagaatacgcttttccaactaaagtttacctcaaaacaactgcaaaagcaagcaaataaggcgtcgaaggaggagaaacaagaaaccaacaaacttaaacgtgctctcaacgaaaatgaggagatctcccgtatatacgcgtccaatgctataaggaagaaaaacgagcggttacagctactgaaactggcatccagagtggattctgtcgcatcaagagtgcaaaccgccgtcacaatgagacaggtgtccgcatccatggggcaagtttgcaaaggcatggacaaggcgttgcagaatatgaacctacaacaaatcaccatgataatggacaagttcgaacagcagttcgaagacctggatacgagtatcaatgtgtatgaggatatgggcgtcaattcggatgctatgctagtagataatgataaggtggatgaactgatgggcaaagtggctgatgagaacggcatggaattgaaacagagcgcaaagttggataacgttccagagatcaaaccgaacgagatcaacgtcgatgaagaaaaggaagataaactggctcaaaggttaagagcattgagaggttga

SEQ ID NO: 1615 - DNA, 1806 bp, Saccharomyces pastorianus
atgagtaatacgtcttcgtacgagaagaacaatcccgaaaatctcaagcataatggaatcacgatagattccgaatacctgactcaggaaccaataaccattccttcgaatgggtccgttgcttccacggagaagggttcagggtccaaatggaaggactttaaggactctttcaagagagtagagccaatcgaagccgaccccaatctaacagaagctgagagggtcgctttcatcaccgctcaaaccccattgaaacatcaattgaaaaatagacatttgcaaatgattgccatcggtggtgctattggtactggtctgctggttgggtcaggcaaagcattaagaacaggtggtcctgcttcgcttttgatcgggtggggatccacaggtaccatgatttatgctatggtcatggctctgggtgagttggccgtggtctttcccatttccggtgggttcaccacgtacgccaccagatttattgacgaatcttttggttttgctgccaacttcaattatatgttacaatggttggttgtgctgcccttagagatcgtctctgcatccattacagttaactactggggaacagacccaaaatacagagacgggttcgtcgcgctgttttggctagtaattgtgtgtattaatatgttcggtgtcaaaggttatggtgaagcagaattcgtcttttcaatcatcaaggtaattacaattattgggtttatcatcttaggtatcatcttgaactgtggtggtggcccggaaaagggatacattggtggtaagtacttttctgatcctggcgcatttgccggtgacactcccggtgctaaattcaagggtgtttgttccgtttttgttacttccgccttctcctttgctggttctgaactggttggtcttgctgctagtgagtctgtggatccaagaaaatctgttcccaaggctgccaagcaagtgttctggagaattactttgttttacatcttatcgctactgatgattggtcttttggtcccatacaacgatccgcgtttgattggtgcctcctccgtggatgccgctgcttctccctttgtcattgccattgtgacacacggtattaaagggttaccaagtgttgttaacgtggtcattttaattgcagtcttgtctgtcggtaactctgccattttcgcatgttccagaacatttgttgccctagctgaacaaggtttcctaccacaagtgtttgcctacgtggatcgtaaaggtagaccattggtcgggatcattatcacttccatagggggtcttatcgcatttgtggccgcttccaaaaaggaaggcgaagtatttgattggttactggccttgtctgggttatcatcacttttcacatggggtggtatttgtatttgtcatattcgtttcagaaaggcattaactgcccaaggtagaagtgttgaagagctatcattcaaatcccctaccggtgtttggggctcatactgggggctgtttatgatcattatcatgttcattgcccaattttacgtcgccttgttcccagtgggcggttctccaagtgccgaagggtttttcgaggcttatttgtcattcccacttgttttcgctatgtacatcggtcacaagctttacaagagaaactggaagttactcatcccagccgaagaaatggatatcgacagtggtagaagaaaagtggatttggaattgctgaaacaagaaattgcagaagaaaaggcaattttggccacaaagccagcatggttcaggttctggagtttctggtgttga

SEQ ID NO: 1616 - DNA, 816 bp, Saccharomyces pastorianus
atgcctactctaactcccagatgtattattgtgagacacggtcaaaccgaatggtccaagtcgggccagtacaccgggttgaccgatttgccattaacagcctacggtgagggccagatgttgagaactggtgagagcgttttccgcaacaaccagtttctgaacccggaccacatcacttacatcttcacctccccccgtttacgtgccaggcaaaccgtggacttggtgttgaaacctttgagcgacgagcaaagagcaaagatccgcgtggtggtggacgaggacttgagagagtgggagtacggtgactacgagggaatgctaacccgcgagatcatcgagttgagaaagtcgtgtggattggatcaaagcagaccgtggaacatctggagagacggttgtgagaacggtgagaccacccagcagatcgggttgaggctatcccgtgccatcggcagaatccagaacttgcatcgtaagcaccagagtgagggcagagcatctgatatcatggtctttgctcatggccacgcgttgcgttattttgctgctatctggtttgggttgggtgtgcagaagaaatgtgaaaccgtggaagaaatccaagctgtaaagtcgtacgatgacgagacagtcccatacgttaagctggactcttacagacacttggtcgacaatccgtgcttcttgctggatgccggtgggatcggtgtgttgtcgtacgcgcatcacaacattgacgagcctgcattggaactagcgggcccatttgtctcacctcctgaggaagaatcccagcatggagaggtatga

SEQ ID NO: 1617 - DNA, 1323 bp, Saccharomyces pastorianus
atggcaagagatgtaaggcctgggaagcttaccatatcgctattgattttatcactgtttttgatattccagatactgaccaaaccccaccgcaatgagagcagcatggaaactcgacttttcacgagaaggaggtcgcgtgtaacacgggtgcctaataatgacgccagtttatctataccgtatttggataaagtcaaccggttttggcatgtaggcggtgccacacagattagaaatagccaatctatcaaattgacgcaggaccgagaccaggacaaacacgggctggtgttgtccaatgggattggcgacaacaccatcaacgactttgaaatcgtttacaaattcaggatttctcatagttcgaatgcaaaactcctgggcgatgggatgagctttgccatcacacctgaaaatgggtttctcacgcaggatttgaagtcttcgtatgcaagaagacaatacatgatgaactcacgcggtgtcattggcgataatacagatttaatggggttcccgaagaacctaccgggtctgtttgttgtcttggacacgtatcgcaaccaaggccaccaccatgaggacgtacccttcatggacgtattcctcaatgtggctccagagagtgactcgtacgatatcaagagtgacggcgaactaagcacctcgttgcgactaaacacaaagggccacattgagctaaaaaagaatatcctgtggaatgaagtaacgaaactgagaataatatacctggaaagcataagcttcctgaagatcgacatccagtatgccaaagagggcaattactggatcgagttgttccaaactaacgaaaacctgtatttgcccaaaaacatactcacaggacaaagatacatcggctgcggtgcattgaatggccaattgatcgagaccgtggaacttctggacgtgtctacaagcgagttccattggaacaacaaggacgagtccatcgaggacacctatgattacgtgaaggaggctgaactgttcttggaacaggaatttggcgaggtcctagacatggaacccgataaattcatgaaatggaagatggtcaaggcgcaaccaaacatcaacgctgctccatcatcgcctggacagcctttggccggccgttctcattcgaggctgttcagcgcgatcctggttgtctggcattacagcgaactcctgctcttgatcatcggcatataccttgtttctgtatacgttagggttttccaaaagagattcaagaagatcaggttcagaaggcaaagaagaaagtcgcattccgtggggctgctgcccatgtag

SEQ ID NO: 1618 - DNA, 852 bp, Saccharomyces pastorianus
atgtccgaatcatctgcaccatcgtctaaatcttctgtggaactgccacaagccacctggtcgcatctgcaaagatacccagcgctatccaagtttatcaagtatgcggaatcgctaccccctgtggagagactgatctctttcaaccttgttgtgttggggtccgtgaaccagtgggtttcggagtcgtccaactcccctcgtctggtcaagcagctggtcgctgctgggaaggacggggtcttcaagctggacgagttggtcaaccttttggtgttcaaagagggtgttgatggcttgctgtacgattggaagtcgcattctggcaccccgggcatctggctggtgtggttcttcgtcgactacatcgccaacatctctaacacgctgttgagggagttccttatcaagcctctgcacttgcaaggctccgctcccgcaaaggagatcggctctaccggagacgacaacaaggtcagcgactcttcgtctctaccccacgtggcagagctctcttctaccaccagaaacgcctcccaggagatccagtccaaggtcaagtccaactacatcgacccaaccagagacctagctaaggagaagtacgacgccatcgtgaagcccaccaccgacaagttgcagtccgtgtacatcgacccaaccaagaccaagctgaacgagacgtaccaacgtttcaccaccgtgtacgaaaacaacctgagcaagtccgaaagcgtccccaaagccatcgtgtccaccggattggacctgggcaatgctactatcgagaagctaaaggccgctagagaagaccaggccaactccaagccagctgttatcccaactaattag

SEQ ID NO: 1619 - DNA, 402 bp, Saccharomyces pastorianus
atgtcgttctggaagacattgcagagacaaccacgcaccatttcgttgtttaccaacgacatcgcgtccaatctcaagtcgcagaagtgcctccagtcgctgaagagcgacgtatcgcaccggttcgacgtcgagatcgccaaccggttccccacgtgggaccaactgcagtacatgaagacgtcgtgcccgcagggcacgacgtcattgcagaggcagatccccaagcttgccgcagtgctcaagtacaagcacacagaccccacgttcgggatggacctggagaagtgtgtccagaagggtctgtggaatccgcaggaggcgctgtgggtcgactgggagaacaagctggtgggcaatgagcccgccgacatcgacaagcacgttctccagcgcaagtaa

SEQ ID NO: 1620 - DNA, 1257 bp, Saccharomyces pastorianus
atggatagtcatctgcttccctggtggtggtattggccatgtgtgtactcgtctatcctagctacactcatatctctccataccatagtgagacatctactaaactaccgtaaaccatacgaacaacggttatcaattcgaatcttacttctagtacccatatttagtttgtcctgcgctagcggtataatcaaaccagacatagctcaattctacgtggaccctattagagagttttatgaagcatttgttatttatacattcttcacctttttgacgttgttgttagggggtgagagaaacattataacggttttgagcttaaaccatgcccccacaagacacccgataccattgataggtcgaatctgcaaaccaatagacttatcagatccatttgactttctattcgtcaagaagggcatactacagtacgtttggtttaaaccgttttattgctttggctcattggtatgtagtgcatgggaactacccaaatttgaaatttttttaaacgtgttctacaatatttcagtgacttggtcactctacagtttagcgttgttttggaagtgcctttatccggagttggctccattcaaaccatgggtgaagtttttatgcgttaaattgataattttcgcctcttactggcaaagcattataatccaggttcttgttgttaccggcaggttgggtactggaaaccaagatcggatatctggctatatatacaaaaatgggcttctgtgcattgaaatggtcccatttgccatcttgcatgcagtagctttcccctggacaaaatacactccaattaacataccttgtggtgctaggatgaaattcctatacgcactaagagattgccttggttgtggtgatctgatatgggatttcaagcaaacattgtttgctggtcctttatattataattataagaattttgatcctgaagccatggatctactaaatggtagacagcagtcagatgcgactatggaaagacaaaaacgtggtttgagatttaccaataatggccgaaacagttattgggttgaatatggaagcatccaaaacgagactgtttcaaaatctatggacgaaccatgggaagatgatattgctggccagagatctttccctgatgatccaaactacccagtcgttcacgattatacgatgggccatcgatatagtagaacaatgaacgatttgagaagagatattgaaagtagatcgtcaatggcttgttaa

SEQ ID NO: 1621 - DNA, 915 bp, Saccharomyces pastorianus
atgaacacttcagaactgtcgattgctgaagaaatagactacgaagctctcccatcacatgcacctttgtactctcagttactggcaggcgcatttgctggcataatggagcattctttgatgttccccatagatgctctaaagactcgagtacaagctgcaggtttgaataagaccgtctcttctgggatgatatctcagatatccaagatatctaccatggaaggatcgatggccctatggaaaggtgttcaatcggtcatgctgggggcaggaccggctcatgctgtatatttcgctacatacgaattctgcaaagctcgcttgattagccctgaagatatgcagacacatcagccaatgaagactgcattaagtggtactgttgctactattgctgctgatgcgctcatgaacccttttgataccgttaagcaaagattacagttggatactaatctaagagtttggggcatcacgaagcaaatatatcagcatgaaggttttgcggcgttttattattcctatccaacaacattggccatgaacatcccatttgctgctttcaactttatgatatatgagtctgctagcaagtacttcaacccacaaaactcgtacaatccattaatccattgtctttgtggtggattgagtggtgccacttgtgccgcattaaccacgcctttggactgtataaagactgttctacaagttagaggtagcgagactgtttctatcggaataatgaaggacgccaatactttcggcagagcttcgagagctatactggaggttcatggctggaaaggtttctggcgcggtttgaaaccaagaatagtggccaatatcccagccactgccatttcttggactgcatatgaatgtgctaagcacttcttaatgagtaactaa

SEQ ID NO: 1622 - DNA, 873 bp, Saccharomyces pastorianus
atgaatattctgttatttaagcgcgagcatggtcatggtggacagtcaagcgacacaacttcgcaagggtccctttctagtaccgcgcttcctgaatctccaggacttttagaagggaagattctccccaaattgcctactccttttgcaagaagtctctccaccattcctagttatgagcaaatgaagcgtactaagaaattgcccgattaccatttaaaaatagtcgttgtgggggacggtgccgttgggaagacgtgccttttaatatcttatgtgcaggggactttcccgacagattatatcccaactatttttgaaaattatgtgacaaacatagagggccctaagggccaggttatagaactagcgctgtgggacactgctggtcaagaggagtatagtagactcagaccgctctcatacacaaacgccgatgtcctaatgatttgttactctgtaggcagcaagacatcattcaggaacgtggaagatctttggtttccggaggtcaagcatttttgtccttctgcgcctatcatgctgattggcctgaagtcagacctatacgaagctgatgacctctcagatttggtggatcctgaggaggccgaatctttggccaggcggctaggggcgtttacccatgtccaatgctcagctcggttgaaagacaacgtcaatgaagttttcgaaactgccatacacacattgctatttgattccctgtattctaaggagccttcatatacaatcaaaaatccgtttaagaaatcttcagccaagtcaagtacagattactctgctagggatactagcatttccatttctaaaacaaaagggataagaaaagttaaatgtattctgatgtaa

SEQ ID NO: 1623 - DNA, 1191 bp, Saccharomyces pastorianus
atgtctgaaggtattactgaaattgaagaatcccaaattagtctaaccaactatgacaaggttgtctacaagttcgatgatatggaattggacgaaaacttgttgagaggtgttttcggttacggtttcgaagaaccatctgccattcaacaacgtgctattatgcctattattgaaggtcacgatgttttggctcaagctcaatctggtactggtaagaccggtactttctccgtcgctgctttgcaaagaatcgacacctctgttaaggctcctcaagctttgatgttggctccaaccagagaattggctttacaaatccaaaaagttgtcatggctttggctttccacatggacatcaaggtccatgcttgtatcggtggtacttcttttgttgaagatgctgaaggtttgaaagatgctcaaatcgttgttggtaccccaggtcgtgttttcgacaacatgcaaagacgtagattcagaactgacaagatcaagatgttcatcttagatgaagccgatgaaatgttgtcttctggtttcaaggaacaaatctaccaaattttcacattgctaccaccaactactcaagttgttcttttgtccgctaccatgccaaatgatgtcttggaagttaccaccaagttcatgagaaacccagttagaattttggttaagaaggatgaattgactttggaaggtatcaagcaattctacgttaacgttgaagaagaagacttcaagtatgaatgtttgaccgatttgtacgattctatctccgttactcaagccgttatcttctgtaacaccagaagaaaggtcgaagaattgaccaccaagttgagagacgacaaattcactgtttccgccatctactctgatttgccccaacaagaaagagacaccattatgaaggaattcagaagtggttcttccagaatcttgatctccactgatttattggccagaggtatcgatgtccaacaagtttctttggttatcaactacgatttgccatccaacaaggaaaactatattcacagaatcggtagaggtggtcgtttcggtagaaagggtgttgccatcaactttgttaccaacgaagacgttggtgctatgagagaaatcgaaaagttctactccactcaaatcgaagaattgccatctgacattgctactttattgaactaa

SEQ ID NO: 1624 - DNA, 825 bp, Saccharomyces pastorianus
atggttgatcaagtagatgtcataaaaagcgaactagcggaaaaagccctaaatgctttaattttacagtgtggagaaaacgcatctttacaaaatgataaaagcattcaaataatcatcaatatggggaagaaaatgggtataaaaaaggacaacattccccggattataccattgaccaaatgcaagttgttcaaaccaagagatttaaacatactgctaattaccaaagatccatccaccctgtatagagaaactttgactaaagacgagcatacatcggaattattcaaggagattataagtgtcaagaacttgagacgtagattcaaaggtagcaaattgacccaattgtataaagactttgatttgattgttgctgattatagagtccaccatttacttcctgatgtgctcggcaacagattttatcatggtagcaagaaattaccatatatgattcgaatgtccaaagaagtaaagttgaaacgccagcaaatggccgagaaatgcgacccaatttatgtgagagcgcaactgagaagtatatgtaagaacacttcatatatccccaatgatgacaattgtttaagtgtcagagtcgggcacatccaaaagcatactctaccagagattttacaaaacattcaggacgtggtgaatttcctgactgacaggagtaagagaccgcaaggcggcgtcatcaaaggcggaataatatccatatttgtcaagactagcaacagtaccagtttacctatataccgattctcagagacaaagaaaattcacgacagtgaggatctgagtgatataagattatag

SEQ ID NO: 1625 - DNA, 1278 bp, Saccharomyces pastorianus
atgcaaatttacaaggtatttctcacacagtctaataaactatttttggggtgtcttctactctgctttgtagctcagacatgttggcttgtgcttgtgtatcatcaacgtcagctagggttggattcatattttcgagaaagatcacgagaagcctcttcgagatatgactcttcgagaaaaaggtcattgaatcggatgttaaagctatccagcaacacgtatagtgataggttactggacgagcctgtggtaaagacgtcacagagagaaaatgccacattacttatgcttgtacgtaattgggaattaccgggagcactgcattctatgagatcgctggaagaccgcttcaataaagacttccactacgactggacttttcttaacgatgttccatttgatccagagtttattgaggccaccactgccatggcaagtggtaagacacagtacgcattgattccagcggaggactggaatcggccttcttggattaacgagactttgtttgaagaggctttacaattaatggaggagaagaatatcttgtatggtgggtccaagtcatatagaaacatgtgccgattcaactccggctttttctttagacagaaaatactgaaccagtacgattattatttcagagtggagccagatgtagactatttttgtgatttcccttacgatccatttaaggtgatgaggctgaataataagaaatatggctttgctattactatgtatgaatacgaagatacaattccgagtttatgggacgctgtcgaagagtatttagaggacacggagtatcgagacgtagacattgaaagtaatgcctttggttttgtctccaatttcgattttttcggcaaatcatttgctgtaatggacagtagtagcgattacaatctatgccatttttggactaactttgagatcggtgatttgaactttttcagaagtgagagatatatcaaatttttcgagcatttagattctaaaggtggcttttactacgaaagatggggggacgcaccagtgcattcgattgccgtgtcactcttattaaagaaagatgagattattcattttgatgaattgggatacaaacatatgccttttggtacatgcccgtctgcatactacatgaaactccaagaaagatgcctctgtgatagcaatcatcctgacaacatcgacctcaacgtcattagctgtttgagaagatggtggaaggatggaagtggtaaatacttcctcaagcatgattcatag

SEQ ID NO: 1626 - DNA, 1002 bp, Saccharomyces pastorianus
atgagtaaaaacagggaccctctattagccaacttgaatgcgtttaaaaacaaagtcaagtcagccccagtgatagcacccgctaaagtagggcaaaaaaagaccaatgacactgtcactactatagatgggacaactaggaagagaacagcttttgagcgtgcacaagagagcgctttgctttctgccaagaatccagcgttggcggaaatcaagaaggaagccggaagtaatagttccaacgccatttcgttggacgatgacgatgacgatgaagacgacaacgacgaagattttggtggttctccatcaaagaaagtaaggccaggttccattgcagcagctgctttacaggccaatcaaacggatatatccaagagtcacgattcatccaagttattatgggcaactgaatatattcaaaagaaaggtaagcctgtgttggtcaatgagttattggattacttatcgatgaagaaagacgataaagttattgaacttctgaaaaagctagataggatcgagtttgatcctaaaaagggatctttcaagtatctttccacctatgatgttcattccccatcagaattactcaagttgttacgttcacaagtgacttttaaaggtatatcgtgcaaggatttaaaggacggctggccacaatgcgatgaagtcatcaattcgttggaggaagacagtaagatcttggtattaagaaccaagaaagataagactccaagatatgtttggtacaatagcggcggtaacttgaaatgtatcgacgaagagtttgttaaaatgtgggagaatgtccagctgccacaatttgcagaattaccgagaaagctgcaagatttaggtctaaagcctgctagtgttgatccggcaactattaaaagacaaacaaagagggttgaagtcaaaaagaagaggcaaagaaagggtaagatcactaatactcatatgactggtatcttgaaagattattcccatagagtatga

SEQ ID NO: 1627 - DNA, 1506 bp, Saccharomyces pastorianus
atgataccgccacgcatagtcccatggagaaatcttgctgagttagaggaactaaaaggttggttttacccaaggaccaaagatatcatcgaagataaaagacatcgtgctgtgcaaagggtgcagagctaccagctcaaaggctcacaatatttgcctcatgtagtggactctacggcacaaataacatgtgctgtgttgctggatgaaaaagaaaccggttcggaaccgcatcgagactctgttcctatacgattgtcatacgtgatggctttgatccggttcgtcaatggtttgttggatccaactcagcaatctcagttcgccattcctttgcatacgctagctgctaagattggactgccgtcttggtttgttgacttgaggcactggggtacgcatgaaagagatttacctggcttagaaatgctccgttgggccgccaatgaagctttgtcttggctgtatgaccactattggaatgatcaagaattagaagatgatagagaggatttggatgatgacgaaaatggttatggatacgggaggaacaataaagagcagaaatataaggatagtttggctaaaacacttgacaagtggagacgactcaaaaacgagtttctagagcacagatgggtgtgggaaaatgcaaaggatagtctaattactagcagtaacttctctggagacaatttggttaattacgatgcccaaagagggaaaggtacacatgatagttcatctgaaattatgataagagaaaacttacgtcaatggcaagaactttggaaaatgtccatttaccatgaggaagtaattggggaatgtttcagcaattatgacccaattttgtttaaagtattagtactgaatttgaatgattttgactggaagttaatcgaatgggttgccaagaattacaaaacccaacaagatgacactaatacagttacagtgttgaaaaagaagttcgacgtttggaaagatttacaaacaagactattggacgtcataataggcaatcttaataacaagaatatcaagaataaatggcaaaactgggagaaagtcattgatgaaaatgcgtcatatttaatactgtatctttgccggtccatgctaactaaattagaagctgagaaggtctgtggaaattcctggagaagcaaaaaacgcaaaagacaatttgacagcacggtggaggtcgagacaaaactaaaagagtacatagacagcttatcgtcaaggtttaacgaaggcgaaataaaagtttacgatctcatccccagggaaaaaggagcccacatattgaagaaggagtctagtcccgctttgaagactgttaccaataatattttaggcgatttggcatctttaaagcagagactgtccaatggggaagcggttaataaaagacagaaacacgagggtgagacggctacatcgatgaagaattggtcaatgatacaaagttgggaacccaaaccctttggtgtcctgtag

SEQ ID NO: 1628 - DNA, 2595 bp, Saccharomyces pastorianus
atggactacgaatcgcaaataagaacaaagaagcggcatagaatcactttggtatgtaccaattgcaaaaaaaggaaaagtaaatgcgatcgaacaaaaccttgtgggacatgtatacggctgggagacacggaaagttgtgtttatttgaccgaaagcttaggaaatctggagagcagtaccgctttggatggggttgagcaagtaaggaaccagacaagctttgcagaaggatccaatctaggattgattaagaaaaaaaggctctcgctgtccaggcaagataatgattattggcaaagaatacgggaggaaacactgacacctggatactatgtgccgatgaatgaagaaacgccattatttattgacttgatccccaatggattctatttagaaactaagagatctgctggcaatctgtttgctctgtttacggatagagcaattgagaaccgtgatccatatttgaaagcaatggtgacttttaggagtattgcgatcaagaaaatgatgcaaaaattaggaaaaaatggtaataatgtgaaaaatggaagattacctcgatcttttgaggctttatccacatttgatgccgatgatgaacttcacaatagaagtgatattgttgaccaggacaataattttcgaacgcatcaaacaatacacaagtcgttgtttaacaaatttgcccagtacagagaaaataatgctacaaaatttaatgaagattctgaaaatatatcagctaaagattatttaccttctttaaaggtactggaagatgaaattctaacttattttgaacgaaaaatctataatatgatcccgattttcgatatgaatattttacgccatgaaattacagtcttttatcaaaatgtagtggacaaagggaatccaatatctgtaaaacattacgaccatatgatattttgcataattctactaattatcaagatatgccagctttctgttaaattttgtaaactgacgccatatatatatccggttcttttcgatatcgatacatctaagtttttggctctagtaaatcactacttatttgagatgaaaatcttaagaaaatgtaacttattacagctgcagtgtctcatattattaaggtttctacattggtgtgcacctgaggatggtgatggtcctgaaacccaatattgccaaatactaatggggaccataatatcttcatgtaaagaaatgggcattaactggtactgcttttcccaaccagaaaagtatttctttaaaataaaccgacagacaagaccttcatattcggtgatgaaaactaatgactatgtttcaatctttagaaaaatatggagttacgttttattttgggatagaaaaatgtgttttattagtggtgaagaatgtcaggttgggaaatccttacagtgtcattttgaagaagaagcgaatatcacaacatggtacattcgaatgttaccgcttgataccgtaatgaaaaaaattaacgatacgctgaatgatgatccgggaaaagtggatttaaattcaatacgtcgatctctaaatgatttgaaaaggaagtttcatattttgaaaagtatacccaatgatgaaaaagaagcgacaggtcatctgaactttgaattagaatggattatcgatttattctcatttaatttattacacggagaaatgatatctcatgaatacgattgtaatgttgtagaattttacagaagttttcaagatttatgggacatgaccgttcatttgtcagagaaatgctacaattattttttcgatagcgagtcgttagaagtggactcattggctaagttttacaccaatagaattgtggaaatcgttgcgaataagatcttggttatgattcctgcctttatcctcagagcagaccgattcaaggcaatacaacataatgacaagaaaaaaatgattgagtttctttacggaatctcgtccgtatactttaacgaatttggctttgaatactatcgctgttttaaaaagatgttcacagccaaaataagttacaagatcttgaatcgatcgtgtgaaaaagatgtatggagaatcattttgcaatttttactcaatgaattggtactggaagagcgtagcgataactcgaaggattccggggacatgagactaaaagatgtttgtccagtcatgtcgcaatttcagaagatggtacggaagtacaacgggtatggatcggatatcttaagtatatggaataatgagtttcaccccataggcagatacgacgataatatgaccactttcaagtttcatcttcgagcaaagaatatggagagttttttaaagatggagaaatattctgacaagttcaatattttctcatccttttacgaccatgccagttcacaattagccaaacatatagaagcaaatacaaactcgaacacaacaaacggaccgcacaccaaaacattgcacgaagaaacgttgtcaggccctgtcatgaccgctatacccgtcaatgatcttgttatttctgagtttgacatgattcaagacatttttgatccgttggactttgtgtcgtttttttga

SEQ ID NO: 1629 - DNA, 588 bp, Saccharomyces pastorianus
atgtttatcagctccattagattgtcctcacaaagactcttggtcaagaaaccgtttactgccgtcacgttgcgcgccgcaacggcactacccttaagatcatattctcaacctgcatcccttcaaaactccactggcttgacatggtctgacttcttcaagttgaggaaacaacaacggagaatcaacgtgggctcttcgctctttaccgggcttttggggtgtaatatttcgtgggcttacctctccacgatggaaatagatccaactcaactggtatttgggtttgacccattgaccgtcatctctgcggggataatggccgccggtgccctaggctacctgttgggccctatagttggttcgcaaatcttcaaactttctcatcagaagcaattggaatacttcaatgacaaaaataaagactttttgaaacacatcatcaataatagggtcgatgcatcgtctcaaagtttcagtaaccctgttccagactactacggcgagaagattggctctctaaaggaatacaaacaatggttaagggattgccatgcttacgccaagaaatccaaggaattcttgtag

SEQ ID NO: 1630 - DNA, 1086 bp, Saccharomyces pastorianus
atggctactgctgttaagttcatgcccacgctgggcagaaccatccacaggaggtcgctctatctcttctccgctgctgctgctgctgctgccacggctaccttcgcttactcacagtcccgtaagagatcatcgtctcatgggagcaacggcaatggtagcggcaactggggccgctccactgctgctgcgatggcctccgctgctccgctggtccatgtggccacgccagagaaagacaggtcgtacgaggacttccagaaggtctacaacgccattgcgctcaagttgagggacgatgacgagtacgataactatattggctacggtcccgtgctagtgcgtctcgcctggcacacgtccgggacttgggacaagcacgacaacacaggtggctcgttcggcgggacgtaccggttcaagaaggagtttaacgacccgtccaatgccggcctgcagaacggcttcaacttcctggagcccatccataaggagttcccatggatctcgtcaggtgacttgttcagtctgggcggtgtcaccgcggtgcaggagctgcagggccccaaggtcccctggaggtgcggcagggtcgacagcccagagaataccactccggataacggcagactgcccgatgctgaccagggcgctgactacgtcaggacgttcttccagagattgaacctcaatgatagagaggtcgtggccctcatgggggcgcacgctctgggaaagactcacctgaagaactccgggtacgaaggaccctggggggcggctaacaacgttttcaccaacgagttctacttaaacttgctgaacgaggactggaagctggaaaagaatgaggcgaacaacaaacaatgggactccaagagtggatacatgatgctgcccaccgattacgcgctggtccaggacccaaagtaccggaagatcgtgaaggagtatgctgatgaccaggacaagttcttcaaggacttctctaaggttttcgagaagctgctggaaaacggtattgatttccccaaggacgcacctgggccctttgtcttcaaaactctagacgaacaaggattatag

SEQ ID NO: 1631 - DNA, 582 bp, Saccharomyces pastorianus
atggcgtctaccacacaatcgaggtccttgaaggccacgggagaagagatctggaaaaacaagacagagaagataaatacagaactctttacactaacatatggctccatagtggcgcaattgtgtcaagattatgagcgggactttaacaaagtgaacgaacatctatacagcatggggtataacattgggtgcaggctcattgaggattttttagctaggacagcgttgccacgttgcgaaactctaataaagacgagtgaggtgctaagtaaatgtgcgttcaagatttttctaaacatcacgcccagtataacgaattggtcgcacaataaggactcattttcgttgatcttggacgagaatcccttggcagactttgtggagttgcccatggacgcgatgaagtcactctggtattccaatatcttgtgcggtgttctgaaagggtcgctggaaatggtgcagttggattgtgacgtttggtttgtatcggatatcctaaggggcgactcacagactgagatcagagttaaattgaacaaaatattgaaggatgaaataccaatcggcgaagattga

SEQ ID NO: 1632 - DNA, 1059 bp, Saccharomyces pastorianus
atgataagcaaacggttctttcaaaccagtgctaaaaaaattgcctttgcttttgatatagatggcgttttacttaggggcaagaaatctattccgggcgctagtgacacattgaaactactgaaccagaacaagatcccatatatactattaacaaatggtggtgggcattctgaaaaagcacgtacagagtttatctcaaaccaactggacgttgatatatcacctttgcaaattatccaaagtcatactccatacaagacccttgttaataaatactcaaggattttagctgttggtacaccttccgtaagaaaggtcgcagaaggctatgggttccaagatactgttcatcagactgatattgtcagatataatagggacatagcgccgtttagcggactttctgacgaacaattgctggagtattcacgagagattccggatttgactactaagaaattcgatgccgtgttagtgtttaatgaccctcatgattgggcagctgatctacagattattttagacgcaatcaacagtaaaaatgggatgttgaatactttgagaagtgagaaaagtggcaaaccttccatccctatctacttctcaaatcaggatttactatgggccaatccttataaattgaatagatttggtcaaggtgccttccgtttgttggttagaaaactatactccgagttaaacggtgaacccttgcaagatttcactttgggtaaacctacaaaactgacttatgattttgcgcatcatgtccttattgactgggaaaagagactgagtggaacgatagctcaatctattgaacagaaattaccactattaggcaccaagccttcagtttctccatttcactcagtgttcatggtcggtgataaccctgcaagtgatattattggtgctcaaaattacggctggaacagttgtttggtgaagacaggtgtttacaaggagggcgatgatttaaaggaatgtaaacctacaatgattgtagacaacgtattcgatgcagtgaccagaacactggaaaagtacgcatga

SEQ ID NO: 1633 - DNA, 1032 bp, Saccharomyces pastorianus
atgtcggaattcaaaacaggcctacttctaatacatccagccgtcaccacagcaccggagctggtggagaatatcaagactcaaactgcgtccaaaggaatcaaatttgaagaccagtttttaattaataaactaaatgatggatctgtaaagttggagaataacaaatatgaaactattcaatatttgacgtccgaagctcccaacggcatcattttccccaagaaactcatctctgttctagctgactcattgaaattaaatggctcactgatgggcttaagtgacgcttataaagtggatgcactaattaatggctttgaaatagttaccaagccagattaccgttgggttaagaaggacgtttccaatctgaaccaaacagtctccataccgttgaaggatagaaagcaagctggtaataccaaattgccaactttcaagaaagctgaatcttcaagtcataagttaccttcattcaaaaaggcaggggataccaagctacccgcattcaagaaagcagacgacgctaaagtgccctttttcaaaatagctgatgaaccaaaagtctttaaggtcgaagatgacctaattgaggatagcgatggcgatgaaatatctagtgactcttctaaagctcaatattttgaccaagttgatatcgataatgactccatcgaagaagaagacttaattgatgaggatgactctagcaaacccatgattaccatgattacatgcggcaaatccaagactaaaaagaagaaagcttgtaaggattgtacttgcggtatgaaggaacaagaagaacaagaaataaatgacataagatctcaacaggataaagttgtcaagttcactgaagatgagttgactgagatcgatttcactatcgatgggaagaaggttggtggctgtggctcttgctctctaggcgacgcctttagatgcagcgggtgtccttatttaggtctgcctgctttcaagcctggccaacctatcaacttggacagcatctccgatgatttgtaa

SEQ ID NO: 1634 - DNA, 468 bp, Saccharomyces pastorianus
atggaaccgaataagcgtttgaaaatgacaacaacctataaagactacgacatggaggagccattaacctcaaatgccaggccgctaaagaattctgtgattacaattagaataataaaatcgttcccatatagaaatgttaaaaacatagtgctgcatgattacgatcttgcagagaaaaccgcgagggatctgttcaatgatgttttaaacaaaatccagaatgaaggttcattaagacccttccgtaatgttgcatatgacactctaaaaatatatactcatgcacacggttccaagacggttaatcttgttattaacttcgaccacgacgacgactggattttagacttggaagacgacaagaagaaactattccaatatgggattgagaatgaaaccgagctgtcattgttcaacaaggatgattacctcaggtttaaggaaaatccagaagaaaaatggtga

SEQ ID NO: 1635 - DNA, 921 bp, Saccharomyces pastorianus
atgactagtttagacgatacaataatatcgcaccagaatttaatgttactggataacatgaccaattacaaaaagccagctattgactacttccatcatgagttcagtgatgcgagtttggaaatgccggcctcttggacactactgttgaaaatgcgtaagcacaaattacttcgacttccgagctgttcctccgaagactcgctggattacaatatgtacctcgtcagactacaccactgtctatggaggcgttggtctataaaccattacggtttgcagaactccaagtcagacccgctctctatcaactggaacaaggaaaccgacgtaaccgtgctgtatggtccggatttgactaacataaataacgttgaagacaaaatgtggcctacacagcaaccgagtggacagaagcaaccaaagaatttaaaatccgcattgaaaaaaaatccagaaattatattcgaggaggaaatcaaccagttcaacacaccagacaacaacgatgttctaggacagttcgaagatatctcatgcgcatcatctgtggactctcacacatcatctattttcgatcaacattctacatgtactaaggcctcttcaataaatgaagatgtagaagactttgaaatagaagaaaaagaacgcctccctaggaaattgaagttcaacgaagctgtgatgagaagagacattgattctaaaggcgcaattcacgagtcccttgtcaatataaacgatgtacaacgtcctcgtcatcatcgccgtcaccatcatcgtcaccaccgccaccaccaccaacaaaccccccgcaccgatgaaagaataaagaaaacatattctgaattcgacaactattcattcggcgccatggaagatgatgacattttctataaaaaccaagttgttttctaa

SEQ ID NO: 1636 - DNA, 1104 bp, Saccharomyces pastorianus
atgtcgaaacagtgggcgagtagtaacaacggagctttcaagagacaagtgtcgtcttttagagagacaatctccaagcagcatccgatttataagcctgcaaagggcagatactggctgtatgtctcattggcctgcccatgggcgcacagaacgctgatcacaagagctttgaaggggttgacttctgttataggatgtagtgtggtccactggcatctggacgagaaggggtggaggttccttgacatgggaaagcaattgggagatgagaatgatttcctagagcattggcacgatgccgctggcggaatcaagactgctaaagacgacactagcacgagtttcgccagcatcaagaacgatagtcaaagattcatggtcgacgccaccaatgaacctcactacggttaccaaagaatcagtgatctatattacaagagcgaccctcaatactcggcaagattcaccgttcctgtcctgtgggacctggagactcaaaccatcgtcaacaatgaaagtagtgatatcatccggatattgaactctagtgcgtttgacgaattcgttggtgaaaagtacaagaaggtggatcttgttcctgaacatctcaaacccgaaatcgatgcgtttaattcctgggtctacgacaacatcaacaatggtgtatacaagactgggttcgcagaaaaggccaaagtttacgaaagtgaagccactaacgtgtttgaacatctggacaaagtggagaagattttgagtgagaagtacgtggatttgaaggctaaaaatggcggtgtagatggcaagcaaaatatcttcgccgtgggagaccaattgacagaagccgacatcaggctgtatactactatcataagattcgaccctgtttatgttcagcatttcaaatgcaatttcactacaatcagagatggatacccgttcactcatctatggttgagaaacttgtactggaacaacgatgcctttaggtacactacggatttcgatcatatcaagctgcattatacgcgttcccacacaagaatcaaccccttaggaatcacacctttgggccccaagccagacattctacctttatag

SEQ ID NO: 1637 - DNA, 1080 bp, Saccharomyces pastorianus
atggtatttacaacaccacaaccacaacagagattcaactccactcctcaatctaagcatagtcttatcttctcaccagctagagctccctccatgcaaacaccttcttcgttgaaccaccattcaccttctgttgcgggttcatcatcttcaatgaagggtcacgatcgctcttcaagctttggtaagttttctttatctatcggacaaaacggtaaagcagcaatcctgggacctataaatatcgtatccactgataagtcacatatagaaaaaactgtgacaaaaagcacttccaatccttccgatcgtgtcgaaaagactcgcattctgtgtctattaaaaaaaatgagaaacaagagtggtaacgtcaataagaaatatagcaaaataccatttaaaaccatgacaagtctacagccagtgcccaccacgtattcgccaaccgcttcaaacattacaaaaatatctcctaaaaaatctagctctccaagaactccaaacgctaactcaaatctgaacttaaacttcacctcttttcaaatcaaaacagggtttacccccaacattgatggtattttacttgaaaacttcacatctcctaatgcagcatcagattcacacaacagtacatccaacaacaacttgaacaacaatactagtaataataacaatagccaattgcttttcagtttaccacttcaatcctcaccaagacaatttagatctcctgcaagattgatagaccctcttcccatatcggactggaataccaatctcttgatgtcgccacctaggacaaccaacttcgaatctacgaatggtcattttaatacaactttctctcaagcgtcgatgttgagaagaccttcactaccgcacatagatgaagtaatccctcaggactcgaactacccagatagatctgattatctatccgtggatcaaaacacaagcgatcacaatggcacattctcagaacattcttataataatatgatgaaatcttcaataatttcactgcctatggagaaagacgatgctaccatggctttgaggaaactcgtcaccagagagtga

SEQ ID NO: 1638 - DNA, 2517 bp, Saccharomyces pastorianus
atgttcacatttttacctgttactcatcccacttcggatacgaagcatcccttgctgctattgcagtctgcacatggtgacaagtacttctttggtaaaatcagcgaaggttcgcagagaagtttaaccgaaaacaagatcagaatttcaaaattaaaggacattttcctcactggcgaactaaactggtcggatatcggtggattgcctggaatgatcttgaccattgccgaccagggcaaaagcgatctggttttgcactacgggaatgacattctgaactacatagtttccacttggaggtactttgtatttagatttggtatagatttgagcgatcatattatgaaggataaggaagtcttcaaagacaacataataagggtcaaatcctttaacgttttgaaaaacggggggaacggcacggatgaatttttcaacagtttccaaaaaggcgttttaagttctatagtctccaagatgttccctaagcatgcgcccaccgacagatatgatccttcgagtgatccgcatttaaacgtggaattgcctgatctggacgcaaaagtggaagtcgctacaaattacgaaatcagtttcaatcctgttagaggtaaattcaaactcgatgaggctgttaaattaggtgttccgagagggcctttatttgcaaagttgaccaaaggtcaagcgattactttagatgatggtacagtggtgactcctgaacaagttttggagaaagaacgtcactttgccaaagtgttgatcttggatattccagatgaccaatatttaagcgcgtttgtagaaaaatttaaagaatatgattgtgctgagcttggtgttgtttactacttccttggtgactcagtcactatcaatgacgatctattcaaattcatcgatcttttcgagaaaagcaattatggtaaagttaatcatatgatttctcataataagatttccccaaatacaatatcattttttggctctgctttaaccacattaaagttgaaggcgttacaagtcaacaactacaatttaccaagaacagaccgtgtgttttccaaggatttttacgaaacttttaacaagccactcgctaagggaacttccctgtgcgaatcccaagaaacacccttgagaacggtcatagaaaaggataatattcatatttttgcacaaaataaaacagtgactttagaaccatttcatagaagcgaagaatccatgaaatgcgaaataaacggtagcgtaccagctttatcgtggaagcagatttttgaggaccatatacaacccttaggtttccccctagctgatatcgacacagttatcaacgatcaactgcatgtgaataacttcaataacacaacagaaaagaaaaagcatgttgagattattacattaggaactggaagcgcactaccatccaaatatagaaatgtcgtatccacattggttaaactaccatatacatattccaatggcgatatcgtaaataggaatattttgttggacgcgggtgagaacaccttgggaaccatgcatagaatgttttcgcaactggcggttaaatcaatcttccaggatttgaagatgatttatttaagtcatttgcatgcagaccatcatctggggataatcagtattttaaatgagtggtacaagtataacaaggatgatgaaatgagttttatatatgtggtaactccatggcaatacaacaaatttgttaatgagtggctggttttggaaaataaagatattttggataaaatcaaatatatcagctgtgaacattttattaatgattcgtttgttagaatgcaaacacagtctgttccgttgaaagacttcaacgagcttatacaagaaaacagtggtcaggaagagagaaaaaaactagacttggacacaaattcttcgtacagggatatcaacctaattaaccaaatgtatgaggatttatcgatatcatatttccagacatgcagagcaattcattgcgattgggcatattcgaattcaataacatttcagatgaacgaatcaaataaacacgatacattcaaagtttcgtattcaggcgatacaagaccgaatattaaggaattttcttctgcaattggttataattctgatttattgattcacgaagccacactagaaaatcaattgatggaagatgctataaaaaagagacattgtaccatcaatgaggccattggtgtttctaacgaaatgaatgctaggaagttgattttgacgcatttttcccaaagatatcccaagttgccccaactagacaataatattgacgtaaaggcaaaagaattttgttttgcctttgatagtatgattgttgattatgaaaaaattggtgaacagcagaccgtttttccgttgttaaacaaagcatttgctgaagaaaaggagcaagaagatgaatctgcaggatctgaagacgttgaagatgtagacattacaccaaagaaacaaaagaaaagctaa

SEQ ID NO: 1639 - DNA, 963 bp, Saccharomyces pastorianus
atgtcgaaacctggtcgtactattttagcaagcaaaattgctgaaacgtttaatactgagattgtcaataacgtggtggaatacaagaaaacacacaatgacgagggcccactgcttgtagggttccttgccaataacgatcccgcagctagaatgtatgctacatggacgcaaaagaccagcgaatcgatggggttccgctacgatctaagggtgatcgaggacaaggatttcttggaagaagctataatacaagcgaatggtgacgattctgtcaacggtatcatggtgtatttccctgttttcggtaatgctcaagaccaatatttgcagcaggtggtctgcaaggaaaaggacgtagaggggctaaatcatgtttactatcaaaatctgtatcacaacgtcagatatctggacaaagaaaaccgcttaaaatccattctgccttgcaccccactagccattgtcaagatattggaatttttaaagatttacaacaatttgctgcctgaggggaacaggttgtacgggaagaaatgcatagtaataaatagatctgaaattgtcggcagaccattggcggctcttttggctaacgatggtgccacagtgtactcggtggacgtcaacaacattcaaaaattcacccgtggtgaacgtttgaaactaaacaaacatcatgtggaggacctgggagaattctctcaagatctattaaaggaatgcgctcttgacgccgacgttgtcatcacaggtgtccctagcgagaactacaaattccccaccgaatacatcaaagatggcgccgtatgcatcaacttcgcatccaccaagaactttagtgacgacgtcaaggaaaaggcttctctttacgttcccatgaccggtaaggtcaccatcgctatgttgctgagaaacatgttgcgtttggtaaaaaacgtagagttgtcaaacgaaaaataa

SEQ ID NO: 1640 - DNA, 1041 bp, Saccharomyces pastorianus
atgattagaaccgtgaagcctaagaacgccagagccaagagagctctggtaaagagagaagccaagttggtagagaatgtcaagcaggcgcttttcgttccaggccaaacttgcaataagaacctgcatgatatcatggtagatttgagtgccttgaagaagccagatatgaagagattcacccgtaagaatgatgttcatccatttgaagacatgacgccgttggagtttttcagtgaaaagaatgactgttcattgatggttttgatgacaagttccaaaaaacgtaagaacaatatgacatttgtacgtatgttcggctacaaagtatacgacatgattgaattgatggtcgtagataacttcaagttgctctctgattttaagaagttgacatatactgtagggttaaagccaatgtttacattccaaggtgctgcatttgatacacatcccgtttataagcaggttaaatctttgtttatggatttctttagaggcgaaactactgacttgcaagatgttgcgggtttacaacatgtcatttccatgaccattcaaggtgacttccaagacggtgagccattaccaaacgttctattccgtgtttacaaattaaaaagttataagagcgaccaaggtggtaagagattgccacgtattgaattggtggagattggacctcgtttggacttcaaaatcggcagaatccatactccaactcaagacatggtcattgaagctcacaagaaagctagacaattagagatgagagccaagaagaacgtggacatggatatcatgggtgacaagctgggtagaatccacatgggtaaacaagacttgggtcaactacaaacaaggaagatgaagggtttaaaacccaaattcgatcaaagcgcaaaagcagaagaacgcgacggcgacgtggacgaggactacgaagatgaagcgtcgtattccgaggagggacaagaatacgaagaggaattcgtcagtgccactgacattgaaccatctactaaaagacagaagaaatag

SEQ ID NO: 1641 - DNA, 3474 bp, Saccharomyces pastorianus
atgaaccaagagagagtacacctacgtttgaggaaagaactcagcgcacccattgcggtcgttgagaatgaatccctagtgcaattatcatacgaggaagaaagccaggcttctcttatggatatttccatggagcagcaacaattgagactacactcgcattttgataattccaaggtctttaccgaaaataacagatatgtcgtcaaaactcttcagtcgcaatacaacagcgggtttagcgaggatgacgaattgaatggatatatcgatatgcaaattgggtacgggctagtcaacgacaacaagaaagtctacatctggaacattcattctactcaaaaggacacaccgtacattaccgtgccatttctttcgggtgataatgatgaaacagcaattgtgccaaggtgcatattaacatgcccagcaacgatggacgaatctccgttagcactgaaacctaatgaccaggacgaaaccggtgggatcattattattaagggcaataaggcgatttattatgaagatatcaattctataaacaacttgagcttcaagctatctcaaaaattctctcacgaattagaacttcctatcaactcctcggatggggagaaatgtgacttgatcttaaactgcgaacctgccggtatagtccttaccacaaacatgggcaggatttttttcataaccattagaaattcagttgggaaacctcaattgaaattgactaagcaattgaataaacctttcaatttaggaatttggtctaaaattttcaacacgaacagttcagttgtttcattacacaatggtcccatcttaggtaagggaacaagattggtctatgttactactagcaacggaagcttccaatcatggcaactatctgccaccaattctcacccgaccaaattgattgatgttagtattttcgatgctattttggagtccctacaagacttgtacccatttgctcacggcacgctgaaaatatggagttcccacccattacaagatgaaaattcacatctattcctgtcatccatttacgacggttctaataatgaaacatactatattctctctacgattatcttcgattctacctcaaacagttttactatcttttctacttataggcttaactcgtttatggactcgatcaacgacacaaactttaaacccaaaatattcataccgcaaacggaaaataccgatgattctaatgaagttacatccattttggtaatgtttcccaacgctgttgttattactcaggttaattcaaaattggattctagttactctttaagaagaaaatgggaagacattgttagtcttagaagcgacatcgagattattggctctggctatgactcgagttctttatacattttgaccaagcaaatgggtgtgttacagatcttggtgaaggaaaatgagaaaaaagattcaaaaccagagattggatttgtcaaatcccatgttgaccaagccgtctatttctccaaaatcaatctgaatccaattgattttaatttgccctccgaaatttcattggatcaagaatccattgaacacgatttaaaactaacaagtgacgaaattttccattccaatgggaagtacattccaccaatgttaaacactttagagcagcacctttctgttcgcaaagaatttttccaaaatttcttaacttttgttactaaaaactttaactataagatatccccagaacttaaattggatttgattgagaaattcgagattttaaattgttgtatcaaattcaattccatcgtaagacaatctgatgaattaaacgaaatttgggaaaaagttatatcaaagtataatctaactcacaacgaaagtttaacaactgaaataatcgtcataaatcgccccgataaatttcccgtaattctaaaactctttttgaatcacgttatctttgttttgtttccatcacataatctaaatttcaaattaagcatcaacgaattaatcaattcctgcttttacagtggcatactcgaagaaggtgaaaaagctttaagatatgatcttctagaactagatccaatggaagttgatacatcaaagctaccatggttcgtaaacttcgattatttgaattgtatcaaccaatccttttttgactttacattttcatgtgaagaagcaggaaacttggccgtttatagtgaaaatttgttagagacagccaaaatcttatactaccaatttgaccaatttaaaatttggatgaatacgcaacctattggatctgtaagcgcaaatgcaaacttcacaaaaatcaacaatctttacgatgaaaatcatttggattggaatcatgtgctttgtaaagcaaacctaaaagaacagtctattcaaataacagaattctaccaagatttgcctggattagtccagacattacaaactttaaaccaggatgatccggcgattatgtctctatatgaaacgtttttcaatgaatttccagaggcctttagttttactctatttgaaaatttaattaaacacaaaaaattgaacgacttgatgtttagattcccacaacaacacgatgatttggtgaagttttttcatcaatcaggtccgaagtacggtcatgtggcgtggatccaacaagttttagatggatcatatgatgatgcattgaatactttgaaaaatatcactgtcgatgattcgcaaaagggagagaatttgaatgaatgtgaattacatttgaacgttgcaaaattaagttcgttattggtcgaagaaagtaacctggatatcaacagcttgagaaatattcaatataacctagatgcaattgatgccgaaaaaaaactttcaagcctattgaagaagggcgaagttcagatatataagaagttcgaaactagcgttttcaatgacgttttcaacatactagtggaagaacttaaatcaacaagaatagttagtctatcggaacttattgaactatattctatgttcgatgatgaagatagtttatttattccattaagactactttctgtcgacggagacttattaaactttgaaatcagaaagtttctaaattccttggtttggagaagaatcatcttgctggataattataaaggagagaataaactgcttcagcacatagtcatgcgtgtgtttgatgaagaattgttcaaaggcaatgaattccccttgcccagtgtggatctcctgtgcgataaatcgttagtgaccccagagtatataaacgaaacgtacggtaaattttccgttaatctagactccatacgcgaaggaatatatgaagagatatctgaactagaatcgttgaattcggataactcactggagatcaaactacgctcaactattgggtctgtagcaaaggaaaaaaagtacacaatcaattacgaatctaacaccgtagaatactaa

SEQ ID NO: 1642 - DNA, 402 bp, Saccharomyces pastorianus
atggactcaatagatgaacaaataatcacgaagcgaaaagaactgcagtcgttgcagaagataacgagcctgaccgatggactgaaacttcaactagtcaagctgaatgagcaagtcaaagaaatgggtacaaatgcggaagcagttgcgcagttgatgaacaattgggactctataataaacaatatatcacaggctagtttgggcttgctacaatacgcggaaggtgattatgagataggtccatgggaagattctaagaaacgtgagtctgaacagcaaagggagaaagatctaggatcccacgagaaaaacgagaatgatgacgataatgacgaagaggaagatctggtacccttgcctgaaactatggtcaggatcagggtagatggtaacgaataa

SEQ ID NO: 1643 - DNA, 1836 bp, Saccharomyces pastorianus
atgagttacagcgactacagcgatggtgcagacgatattcctgacttccacgatgaaggtgagttcgatgattatttgaatgacgaggactacgatttgatgaatgaggtgtttccccctttgaaggaggagttgcgagactaccatggctgcgataatctcactctgaaactagccttactggacaatgatttcgatctcgaaagcacggtagtggagctgaagaaaaccttgaagaagaaaaaggcacctaagaagccaacgaatactgctaacggtactgccaacgtagcccaaaaactggctgacgtatcgatctcgaaaccaaagtccaacgggcttccagattggctcgacgaagaagaagaagaggatgaacgcaaggattctgatgcaggcgatgacgggaggctcgtgcagagatactacaagaccacggtacccacaaaacccaaaaagcctcaagatatctctgcgttcgttcaatcacaattaccccatttaagttttgtggttcttggccatgttgatgcgggaaagtccacgctaatgggtagacttctttatgatttgaagattgttaatcaagcacaactaagaaaattacagaaagagagcgaaaccttgggtaagtcatcgtttaagtttgcgtggatcatggatcaaacgaatgaagaacgggaacgtggtgtaacagtctccatttgcacgtcccatttctccaccgaaagggcaaactttaccatcgtggatgcacccggtcacagagactttgttccgaacgccatcatggggatatctcaagcagaaatggccattctgtgtgtagactgtagcaccaacgctttcgaatcagggtttaatctagatgggcaaacaaaggagcatatgctgttggcatccagtctgggaatccagaatttgatcattgctatgaacaagatggataatgtaaattggtctcaacaaaggtttgaagaaattaaatcgaagctgttgccatatctagtggatatcgggttttgtgaggataacatcagttgggtacctatcagcggattttctggtgaaggtgttcataaaatagattacccaaacgaagtaaaacaatggtacaatggtcctactttaatggccactttggaaaataccgcgtctgaaatctcaaaggagagtaaaaaaactactgaagaggatccatttttattttctatattggagatcattccactaaagaaaacaaataacgaattagctttagtttcaggtaaattggaatcaggctcaattcagcctggtgaatctttgacgatatatccgtcggagcaaagttgcatcgtggataagattcaagtaggttctcaacagggacaatcaacaaaccacgaagagacagacgttgctatcaaaggtgattttgtcactttgagattacgcaaagcttacccagaagacattcaagacggcgacttggctgcatcagtcgattatttatctgtccattcggcacaagttttcatcttggagttaaccacatttgagatgaatagacccttgctaccaggaacaccatttattcttttcattggcgtcaaggagcaacctgctaagatcaagaggttaatatcgttgattgacgaggataacaacgttactaagaagaaagttagacatttgggttcaaaacaaagggctctggtggaggtagagctaattgaagtcaaaagatggattcctctactaactgttagtgaaaatgaccgtttgagtagagttgtacttagaaaagacggcaggaccattgcagccggtaagatctccgagatatctgaataa

SEQ ID NO: 1644 - DNA, 588 bp, Saccharomyces pastorianus
atgattagtagaactgtgtgccgcagatcatttagtaccagtgtttccattgggaaacagtttgggtttccgcagacacaagtgacgtctatctacaacaagaccaagagcgcatccaactataaagggtatttaaaacagaaagatgctccaggaatgcattatcagccatcagaatccatcgccacgggttccatcaatagtgaaaccgttcctcgtagcttcatggcaactaatgaccctcggaaggagttcgatatgcctgctcaggtcgttcaagcgacgcactctcccaacgttctcgtaagtaaaagcacagtgaacggcaagacgtatcatttggggccacaagaggtcgagaagatccagagattgcgtcaagagaaccctcagaagtacacacgtaaggttttggccgccaagtatggcgtatcgccgttatttgtatcattgatttcgaagccaaatggccaacgggcgcaagaaatggagggcaggctgcaagaaattaaatcacgctggaaggacaagaggtttgtggccagagaggaccgtaaacgcagaaagctgttgtggtaccaggcgtga

SEQ ID NO: 1645 - DNA, 3231 bp, Saccharomyces pastorianus
atgcgtgattcagagtgccagggaaggataagggagatattaaaagagtatacatcgaaagaagtaacgcccgggctgctcttgacactgcgaaaactggcgcaaagaacaaatactagtttagagcaattcattgccggttgtcaagcattgacaaagttcagcagtagcgatgtggttctctttaacgagctcagggagttgctcagagataattccgagcaaaatctggcagactcgaagaaagctgtaccttctatcaacaagagaaagaagtttaatattcaattggatttcgacgataatgaagatgaactggctcctcctgttcagaagaaacccatgaatccaagcacaatgttcaagaggattgataaatccagagcgaaacaattaaagcaatactctcccgccgcaaaggaccttcttttaactgacaaattcgaaatgcagacgcaacaagatcatatcggagtagtggaacacgaaccgtctcgaagtgaactggtagaggaggacagagaatggtacgatagtaatgaagaatatgggagttcggtgttggaatccctatcccggccacttgaagaaggtaaagaaataccttccgtcatcaagagccgtgataatgaagatgccttacgaaacaacgttcaactatacccgatcccactaaaacaaaggacggaatggattcctcccttcttatcaaagtttgcatctcaaaacaaagtatccaattccataattattggttctatttccgaaacctctaaccaatcagcttcagtaacaatggtgaacccattcaggaatcctgaaagtgaattttctctgaatgccagaagaggcagtaaattggtagccctaaggaggataaacatggaacatgtccaacaatcacgagacaatactgatgtcttgaacactgccatgggagaagtgctaggcttggaaaataacactaatgcaaaagacaagagccgctttcaagaaaacagcaatgatgattcagcggtgtacactccatcaagggaagaaattaaacgcacgagagaagaattacctgtattccgctgcaggtctcagctgttgtcactcatcagagaaaatcaagtagtggtaataattggtgaaaccggttcaggtaaaaccactcagttagctcaatatcttcatgaagatgggtattcggacagcagaggaaaatctatcgtcgtcacccaaccaagaagagtggctgcaatgtccgtcgctaaaagagtcgcaatggaaatgcaagtcccattgggtaaagaagtcggttactctattaggttcgaagatatgaccgatcctgaatatacaaagcttaagtttgtcacagacggtattttgcttagggaaactttaatggatgacatgctagataagtatagctgcatcattattgatgaagctcacgaaagatcattgaatacagacatcctacttgggttcttcaaagttttattggcacgaagaagagatttgaaactcataattacttcagccacaatgaatgctaagaaattctcaacattctttggaaacgctccccaattcactattccgggaagaactttccctgtacaaacaatatatacttccaacccggttcaagattatgtggaagctgcggtttctcaggcggtgaaaatacatttggccaatgattgttcaagtggtgatattctaatcttcatgacaggtcaagaagatattgaaacaacctatgatactttaagggaaaagttcctacaggtatactctaaaaaatttggtacagcaaaaattgaagaaatcaaggatatcgaaatcctaccaatttactcagcattacctgcagatttgcagttcaaaattttccaggatttgcatggcactaaaagaaagattatcattgcaactaatattgctgagacttcgttaaccattaaaggcatcaggtatgtcattgactgtgggtattctaagttaaaagtttacaacccaaagattggtcttgatagcttggcaataacgcctgtctcaaaggccaacgcagatcaaagatctgggagagctggtagaaccggaccgggcatggcgtatcgattgtacactgaagatactttccaagaggatatgtacatacagacaatacccgagattcaaagaacgaatttatcgaatacacttttactattgaaatctttgaatgtcactgatgaattaagtaagttcccgttcattgacaaaccacctttacaaacatttttgtcttcattgtatgaactgtggttcatcggggccatggacaacaagggtcaattaacgtctttagggctgaaaatggcaaaactccccttgcaaccttccctttccaaaatcttattaattgcagtacaaaacggttgtagtgatgaaatgctaaccattgtatccatgctttctgttccacaagttttttatagacctaaggaaagacaaaaggaagcagacgttgcaagaaataaatttttcatcgccaagtcagaccatttaacactgctaaatgtatttgttcagtggagagcaaataaatttagtccacattggtgtaataaacattttgttcaatacaaatcacttgtcagagcacgggacatccgagaccaactattaagaatcctggtatctcaaaacattcccgtagtctcttctggtaaagattgggatatcattaaaaaatgtatctgttcaggatttgctcatcaggcagctaaaatatcagggttgagaaactatgttcatttgaagactggcgttggtgttcaactgcatcccactagcgcattgcatggattgggtgatttgccaccctacgttatatatcacgaactattaatgaccagtaaagaatacatttgttgtgttacatccgtagatccattctggttaatggaatacggcgggttgctctacgacattaagcgcgtaaaggacaatcaagaatctgaaaccaaaggtttatttggtgaacactatggagatgttgttgacgtggctgaagatgaaatagatgtgaatatcaaaaaatatagagctctaagggatggcgtggtacaaaatctaataaagtcaaacaacacaaatgaaggaaagagtgagcagaaactccaaaaggaaaatattacaatcaataaaagagagccaacgaagcctttcaagagaagaaggacatttttttaa

SEQ ID NO: 1646 - DNA, 1014 bp, Saccharomyces pastorianus
atgaatcagtcttacgaagcagaaaatgtcaacatgggtccagaagacgatgatgaatttgatggttattttgaagatctaaataacgacaacttggcaaataccaatagtggtcaaagggtcggtaccaatactggtttaacgtttaacgatgaaatggacaccaacgatgatgacttcttggacatttacaatatgtctcctagagaaagattgatgcatacttttagaaaaaacgctcagaaagtacaattatatttctattcattaagggtatggcaacagattttaattatcctttttggcataatggttatgattatgggtgttctattgcttgtgttccataacacaattctacataaagtcgttgttacgtcaaacgatctgagagaaaagatgtctacacatttcattttgatagtgctgctattctttgtcgcatttccccctatgatcggatactccttactgtccactactactgggctgatttatggcgtcagttttgaaggatggataacgttagctttcgggtctgtgacaggctccattgtctccttcatagtatttaagacaattctacattcaagggctgaaaagctagtgcacctgaataaaagatttgaagcattggcttctattctacaagaaaataacagttattggatcttggcattactgagattatgcccattcccttactccttaactaacggcgccattgctggtgtttacggtatttcggtacgcaattttactattgccaatatattaaccactccaaaacttttcatctacctgtttattggttctcgtattaagagtctcgcggaatccgagtctactgggtccagagtatttgatttgctcagtattctagtcactttaattattttaactttgacagcatggctactgtacttcaaaactaagaaaaggtacttggaattgcaaaaccaagagcgccacgtatctcccgaccaaatacccgagatgtcgtttgaggtgtaa

SEQ ID NO: 1647 - DNA, 2757 bp, Saccharomyces pastorianus
atgagcaacaaaatatcagatcttacatccacacaaaataagcccctcctcgttacgcaacaactaattgaaaaatattatgaacagattttaggtagctctcagaatatcattcccattctaaaacccaggaccaaatctagtaagcctcgtaaggataatgtcaatgctggaagagtggaggtagatgctaggggaagactgcaagatagtaagggtatgattaccaaccaagtaaagtttaatttagacaccggagatgaggagaaattagatgacgagcaagagactgtcacagaaaatgatagtagcgatatagatatggaagatgtggacgacgacgagggggaagaagaagaagaggaagaggagagagtatctttggcaagtaaatgcaaatcatttctttacaatgtctttgtgggaaactatgaaagagacatccttattgaaaaaatctcctcccagaagcaacatgccatgtgttttgaagaatggtgttctgcgggcgcaaggctggatgaactcactgggaaaatagcgtggaaacagaaactggagtcgcccctatatgattacaagctgataaaagatctaacatccagactgcgcgaggaacggttgaacaggaactactctcaactattatacatcatccggaccaattgggtacgcaatctgggcaacatgggtaatgtaaacctttataggcattctcatgttggtacaaagtatctgatagatgaatatatgatggagtccaggttagcgctagaatcactaatggagtccgaccttgatgataattatctgctgggtatactacagcaaacaagacggaatatcggcaggaccgctttggtccttagtgggggtggtacttttggccttttccacattggtgtcctcggtacattatttgaactcgacgtgttgccaagggtgattagtggcagtagtgctggtgccattgtggccagtatattatcagtccatcataaagaagaaatccctgtgttgctaaaccatatcctggaaatggaattcaatatttttaaggacgataaacagaaaagtgaaagtgagaatttactaattaaaatatccaggtttttcaaaaacggtacatggtttgataataagcatctagtaaatacaatgatagaatttttgggcgatttgacctttagagaggcgtacaaccgaaccgggaaaattttgaacataacagtttcccctgcatcgttatttgaacaaccacgtttgctgaacaatttaactgcacccaacgttctcatttggtcagcagtatgtgcatcatgctcgttaccagggattttcccctcgagtccgctatatgaaaaggaccccaagacaggggaaaggaaagcttggaccggaagtagttctgtcaagtttgttgatggttctgtggacaatgatttacccatatctcgtctttctgaaatgtttaacgtagaccatattatcgcatgccaagtgaatattcacgttttcccctttttgaaactatcattatcctgtgtgggcggggagattgaagatgagttcagtgcaaggctgaagcaaaacttgtcgagcatatacaattttatggccaatgaggctattcatattttagaaatcggaagcgagatgggaattgcaaaaaatgctctgacaaaattaagatcggtgttatctcaacaatattctggtgacattactatcttacctgatatgaatatgcttttcaggatcaaagagctattatcaaatccgacaaaggagtttttgttaagggaaattaccaatggggcaaaggctacgtggcccaaaatatccattattcaaaatcactgcggccaggaatttgctttggataaggcaatctcttatacaaaaggcagaatgattgtcacttcctctttgaaaaaccccttgcagtttgcagattcggctattggtttaatcaaagccccagagcaagtcccagaggaatccaaagatccagcaaatgtgacgttactaaccagaacaccaacaaagggcgagaaagccggtaatcatattgccagtgtattggatgactacttgttagaatccgaatctaccaactctttattattgctaagagaaaatgcaagcacgtatgggcgtttgccctccggcttcagaccaaggtattccataacatctgcttcgttgaatccgcatcatcaaagaagaaaatcggatactattttcacttcaagaagaccaggaaaatctttctcattttcagttgcctctccaacatcgagaatactaagacaatctaataaaatcaatggacacccacccccaattctgcaaaaaaaggcatcctctggccgattgatgttccctgtggacgtcaaagcctatggttcagaaagccatgagcttgtcccacattctgctagtattgaaacacctacaatggtagacaagaaactgcattttggccggaagaataaatatctaaagcatctgaacaaaaaatgggttagcaatgggaacgcattgtacgcagatccagagaaggatgaacatcctacattaaggctaatcagcaatgtcgattcgaacgcaatgatacaccacgatcttgcaaatacttttagacgtcatagcgttgatggaagaccaccttctcaagccataaagagctcgccatttcgctcaaggccttcatcttcagcacagcacaagagcactaataatgttacccaataa

SEQ ID NO: 1648 - DNA, 1251 bp, Saccharomyces pastorianus
atgggttccaagaaagttgaggctaacgaagtgccaaaattaagtgtcaaagagaaggtcgtagagaagaagtcatcttcttcctcctcatcatcatcctcttcttactcctccagttccagtgatgagtcctcgagcagcagtagcagcagcgactccgaatcaagttcgtcatcatctagctccagctccagctccagcgactctgattcctctagcgactctgattcttccagcgattccgattccgactccagttccagcggatcctcttcctcttcctcttcctcttcctcttcctcttcctcttcttcttcttcttcctctagctctagcgagtcttcctccgaatcggaagctgaagacgacaccaagaagagatcgagagaatccgataatgaagatgtcaaggagactaaaaaggcaaagactgaaccagaatcttcatcctcttcctcgtcagattcaagctccagtgagtcctcttcatcttccgactccgactccagctccagctccagctccgactccagctccagtagttcctccgactcagaatccgactcgagctcaagctctggctctgggtctggctctagttctagttctagcgactcttcgtcagattcggattcagaatcggactcgagctcaagttctagctctagctctagctctagttctagcgactcttcatctgattccgactcagactcagactcagactcagactcctcttcttcctcgagttccagttccagctccaactccagctccagctcgagctccagtgaatcctcatcatcatcatcatcatcatcatcatcatccgactccgactccgactccgactccgactccgactccgactccgattctgaaacaaagaaaatatcaaaagatgagcccaaggccgaagaaacccctgcttcttctaatgaatctactccatccacttccgtttcatccgatgctagtaaattgaatattccagccggaaccgatgaaatcaaagacggcgaaagaaagcatttttccagagtagagagggccaagatcaacttcgaggcttgggaattaacagacaacacctataaaggtgctgctggtacatggggagaaatggctaacgaaaggttaggcaaagtaagaggtagagatttcacaaaaaacaaaaataaaatgaagagaggttcttatagaggtggttccatcactttagaaagtggttcgtacaagttccaagattag

SEQ ID NO: 1649 - DNA, 1806 bp, Saccharomyces pastorianus
atgctcaatcatctcagtcaaggctcagatgatatacaagacgagaagcaaggcgactttcccgtcatcgaagaggaaaaaaaccaaaccgtcactttaaaggactcttatgtcagtgacgatgctgccaactccacggaacactacaacttgtctccctccctggaggaggatgagttcgaggcccccacggacgaagaattgcggagtttgagacatgttgggggtaagatccccatgagatgttggctgatcgcgattgtcgagctgtccgaaagattctcgtactacggtctttccgccccattccaaaattacatggagtacggtcccaaggacacccccaagggtgtgctgagcttgaacagtcaaggtgccaccgggttgtcgtacttcttccagttctggtgctacgttacgccagtgttcggtggctacgtcgccgataccttttggggtaagtacaacaccatctgctgcggtaccgccatctacatcgccggtatcttcattctgttaatcacttcgatcccttccgttggtaaccgagacagtgctctcggcgggttcatcgcgtccattatcctcattggtatagccactggtatgatcaaagccaatctttccgtgctgatcgccgatcaactgcccaagaggaagccctccatcaaagtgttgaagtccggtgaacgagtcatcgtggattctaatatcactttgcaaaacgtcttcatgttcttctacttcatgatcaatgtcggatctctatcgctgatggccactaccgagttggaataccataaggggttctgggccgcctacttgttgccgttctgtttcttctgggttgccgtcgtcactttggtgttcggtaaaaaacaatacatccagagaccgatcggcgataaagtcatcgccaaaagtttcagggtctgctggattttgaccaagaacaaattcgatttcaatgctgccaaaccttctgttcacccagaaaaggagtatccatggaatgacaaattcgtcgatgaaataaagagagccctagctgcctgtaaagtctttgtcttctacccaatctattggacccagtacggtaccatgatttccagttttatcactcaagccggtatgatggagttgcacggcatccccaatgattttctacaagctttcgattccattgccttaatcattttcatcccgatctttgaaaaatttatctaccctttcatcagaagatacaccccattcaagccaatcacaaagattttctttgggttcatgttcgggtctcttgccatgacgtgggctgccgtcctacaaagtttcgtttacaaggccggtccatggtatagtgcgcccctaggtcacaacaccccaaaccatgtccacgtttgctggcagattcctgcgtatgtcttgatttccttttcggaaatttttgcctccatcactggtttggaatacgcttattccaaggccccagcctctatgaaatcgttcatcatgtcgattttcctgttgaccaatgcctttggttccgccattggttgtgccttgtctccagtcaccgtggatcctaaatttacatggttattcactgggttggccgtcgcttgtttcatttctggttgtttgttctggttctgtttcagaaagtataacgacactgaggaagaaatgaacgctatggattacgaagaagaagacgaattcgatttaaacccaatttctcaacctaaaggcaatgacattgaaatactagaaccaatgggaagtttaaaatcaactaccaaatattaa

SEQ ID NO: 1650 - DNA, 3591 bp, Saccharomyces pastorianus
  modified_base (676)..(757): a, c, g, t, unknown, or other
atgcctgagatctccgttcaaaatccgctaaggctctctgaaaacgggaatgctcgttccatgtttctatctgcatcacaaccacaacgtccatcaactactccgtccttccctatgtctgtgcaaaatgctgctaggctggacttgtcgagtttccaggtactgaatttatctgttaaaagacagaattcaaattcagtgaatgaagatataaatagcagtaagagacgaataagtagatccaattttttagatatcgaatacaacaataacgctagctcccaatcagaaaagaccacaatctgtcactcaaggccaaacccttccgtcaggtatttgggcagtccaaaaagggccttgcagagagaaaattctgtcgaagttacgcgatcctcccctttggtatcgaagcccgctagtcatactggaaaacatattgcatacgacaaatataccacaggaattccggtcaaatcaccgaacatttcaagtagcaacagcttactcaacatgtcaaaaagttcattagcctatgtggatgcagaaccagacggaccgtcatgtaatgaaattattgagaatttccagcacaaaaaaaccgaaagcgatgacattcatgacgatgatggcgatgacgacgcagatcctaatgacttaagtaatagtgaaaacaacnnnnnnnnnnnnnnnnnnnnnnnnnnnnnnnnnnnnnnnnnnnnnnnnnnnnnnnnnnnnnnnnnnnnnnnnnnnnnnnnnnatgacgatgatgataataacgaacgggaagaaagcaacgtgtacaggcccgcaaataacaaaaaatcaagcatcgctttaatccaaaaactacaagaactatacaaagtcatagtcaagcaagaaattgagttacaagagcggtgttcccaactgacgaattctcaaaccactgaattgaagagtctatggactatctacaggattaataccgaactggttaacaattacgttacgtttatcaccaccgccttattaccgtcccaaccacctcatgatttagttattggccaagagatcgtcgaaatatatagaattgaaagaagactatgggtatatggtacaataacctttttagacgttcttaaaaacttctccaatttcatggaccctgaagtttgctgccaatttattactcatgtttttgtttcattatcgaccatgatctctgatataccatccaaatattcaatcacctggttacaaagattaggcgatttatcaagaatggctatagcgttatatccctcaagtttcattgattggaagttaagtgcggagcattggtacactgaggcaatgaaatacatttataaccatggtaagctttattatcatatgtctacagttcagcaaaacaccttggaagcatttgtgaatttggggaaaagtgttttttgccaggaaacgtttacaccatctccgcagtatatgcaattggtcatcgataatatttatcaaagagcgtttgtcgaaagaaataatggcaaccttagaaactcgttattgattgaatatttgaaacatagcgaagccatgctattgcccagttttttagagagtccggacttgcaaaatgttgtgttgacctattttgttgagaaatttggtatagatgcaaatggttgcaatatattcaacccagaggatatgtttattcaaaatcctgacttcttcaaatactttttcagacatgctccatcttttgcacaatctcatattttacaaattgttggattcggagaaccaaagaatccatttgccattctgttcgagttacccaaatacttgaaggagagaaaggacaagaaggagcgtaaaaagtcttctaataatgattcttcaataacggaaagcacaacaagtaacagcagaaattacaatgatgatgatgatgatgaaataatgagttccaccacatccatatctgagcgtgattttttcatggagtttttcaatgatattgacactttacgacgtccaatagtctcttccatgttaacaaatgaggcttggttggagtctttaaagtttttgaacatgacttcattaaagtgcggtatgatagtgcttaggaagtttcttcatggccctctaggtatcgcattacctcattttctaccatggatttactttattatttcaatttgcttgaaaagcggccaattgagtgatccaattagcaaagagttttggatactcatcgtcaagagaatattcccctgggacacaatggttacttttatgaatattctaatagcatgcttgttggacaatgaaacgtccaatccaattattggaagcttgtgcagtgaatacaatgatttaaatttggctgaactattagaattttttaatgagaaggaagaactacctgaaatttggcgttgctggggtacattatggtttgacaccatctgccaaaagaacacaaagacaatcagtagtgacgatgattttgaggaggtaggtatcaaagattacatggcattagattcgccaactgatgggataatatttgatgtgaatgatgaaaatggtgagaaattttggaaaagggcatgtagaactatttttcttttcaaagagctatcgagaagtttcaaaataggagtagtaatcaacaatgaatcgtcgatcaaccgttcatcaatgccaagcaagaatgtactaggagatttatcattcaaactcgaaccattgagtaccctaggaagtagtcttccaacgctggaaggtattgttgacgtctttgaagcaagaagcgagaacaatgttgatttgcacgctgtgccagaacttagtgtcattaagggcggaagtattttcaactatactggctacaaaaagctttgtcctgattacacatgtttcgataaaaacggggaatttttaagtgcctctctctatacctcttggtatgttcctaacggcagtaacaattcggagactaacgtaagtagtagctgcgaaaaggaaagcgaggacctgttcttgaagtgtttgatgtcagatgaccaggaaatcgacttgaaaatcacatacttcgtctttgatgcgacatcatggttgaggcactcagcacgtatattcaagttagcacaaaataggctattgaaatttgctatctgcttaacaacattccaagaattaagattcctacggaagtcaaaggacgaaaacgtcatggaagcagccacaaggggtatcataaccattagacaactttactacgagaacaaggtactacctttaaggtttacgggtaatgtcgcaacgcatatcgaggagaacttagagttcgaagagcagataacatggagaacacatgtcgatgagtttgtcatcgaatccataatgaaagcacaagaaaagctggagaacgcaaaccaaccgcacgcttccacttatcgtttcaattatgtgatcttgatatcggatgacgataccatgaagaaaaaagcacaagaaaaaaaaataaaaacgttaagcacgagatttgtgttttctttatgcacaaaactcggcgagcagcgccgcttatgcacagactga

SEQ ID NO: 1651 - DNA, 2154 bp, Saccharomyces pastorianus
atgtttctaaacccaaatgagattttaagtctaattcgtgaagtatacgaagttgatatcaaatgcttttattcgcagttgcgtctaaagaaactaaaaaaattgttggaacatgccgcttatctgtttgacatctacgtaagggacttgaaaaacaacctagagaaagatgcactaacagccttcattgttggtggctactacctgtatcttattattccgcagtcgttacaatttcaggcaagaaacaatgtttatagcagttacgcaaagttgaaaaataagtaccaagaagaacagggaatgacctatgtcctaaaattggtgaaggacgaaagtgctagaattgttgatcaatgtttatctgactcaaaacgaatttccaggaccatgcaaagaaaaagagcttactctttgcccctacgaccgctccccgttcacatggcttctttatcgatacataaccaactcgacgttccggtacgggaaatgcctatagaaacgtcaaggccaataaataataccttggtgaaggacttggctaaaaaggaaaatgaattgaaatcaagtaatgagcttgaacaagaaaccgatatagaaggtagagatagtacaagtacagggcccttatctatgacctcgtacttaaggttagatactggaaaggactctttatttaaaactctctctagtccagcagcagcttccactgggaactccttagaggctttgttacagtttgaggagcctagccagaattcctcttctacattaaagtcaaaagagcaggaagaagaagaaaccgtaatcgcttccacctctcaaacttttaagttgccggtgatcgaaaatccagataacctactgtctgaattatccataactggcttgcgaaatccatgcaacacatgctatattaatagcatggtacagtgtctgtttggcaccactttatttcgcgatttgtttctaactaagaaatataaactctttctggagaatgaaaaatacccaaaaggattccaactgtcccactccatttacgttctatttaagaaaatgtacctgagtggtggaagggcaattatacctaatggctttttaaaggtgtgtaaaaagttaaggcctgacttgaacatcccagatgatcaacaggacacgcaagaatttttgatgatcattctggcacggattcatgaagagctgtcaaatgaaaatgtgactaagtattattctgatctaattttttatgatgcgactgctttgcaagtcaacccatccaaatatcaaaaatggtatgaagaaactgttctttcagacggattatctccaatcgattatatattccagggacagatggaaaatatactaaaatgtcaacgctgtggcaactcttcctacagctattctaccttttatgttctgtcacttgcaattccaaaaccctctttgtatagttttacaagtaaatccaaaaaaataaaattggaggattgtataaacttgttttcaagcgatgaagaattgtctggtgacaatgcttgggactgtcccaagtgtagaactactgattgcaagtcgaaaacggatgaaaatctcagccagaagaaaagatcaatactattcaatttgcactccagatcaagatccaaatccccccatcatcgtcatcatcaccatcatcaccatcataaaaaagatgatgcgacagataactccaaaaagtggaaatctaaaaagctgaccactgtaaagagtttggatttcattgttttgcctccaatactagtcatccatttatcaagattttattatgatttaacgaaaaaaaataacacggtaataacttatccactgatattgaatattattctgaaaaacaatgcggtcgttcggtataagctgtacgcaatagtaaaccattccggaaatcttgtcaatggacattacacttctgtagtaaataaagaaaaaagccatgaaattgggctaaatagacagatttgggtcacgtttgatgatgatgttattaaacaacacaataaggatcgtgatgactttgaaactggcagggcagagatttctagtagcgaagtatatgtcttattttatgaaagagttgatgaagaagattataaggaagaatgttgttaa

SEQ ID NO: 1652 - DNA, 2436 bp, Saccharomyces pastorianus
atgtcgaatacgagtgctaaagatatacggaaaaataagccaaaaaggggaaccggcttcgatttactcgaagttactgagtcattgggctaccagactcacagaaaaaacgggagaaactcatggtcaaaagacgatgataatatgctacgatcactggttaatgaatccgcaaaggagctgggctacgaaaatgggcttgaagacgttaaaacaattcaacaatcaaaccatctttctaaatgtatagcttgggatgttttggcaacacgctttaaacacacagttaggacttccaaggatgtaagaaaacgttggacagggtctctcgatccaaacttgaagaaaggtaaatggacccgagaagaggatgaccagcttttaaaagcttatgaagaacatggacctcactggctgagtatttccatggatattcccggaagaacagaagaccaatgcgccaaaagatatattgaagtcctagggcctggaagtaagggaagactgagagaatggactctgggagaagatttaagtctaataagtaaagtgaaggcgtatggtacgaaatggagaaaaatatcgtcagaaatggaattcagaccaagtttaacgtgtagaaatagatggagaaagattattaccatggtggtacgagggcaagcatcggaggtgataactaaggctataaaagaaaataagaacatagatatgacagatggtaagctccgacaacaaccaatcatggatgcggatatacgatccgatttcaggtcaaatacagaagaaaatttgcaagcatctcgagagaataaagcttcattgataaagcaggatatattaactatcaaagataacgaatcaagtaaattaccaaaattaaaggatagtaacgatacagatagtttgagcgacagcaagcaacaactattgccgccattaaaagacatttctgcacctccgccaataagaatgatgcaagttagccagccacatacaagcagtagtagaaataagatttctctacctgttgaagatctttcttcaatcaacaagcatagccctggcggaattcccgatagtccccaagcaactcttccaccaacatttaacccagcatccctcgatgagcatatgatgaataacactggcattacagatcctctaaaacataatgattccaccttgagaacaagagaaccaaattcctctagcacccaatggaagttcactctgaaagatggacaaggtttatcaatatcgaatggaactatcgacagtacgaggttagtaaaggaactagttgatcaagctaagaagtactctttgaaaatatcgatacatcagcatattcataaccactatgtcacacccacagacaatactgctagtaataacaatagtgtgccgaacactgcaaatgttaatggaaattctttactaattgacaatttcccacatatgggtagacaattgggaaatggcctttcagggttgagttcaaccaatgatacctttagcccagaataccgaacctctcttgataatatggataatgattttttatctagaacaccgaattataatgcattcagtttggaaccaacctcgcacaactccactgataacactaatgaacttggatcgcaaagcaatagagggacagacagtccatccgtgttttatcctcaggcaagagcattgatgccaaccaactcaaacgttactaacaatgaaatcaattcaggaaatgtcagtactaatagtatgtctcctaattttaatggaagaaacggtacagcaccaagctctacagcatcttatacaaccagtggttcggaaataccaccagatgtgggaccgaacagaataacacattttaattatttacctccaacgatacgacctcatttgggctcatcagatgcgacaagaggtgctgacttgaataaattactcaatccatccccaaattcagtaagaagcaatggaagtaaaagcaaccagaaagagaaaaaaaagagcgagccgcccggtcaccattcttcttcctctctgacgaccaacaaatttaaccgtattgatcagtccgagatttcaagaacaacatcaagatccgatactccgttaagagacgaagatggtttggatttttgggaaactttgagatctttagccactacgaacccacagcctccagttgagaagcctactgaaggtaacgaaaccacatcccatgtagtacaccagggcatcgtagcacatacaggggaaagcggtttaggttccaacagtgagggatacgatttttttaatgaattactggataagaaggctgatacattacataacgaagctaagcagcaaaaagaccttgatatgacgtctggtggctctaccgataatgggtccgttttgccattgaatccaagctga

SEQ ID NO: 1653 - DNA, 975 bp, Saccharomyces pastorianus
atgacacgcattgcgatagaaaagttgatagttgaacatcctcaaaaagttcttgttctcgatggtggacaaggaacagaattggagaatagaggcattaacataaatagtccggtatggtctgcggcgcctttcattagcgattctttttggcagaaaacttcttctgaccgaaccttggtcgaggaaatgtatagagactttatggatgctggtgcaaatgtgttaatgacagtcacttaccaggcaaattttcaaagtatttctgaaaatacctcgatcaaaacccttttggactacaaccgctttctcgacagagttgtgtcatttacgcgcagagttattggagaggacaggtacttaattggaagtattggcccatgggcggcccacgtctccagtgagtatactggtgactatggcccacacccagaagatattgattacctccaacacttcaaagcccagctggacaatttcaacaagcatgcagatattgatcttattggtttcgaaacggttcctaatttccatgagctaaaggctattttatcttgggatgaggacgttatctcaaaacccttctacgtcgggttatcagtgcacgataatggtttgctgcgagatggtaccactatggaagaaattgcagcctacgtaaaatgtcttggaagaaaaatcaataaacattttttgttgctgggagttaactgtattagtttcaaccagtctgcatacattttaaaatctctgcatcaggttttacctgacatgccactattagcttatccaaatagtggagaaatttatgatactaagacaaagacatggcatcaggtaaatggtaagctaaatggctgggacgtggtagtggaggaattcatagataacggtgcgcgcattattggcggttgttgtagaacatctgctaaagatatctctgaaattgcatctgctgtagatagacactcctaa

SEQ ID NO: 1654 - DNA, 1752 bp, Saccharomyces pastorianus
atgattgactctaaatctgccaaaatttcagaggtgcagttcagcactagtgttgtaagtacgccctcatcagacacaactaacctagttcacagattcaagaactctttcaaacgaaaggacgcattagtaattcaagatggtctgctgtattctgagctttcggaggaagaaaaagtacggtgggacttagccaatcagccttataaaaaggttctagatcaaagacacttaacaatgatagctatcggaggtaccctggggacaggactttttattggattaggggaatcgctagcatccggccctgcttctttgcttattgggttcttgctggtgggagcatcgatgctttgcgttgttcaatgtggagctgaactttcatgccagtatcctgtctctggatcttatgctctacacgcgagtaggttcatagacccgtctgtgggtttcagtgttggaattaattatttgttgatgtggcttatatctttccccagtgagttagttggatgttcacttaccatgtcttattgggctccctccgtcaaccctgctgtatgggttgccatcgcttttaccttgagcatgttattgaaccttttcggagcaaggggattcgcagaatcagagttctacatgtcgatcttcaaaattgttgcacttttcatctttataatcattgggattattttagttgcaggtggtggccctgaatcaactggctatatcggtacgaaatactggcacgacccaggttcttttgctcctccggcttttaaaaatttttgtaatactttcgtttcagcagcatattcatttagtggtaccgagatggttgttttaactagcgctgaggccagaaatgtttcgtcggtgtctcgggctgctaagggcaccttctggagaattgcggtcttttatatcgttactgtgattattattggttgtctggtcccttataatgatcctcgtttgattaatggttcttcgagtgaggatattactgcttctccctttgtgattgctttaagtaacaccggtgccatggggacaagagtgtcacagtttatgaatgcggtcatcctaatagctgtgttttccgtttgtaactcctgtgtctatgcctcttctaggctcattcaaggtcttgctacagcaggccagcttccaaagatttgcggctatatggacagaaatggtaggcctttagttggtatggcgatatgtggtgcttttggacttttaggctttttggttgtttctaaagaccagggtactgtttttacctggttgtttgcgttgtgttctatttccttttttacaacttggttctgtatctgcttttgtcaaatcagattcaggatggctatgaaagcccaaggaaaatcggatgatgacattatttacaagtcaccattaggaatctgtggaggagttgtcggatgtactttaaacgtgttgctagttattggggaaatatacgtatcagctgcgccggtaggcatgcctagctctgccgctaatttctttgaatattgtatgagtattccaataatgatcgctgtctacatcggacacaggatttaccgcaaagattggaggcactggtacattaagcgggaagatatcgaccttgacagcggacattccatggaggatttggaagccaccaagctgagaagggatatagagaaggaatatgttgcttccagagcattttactacaggatttacagatttttctgctaa

SEQ ID NO: 1655 - DNA, 1239 bp, Saccharomyces pastorianus
atgtctcctccaaccgctctaatctcgaccccaatttactcccctgattctcaaattgaggatgtcacaacagcagtagataatctgcactataattctaagcttagctatggaaattttgatacccatttttatgctggtcaagacgaagtctctcctactggtttgttaaaaatccgtaattcctacagaaaaaaatcaaagtatccggattatttaccaacttgggatcccactgagaagcatgagccgctcaaattccacacgtatcaagatcctgctttgagagcagacgttgactttcctaatctttttaccaaagaaagaattggtcaaacaaaagtgaagaaggttacgccaaagtttggtctcgaaattagtgggacccagttaaccgacctctctgatcctgcgaaagatgaacttgccttgcttgttgcgcaaaagggagtagtcatctttagagatcagaattttgctgacgaaggaccagaatatgtaactcaatatggaagtcattttggaaagttgcacattcatcaaaccagtggacatcctcagaaagtcccagagctacatattactttccgtagacccgatgcggatgaatttgcaagagtttttaaggattcgacaacatctcgtggatggcatacggacgtttcttacgagctacagccgccttcgtatacttttttcactgttgtggaaggtcctgacggaggcggggatacgctgtttgcggataccattgaagctttcaacagattgtccaaaccctttcaagattttttgagcactcttcatgtcatccacagctcgaaggagcaggctgaaaactcacaaagtcagggtggggtacaaaggaggttaccagtgacgcatatccatccactagttagggtccaccctgttttgaagaagaagtgcttgtatgtcaatcgtgcgttttctaggaaaatagtcgagttgaaaagacaagaatctgactcactattggaatttttgtacgatttagtggaaagcagtcaggatttacaattgagagccaaatgggaaccccgcacagttgtagtttgggataatcgcagagtccaacattccgctgtgattgattgggaagaaccgattcacagacatgccttcagaattacaccgcaggctgaaagaccagtggaggatctaaagttcctgaacgatgaaaattactacccttcttcacaaacgttgaatatttag

SEQ ID NO: 1656 - DNA, 1596 bp, Saccharomyces pastorianus
atgtcaaaagttgacatagatattggagctgactcaatttcctcttctgatgagatcttgataccatcggccctcgcagatgccacattagcgttcatggaggagaatgatgcaacagttgcgcagataacgcctgaacaagagaaaaaactgaagaagaagctttttctaacaatattctgctttgtttctgctatcaatcttttgctttacatggataaagccactttgtcctatgattcgattctggggtttttcgacgacaccggtcttacccaagatacgtacaatacggtcaatacactgttctacgttggttttgctattggccaatttcctgggcaatatttggcgcaaaagttaccgcttggcaagtttttgagtggaattttagcaacatggaccgtactcgtctttttgctttgcgctgcttacaatttttctggggtcgttgctttgaggtttttcttggggctgacagagagtgtcgtcattccaatactgattaccactatgggcatgttcttcaatgcatccgaaagagctgctgctcagccgtttttctttgcggcatgcatggggtctccgattccaactggattcattgcctatggtgttcttcacataacgaatccaagcattgccttatggaggatattcacaatcataattgccggactaactttcatcatgactattgttgtatttctgtggttccctaataatcctgccgatgctaaattttttacagtggaggaaagagtatggatcatcaggagagttcaagcgtccacgggctcttctattgaacagaaagttttcaaaaagagccagtttaaagaggcaatgaatgattacataacctggctgtttggattgtttttccttctccagcagctggctaacaatttgccttaccagcaaaatcttttatttgaaggaatgggtggtgtcgacgccttaggatcaacattagtatcggtcgctggagcaggtttcgcagtggtttgtgcccttattgcttctttgacgttaattaaatggaaaaatatttcagctttgactgcaattttttggacgttaccagcattggtaggatccattgctgccgctgccttaccatgggacaacaaaatcggcattttagcaaatatttgtatggcaggtcaaatttttgggattcccttcattatagctcttagctgggcaagctcaagtgcctctggatatactaagaaattaacaagaagttcggtgtgtctatttgcaatgggtattgctaatattatttccccacaaatatggagagcaaaagacgctccccgctacctacctgcttggatcgtccaaatcgttttatcattttctttggcaccagccattctgttgttaatccacttcatactgagggcaagaaataacgaaagattaaaaaattacgacgaaaactttcaaggttatgttaacaaatatcaacttgtcgaaagcgatacttcttcttctaacgaaaaaggtgcaacagttgcgcatgaaagcaacttggcagtgttcgacctgactgatttagaaaacaaaacttttatatatcctttataa

SEQ ID NO: 1657 - DNA, 2136 bp, Saccharomyces pastorianus
atgcaaaggctgcttctgcttctaacatggttgctgtcgttagcaagcgctttcgatataaagataccacgcactgaaaaacgagatcaaatagaatacaacgctgtgctggcatgcgcatcgtatatcaacactctaaaatggtcgttcgatagttctcttgtgccaggattctgctccaccacatgcttttacccaccagcattcaatacttggtctctttgtatctttaattcgctcacagatcatgctgttccaacggtcaatgcaagtttcgagaagagtttgggcaatgtaagaaagatgtgttcgtttgtggataagcgctttagcaatatttcgttggaacaatactatttctccctaaataacgcttctgcccacgccataaagcattataactctactgaatgcctatcgacgtcggtttgggccgatttcaagactagatctaaatgggtactggctttccatgccaatacttacaattcagatatcagtagcgtttacggcgcgtacttgagttactatttcgttatagtaggagtgatagcagtatttttccacatgagccattacaatgggctcaatcgagtgctgtttagatgccgtatcatcaatctcattcgtggccattgcgtattgcctacgtttttgattgggaaacatgctaaccattttaagttccttaattttgagatctttagtgggttgatgcccaactccttggaatcatggatcattattggttacacgttagctaacatgatattcttgtccatagattacattatagatccctataatcttattttcaagagccacctgtcgcaatttatgagattactggctgatagatccgggataatagcgtttacacaatttcctctaatcatcattttcacagcaagaaatagttttttggaatttttaaccggacttaagtttaattcattcattagtttccataaatggatcggcagaatcatggttctcaacgcaatggtgcattctctttcatattcattgtacgcgttggccaaccacaactattccataagcagcaaggaattgtactggaaattcggcattgcatccacaacaacgctttgtgttttactggttctgtcattaggaatggtaaggaaaaagtactacgagtttttcctttatacgcatattctgttggctattttgttcttttactgctgttggaagcacgtcacgatattcaacggttggaaagaatggattgtgatatcactaatcatatgggggctggagaaagtgttccgggtttggaacattctgcatttcggattcccaagggccactctaatcaacttgaacactagcaagaacccacacgaggaaatgttcaaagtcatcataccaaagcataactgcaaatggcaatccaagccaggccagtattgtttcctctattttttgcatcctctggtgttctggcaatgtcatccattcaccattatagatgaaggggacaagtgtgttatagtgattaaaccgaaagacgggcttaccagggtcatatataaccagatcttgaaatcgctgaacggtaagctacagctccgagtagccatcgaaggaccatatggacccagcaactacaaactcaacagattcgaccatttgctgttattaagcggcggcacaggcttacctggtccgttggaccacgccatcaaactctctcaaaacccagccaagccaagcatacaattaatcatagcaatcaagaatgtctcgtttctaaacggctacaagtccgaaatcctaaaactaaagcaaaatcaagcaaatctcaacgtgcaggttttcctaacccagaaactacctgccgcaaagggaccaaccgcccacgaccaactaataaatcttgatgatataatgacagaactgacaagttttgtacacatcaggcacacaaggcccgatttccacgaactgataaacgagtcaatgaagaatgggagtccagcggactccgtagcaatcgtatgctgcggcccgcccgccttggtcgacgacgtaagaaacaccgtttcccaaacagtcatcgaccaccctggaaggattatcgagtactttgaagaataccagtgctggtaa

SEQ ID NO: 1658 - DNA, 4986 bp, Saccharomyces pastorianus
atgcaacgcacactcaattcaacgaggcctgaccaacgattttggttttacgatgacgtaacccagtacggtagaataaaatatttaaattactatactcccttaatactggcaacatttacggtgttgtttgtaacttataacatatggaaacattattaccattacaatgtactacatttgaaacaaaaaaacccaattgaggaacttttatattcttccaccgacgaagacgaacacagtccgttgataaacaataataccaccacaacgaactacgttgacgttaacactaaaaaagacgagttgaaaaatagacatttctctttggaaaagcttaaatcggttaaattaaacggtgaacctcacggggagcccgagttgattagaagaggttttattgaaaagtcaagaattatcttggaatttcttttggttctttcgcaagttataatacattcttgtatcctattgcactacgtcaacaacaattcggagtttactcagcgaagtactgttaccggtttagtggaatggtgtttattgtttgtcattgtttctttgcgtctagtgaatgtcaatcaaaatttcaaactgataaacaaatatcccgggaatttatggtctgtgtcgtttataaactatttgattctgttctgctctatgattttacccttccgttcaattttcattcatcatatcaatgcttctgtattaagaaagtattacatttcacaaatatcaatcaacttggtacttttcctattgctcttttttgccaaaataagaaacaatttcgccgtcatctacaaaactgatagctggattacgccatctccagaaccagtaacttctattgctggtttcatctgctgggcctggttggacggctttgtttggaaagcgcacaatgtgagtatcaaagtcaaagatatttgggggttaatgatgcaggattattccttctttgttgtgaaaaagttcagatacttcgtcgatcataaggtgaagaggaagcgtattttttccttgaatcttttcttttttttctcgaattatctggtactacaatgcttttgggcgtttttaggcagtgttctatctttcgttccaaccgtcttattaaagagaatattggaatatgttgaagatcaatcatccgctccttcaaacctagcctggttttacgtcaccattatgtttgtaggcagaatcttagtagccgtttgccaagcacaagctttattctttggtagaagagtttgtatcagaatgaaaagtatcattatttctgaaatctacacgaaggctttgagaagaaaaatttctaccaacaagaccaaacctgcagctgaagatccgcaagcaattaatgaccaaaaaagtatcaacggtgatgaagaatccacttcttccgccaatcttggggcaattattaatttgatggctattgacgcttttaaagtctccgaaatttgcggatacttacactcatttttggaggctttcgttatgactattgtagcccttgtattattataccgtctattaggtcttgctgcaatcttgggtgtcttgatcattgtggccatgctcccattaaattacaagctcgccaagtacataggtgatttgcaaaagaagaatttagccgttaccgataaccgtattcaaagattaaacgaagcattccaagccataagaatcatcaaatatttttcatgggaagaaaattttgaaaatgatattaaagctatcagggaaaatgagttgtctttgctattaatgagatccattgtttggtcaattagttcttttgtttggtttgttaccccaactatcgtaacagctgcttcattcgcttactatatttacgttcaaggcgaggtattaactactccagttgctttcaccgcactttctctattcacacttttaagagatccattggaccgtttgtctgatatgttaagttttgtcgtccaatcaaaggtctcattagatagagtccaagatttcttgaacgaaaaggatacagcgaagtacgatcagttgactatagatcctaatgggaaaaggtttgcttttgaaaactccactatttcttgggataaggataatcaggatttcaaattgaaggacttaaacattgaattcaaaaccggtaaactgaatgttgttatcggccctactggttctggtaaaacatctctattgatggcactactgggagaaatgtatctactaaatggtaaggttgttgttcctgctttagacccaaggcaagaattagtcgtggaagcaaatggaacaaccaattctattgcttactgttcacaagctgcctggttgctaaatgatactgtaaaaagcaacattctattcaatagtcaatttaatgagacaagatataaagccgttattgaagcatgtggattgaagcgtgacttcgaaattttgaaagctggtgatttgacagaaattggtgagaaaggtattactctatctggtggtcaaaagcaaagagtttctcttgccagagccttgtattccaacgcaagacatgttcttttggatgattgcttaagtgcagttgattctcacactgcttcatggatttacgataattgtattactggcccactaatggaagatagaacatgtattttggtttctcacaacattgcattgacacttagaaatgccgagctagttgtattactggaagacggtagagttaaagaccaaggtgacccaatagacatgttacagaaaggtctattcggcgaagacgagttagtaaaaagcagtattttatcgcgagcaaattcttccgctaatttagccgcaaaaagtagcaccagcttaaataacctcccagttgcgaaagaactaccaattagcatgaataacaactccccattatttgaagtatcaaatcttcaaaaacctttgagaacagaagccgaacgtgcagaagatggcaaattaattgaagaagaaacaaaggaagagggtgtagttagtatggacgtctataaatggtatttgaaaatttttggtggctggaagatcgttacgtttttagcttccttattcttagtctcccaacttttgtatatcggacagtcatggtgggtccgtgcctgggcatcccacaatgttattgctaagattgttcctatggctcaacgcgctatcgcctttatctccaaggatgccagccatctgctagactggagaggctcatttcaggtaggcataatgtcaaatggaagcgagcccactggtaaacactctacaatgtattatctcattttgtatttgatcattggtttagcccaatcgttattgggagccggtaagactattctaaattttgttgctggtatcaatgcatcaagaaaaattttcaacatgatactaaacaaggtgttacattcaaaattaaggtttttcgatgctaccccaactggtagaattatgaacagattttccaaggatatcgaggctgttgatcaagaattgacaccttatatccaaggtgccttctattcgcttattgaatgtctgtctacagtcatattaatcacatttatcactccacaattcttgtctgttgcgattgttgtctcaataatgtattactttattgggtacttttacatggcaggctctcgtgaattgaagaggtatgaggctatctctagatcacccatttatcaacacttctcagaaactcttgttggtgtcacaacaattcgtgcattcggtgatgaaggaagatttatgcaagagaacttacaaaaaattgatgaaaacaacaaaccgttcttttatttgtgggtcgctaatcgttggttggccttcagaatagatatgattgggtctttggtcatctttggcgctgggttgtttatattattcaatatcgatcatctagactctggtatggctggtatatcgctgacatatgcaatctcctttactgaaggtgccttatggttagtgagactgtattctgaagtagaaatgaatatgaactccgttgaaagagtaaaagagtatatggaaattgagcaagaaccatacaatcaacacaaagaagtgccaccaccacaatggccacaagacggtaaaatcgaagtcaatgatctgtcgttacgttatgcaccaaacttacctagagtgattaaaaatgtttcattttctgttgacgcccagtctaaggttggtattgttggcagaacaggtgctggtaaatccacaatcattacggctttgtttagattcctggaacctgacacgggccatattaagatcgataatatcgatatatctggtgttgatttgcaaagattgcgtcgttctataactattattccacaagatccaactttgttttcagggacaatcaagtccaatttagatccatataatgaattcagtgaccaaaagatctttgaggctctaaaacgtgttaatctagtcagcgaagaacaattacaacagggaaccgaaagagaggtgaccaatgatacctcatcagccgactcagaaaatgttaataaatttttggatttggaaagtgaggttagtgaaggtgggtccaacttgtcacaaggacaacgtcaattgatgtgtcttgcgagatctttgctaagaagtccaaagatcatcttactagatgaggctacagcttccattgattatagttcagacgcaaagattcaagaaaccataaggaaggagttccaaggaagcacaatattaactatcgcacatagactaagatctgtcattgattatgacaagatcttggttatggacgctggtgaagttaaagaatatgatcatccatattcgttattgctaaataaacaaagtattttttacagtatgtgtgaacatagtggagaactggagattttagtggaatcagctaaaaaggcctttgtagagaaactgaactctaagaaagactga

SEQ ID NO: 1659 - DNA, 771 bp, Saccharomyces pastorianus
atggctccaggtaagaaagttgctccagctccattcggtgctaagtccaccaagtctaacaagaccagaaacccattgactcactccaccccaaagaactttggtattggtcaagccgtccaaccaaagagaaacttgtctagatacgtcaaatggccagaatatgtcagactacaaagacaaaagaagatcttgtctatcagattaaaggttcctccaaccattgctcaattccaatacactttggacagaaacaccgctgctgaaaccttcaagttgttcaacaagtacagaccagaaactgctgctgaaaagaaggaaagattgaccaaggaagctgccgccattgctgaaggtaaatccaagcaagacgcttctccaaagccattcgccatcaagtacggtttgaaccacgttgtctctttgatcgaaaacaagaagaccaagttggttttgatcgctaacgatgtcgacccaattgaattggtcgttttcttaccagctttgtgtaagaagatgggtgttccatacgctatcgtaaagggtaaggccagattaggtactttggttaaccaaaagacctccgccgtcgctgctttgactgaagtcagagccgaagacgaagctgctttggctaagttggtttccaccatcgatgctaacttcgctgacaaatacgacgaagtcaagaagcactggggtggtggtgtccttggtaacaaggctcaagccaagatggacaagaagaccaagacttctagttccgcttaa

SEQ ID NO: 1660 - DNA, 1986 bp, Saccharomyces pastorianus
atgagtaatcctcaaaaggccttaaacgattttctgtccaatgaatcagtccacactcatgagagttctagaaaacaatctcataatagacgctcatcggacgaaggacgttcttcctcacaaccctcacatcatcattccaacggtcacaataataatggtagccctggtaacggtaatgatggggacaacgatgatggttatgactatgagatgcaagattatagaccgtcgcaacaaagcgcgcttcccacacctacatacgtcccacagtattctgtaggaagtgggccctctttcccgatccaggaggtcgttcctaacgcgtacataaacacacaagacacgaaccataaagataacggtccgccaagtgcaagtagtaatagagcattcagaccaagaggccaaaccaccgtatcagcgaacgtacttaacgtcgaggatttttataagaatggagatgacgcgtatactataccagagtcgcatctgtcgagaagaaggagcagatcaagggctgagagcaacactggtcacagcgccactacgggcgctacaaatgcaaggactactggcgctcaaaccaatatggaaaataacgagccgccacgtagcgttcctattatggtgaagccaaaaacgctgtaccagaatcctcaaactccaacagttttgccttccacgtaccatccgatcaacaaatggtcttcggtgaaaaacacttacttgaaggaatttctggctgaatttatgggaacaatggttatgattattttcggtagtgccgtcgtatgtcaagtcaatgttgcgggcaaaatacagcaagacaacttcaattcagctctggataatattaaagtcaccgattcctccgcagaaacgatagaaactatgaagagtctaacttcgctagtatcttctgttgcaggcggtacgtttgacgatgtggcactgggttgggctgctgccgtcgtgatgggatatttctgtgctggtggtagtgctatctccggtgctcatttgaatccatctattacattggcaaatctggtatatagaggtttccccctaaagaaggtgccctattattttgctggacaactgatcggggcctttacgggtgctttgattttgtttatttggtataaaagagtgctacaagaggcatacggcgatatatggataagcgaaagtgttgcgggaatgttttgtgtttttccaaagccttatttaagttcaggaagacaatttttttccgaatttctatgtggggctatgttgcaagctggtacatttgcgttgaccgatccttatacatgtttgtcatccgatgttttcccgttaatgatgttcattctgatttttgtcataaatgcctccatggcctatcaaacgggtacagcaatgaatttggctcgtgacttaggcccacgtctcgccttgtacgctgttggatttgaccatagaatgctttggatacaccaccatcatttcttttgggtacctatggtaggtccatttcttggtgcattaatgggcgggctggtttatgatgtttgtatttatcagggtcatgaatctccagtcaattggtctttaccagtctataaggaaatgataatgagagcttggttcagaagacccggttggaaaaagagaaacagagctagaagaacatcggacttgagtgatttctcctacaacaacgatgacgatgacgatgagttcggtgaaagaatggctcttcaaaagacaaaaactaagtcatccatttcagacaacgaaaatgaagctggtgaaaagaaagtccaatttaagtctgttcagcgtggtaaaagaacgttcggaggtataccaaccattcttgaagaagaggattctatcgaaacagcttcactaggtgcgactaccacagattccatgggattgtctgatatatcttcagaagattctcatttcgggaatttaaagaaagtaacgtag

SEQ ID NO: 1661 - DNA, 798 bp, Saccharomyces pastorianus
atgttgaacgtgctattgaggaagaacgcctttggtctagtgggtagaaaagggctggcaaccgccgctgccgctgccaagcatacccctagaatgaagaccttcaaagtttacaggtggaatccggatgagcccagtgctaaacctcgcttacaggcttatcaagtggatttgaacgattgtgggcctatggtattggatgcgttgctgaagatcaaagacgaacaagatgctaccctaacctttagaaggtcatgtagagaaggtatttgtggttcatgtgccatgaacattggtggtagaaatactttggcttgtatatgtaagatcgatcagaacgaatccaaacaactaaagatttaccccttgcctcatatgttcattgtcaaggatttggtgcctgatttgactaatttttatcagcaatacaaatctattcagccttacttgcagagaacatcgtatccaaaggacggaacagaagtgctgcagagtattccggaccgcaagaaattagacggtctttatgaatgtattttgtgtgcatgttgttctacttcatgtccatcttactggtggaaccaggagcagtatttggggcccgccgttctaatgcaagcttatcgttggctcattgactcgagagaccaagctacaaaggcaaggaaagccatgctgaacaactccatgtctttatacagatgtcacaccattatgaactgtaccaaaacctgcccaaagggtttgaatcctggtttggctattgctgaaattaagaaatctttggcgtttgcctag

SEQ ID NO: 1662 - DNA, 9426 bp, Saccharomyces pastorianus
atgttagagtctttagctgccaacttgctaaaccgattactaggctcatatgtggagaatttcgaccctgcccaattaaacgttggaatatggagtggtgacgtgaaactaaaaaacctgaaactgagaaaggactgtctggactcgttagatttgcccgtagatgtgaaatctggtatattgggtgatctggtattaacggtaccatggtcaagcttgaagaacaagcctgtgaaaattatcatcgaagactgttatttgctatgttcaccacgctcagatgatcacgaaaacgatgaagaaatggtaatgagagcattccgtttgaaaatgaggaagctggcggaatgggaattgactaaccaggcccgcatattcagcaatcaatcagaaacttctaacaaggcatcttctgaaaagatgaatgctgggttcatgcagtctttgactacaaagattatagacaatttacaagttaccataaagaacatccatttaagatacgaagacatggatggaatttttaccacgggtccatcctctgttgggctgacgctgaatgaattatcggcagtgtccacagattcaaactggacgccaagtttcatcgagattactcagaatattacccacaaactattaactttgaactcgctttgtttgtattggaatacagattccccgcccttaattgccgatgatgatcaagatacgagcttagacaacttcgtgtccagtttcaaaagtatgatttcatccgacaattcaaccctacccatgcaccaatacgttctgaaaccagtcagcggggtgggaaaattgagcatcaacaagcttggatccaccgaggaacagccccatatcgatttacaaatgttttacgatgaattcggtatagagctagacgatacggaatataatgatatcctgcatgtcttgtccagcatacaattgaggcaaataaccaaaaaatttaaaaaagttagaccatccttcaccgctactgaggatccgatagcatggtttaaatatatcgcatcatgtgttgttaacgaaattcatgaaaaaaataaaatgtggacttgggaaagtatgaaagaaaaatgtgaccaacggagactgtatacacaactatgggttgagaaactgaaattaaaaagtttagagactccgttacgtgaccaaaatcaagaggcccaactgactgaattgcataaagatctaacgtatgatgagatcgttctctttagatctgtcgccaagaggcagtatgcgcaatttaaactgggcatgagtgaggactcgccaactcccactgctagctcccaaactgaacctcaatcttcaaacaagtctgcggtaaagggaaatggcggctggctttcttcatggtggaacggcaaacccactgatgaagtggacgaagatttaataatgaccgaagaacaacgtcaagaactttacgatgccattgagtttaacgaaaacgaagataaaggccctatcctacagcttcctagagatagagtcgaacttcgtgtgacaggcctactgagaaagggttcatttactatacggaagaagaagcaaaatctaaagttgggttccattgttttcgaaaattgtaaagtggatttcgcgcaaaggcctgattcatttttagcaagcttccagttgaacaagtttggtttagaagatggctcacctaacgcgttgtacaagcacattatcagcgttagaggcacatctgaggatcaaccacaaactgaggaccatgccattgaaggaaaagaggaggagcctttattacttgccgcatttgaatggaacccgttgaatggattagctgattcgaggctcaacatcaaattattggggatgactgtgttttatcacgttcattttattacagaagttcacaagttcttcaaggcctctaatcaacacatggaaacacttggtaatattgttaatgctgctgaggccacggtagaaggttggactacacagacaagaatgggtatagaatcgttgttggaagaccacaaaacaatagacgtgactttggacttgcaggcaccattgatcatactaccattagacccacataattgggacactccttgcgcaatcattgatgccggtcatatttccataactagtgatttagtaccaaaggagaaaataaaggaaataaaacaattatcaccggaggaatatgacaagattgacggaaatgaaataaacaggttaatgttcgataggttccaactcttatcgcacaatacccagatttttgttggccctgacattcaatcgactataggtaagatcaacacaccctcatctacaaacgatttcagaattttggataaaatgaaattagaattaaccatggatatatcaatcttgcccaaagcctataaactacctacgataagagtatttggacatttacctcggttaagcctttccataaatgacattcaatacaaaaccattatgaacttgatcgccaattccatcccatcaatgattgatgctgagcaagaaaacaatgactataccaattactcttttactggttccgaacaagaaactaagaagcaaattcaatcacaactaaaaagtaccttgaaactattgtcaaatatgcaaccactacaaatccaacagaaatttatggaaatacacttcgatattgatcaagccaagatatcgttctttcagtgcattaagaatgactccagagacagtgaaaaactgattgatatcttatgccagaaattgaatttcaactttgataagagggctaaggaaatgaatcttgatttgagagtgcattcattagatgtcgaagattttatcgagcaaactgataataaagattttaaaaacctgatatcatctagtactgagaaggtggcaagaacccccaaagatttgtttacattaaagtacaaaagagcccagagaatagtgactcatgatgatactttgattgaattatttgatcaagatattgtcatgcatatgagtgaattacaaatggtattaacacctaaatccgttttgacgttgatgaattatgcaatgctgacattcacagatccaaatgctccagagatgccagctgatgccttaagacataataaagaagacagagaagacgcaccacaaaagattaatatgaaaatcaaaatggaggccgttaacgtgattctaaatgatgactcggtaaagatagctactctagttttatcagcaggtgaacttatgatggttttattaccggaaaaatacaacattaacttgaaattaggcggactagagttgactgatgaaaccaacgaatcattttctagcgattcggtgttcagaaaagtaattcacatgaaagatgaagagctggtcgaactgacctacgaatcatttgatccagctactaacaccaaagattatgattcatccttaaaatattctactggttctatgcacattaattttatcgaaagtgctgtaaatagaatagtcaacttccttaccaaatttcaaaaatccaaagtttcctttgatagagctcgtcttgctgcatacaaccaagctccctccatcgatgccgtaaacaatatgaagatggatatcgtaatcaaggcacctatcattcaatttccaaagttggtaggcacacacgagagcgaatatgatactatgagattttacttgggtgaattttttattcaaaatgtgttttccgtgatcgatgactctcataaaataaatcatatcaaactgggtgtccgagaaggtcaattatcatctgatttgttttttgatggttcaagtcaaaaactacatttggtagaaaacataggtttactattcaatatcgaccgggatccactgccacaagatgatactcctgagcttaaagtaacgagtaatttcgattcatttgcattggacttaacagaaaatcagctggcttacctgctggagatctccagtaaagtttcgtctgccttcaacatcgcagaggaggaccccagcacatcaacaggaaaagacgctgataaaagtccatctcctgatccagtaacctccagtaacgaaagtgaacgcgcggttactactcaatctttacaagaatcaggtaatagtaatataaagaatcctgaccaaaaatacctagatttctctttcaaggcccctaagatcgcactcactgtttataataagacaaaaggtgttacttctttggatgattgtggactaacaagaattatataccaagacatcgggtgtaatcttggtctcaagaatgatggcacaatcgatggccaggctcatgttgcagctttcagaatagaagatattcgtaatataaaagataacaagcacacagaattgataccaaagagtaggaataaggaatatcaattcgtagcaaacattagcagaaaaaatttggaatccgggcgtctgctgaacatttccatgacgatggacagtccaaaaatgattttggcaatggattatctgctttctcttaaggaattctttgacgcgatcgtgtctaacaaatctgagagtagttcatattacccagaaactgcaaatcaaaagactgaaaataaagcagttgttcaaaatgtagaagaaagtggtgatgcaaccaaaattcaatattctattaacgtcattgaaacagctcttattctacttgctgatccatgcaacataaataccgaagctatatccttcaaaattggacagtttttggtaacggaccaaaatataatgactgtagcagcaaataacgttggtatctttctgttcaaaatgaattcatctgaagaaaaattgagactgttggatgatttctcatcttcgttaaccatcgataaaagaaattcaactcctcaaactttattaacaaatatacagctttctgttcagccattgttgatgcgtatctcgctcagggatatccgtctagccatggtaatatttaagagagtcacgaccctgctaaataagatgaaagaacagaaaaatgatgaagaggaagaggaggtaaccgagaagattcaattctctcgtgaatttgaaaggaaactagcagtcttggatccaagtattttgggcgagcgtagtcagcccagccaaatcaccgaatccaaatccatcggagagcctactacaattttgaaaaacgaaatgtttaatgccgatttgggcggtttgagacttatcttgattggtgacgtccatgaaatgccaatattagacatgaatataaatgaagttactgcttccgcaaaggattggtctactgattttgaagcccttgcttctttagaaacctacgttaatatattcaactattcaagatctagctgggagccacttttggagatgatcccagtaacattccatttatcaaagggtcattctgaaatggatcctgcgttctctttcgacattttgactcaaagagttgcagaaattacactttcagccaaatcaatcgcaatgctttctcatatccctgcgtcattaacagaagagttgccgttagcctccagggtatcccagaagccatatgaattggtgaacgatacagaattagattttgatgtgtggatagaggacaaaacgtcagaggttaaaaacaatctcgtggttttgaaggcaaacacctcgttgccttgggaatttgaagattggagaagtattagagagaaactagacactgataaatcgaaaaatgttttaggggtttgtgtttccggacaagaatataaaactgtaatgaacatcgatgctacaacagaaggagaaaaattacacgttttaagcccaccaaggaataacgtacataacagaattgtttgtgaggctaaatgtgatgaaaataacgtgaaaatcattacatttagatcaaccttacttttggaaaacacaactttgactggaattgaacttttagtggaactcaaagattcagataaacaatctttgatttatgttattaatccccatgagagcaaatccgttcctgttgaatatgcctataattccgctattagaattagaccaacatcagagggttcatatgattggtcgcaacagacactgtcttggaaagacttgttaagcaaccaaatgtctattttctgtctttcaaaggaagaacctgacaaaaggtttcatttcgaagttggcgcaaagtacgatgaaagggaaccgttggctaaaatatttcctcatatgaagatagtagtttctgcctctttgatcattgaaaacttactcccagcagacatcaatttttctattttcgataaaagagaggaaaagagaacagattttttgaagactggaaaaaccatggaaatacatcatatttctttagacagttttctcctgatgtctgtccaaccactgcaagatggtgcttcagcttcaaaaccctctattgttaatacaccacacaagagtccattaagcccagaagagtcgttatccttgactctatccggaggccagaatttgcttctaaaattagactataagaatattgatggaacaaggtcaaaggtcataagaatatactctccttatatcattatgaatgctactgatagagaactataccttcaaagtagtattacaaatattgctcagtctaagattttgcttgaaaacgaaaaacggtatactattccgaaaatgttctcatttgacaaagagaacgataaaagcaatagagctcgtgtcagattcaaggagtcggagtggagttcgaagttatcattcgatgccataggtcaatcgtttgacgcatcagttagtataaaaaacaaggagcaagaatccaatttgggtattaatattagcgaaggtaaagggaaatatttgctaagtaaagttattgagattgcaccaagatatattattagcaatactttaagtatccctattgaagtttgtgaaacaggatccacagacattcaacaaattgaaccaagcataaccaaacctctgtataggatgagaaacgttgttgataagcaattagtggtcaaattcttgggtggagactccgattggtcgcagcccttctttatcaagaatgtcggtgtgacttatttaaaagttttgaaaaatgcaagtcacaagcttctaaaaattgaaattcttttggagaaggcgacaatattcataaaaattaaagatggcagtgacagatggccattttccataaggaattttagtgatcatgactttattttttaccaaagagatccacaaaaggttagtgatccatacaaggatgacagatctatcgagccatcaaaccggaatttcaagccaatattttacagaataccatcgaaaagtataatgccttatgcgtgggacttcccaacagctaaggagaaatatctagtgatagaatcaggcacacgtacaagagaagttcgactagccgaaatcggtgaactgccaccattgcgcctagacagaaggtcaagagataatccagctcctattgttggtttacatgttgttgctgatgatgacatgcaagctttagttattgttaactacaagaccaatatcgggttatataaattgaaaactgcagctgcggctagcaattcttcggcttcggtaaatagttcagcaaccgacggatttgtgcaaaaggatgaggacgaaaaggtaagcacacaagtggttgtttcgttcaaaggtgtcggaatatcattaattaacggccatttacaggaactactgtatgtaaacatgagaggaattgaagtgagatataatgaatctaaagcgtatcaatcattcagttggaagttgaagtggatgcaaattgataaccagctattttcagggaattattcaaatattttatatccaactgaaatcccttactcggaaaaggaaattgaaaatcatcctgtggtgtcaggttcgatttctaaagttaatgattcattgcaagctgttccttactttaagcacgtcactttgctgattcaagaattttccatacaattagatgaggatatgttgtacgctatgatggatttcatcaaattcccagggtccccatggattatggattcaaaggcgtataaatacgatgaagagattcagctacctgatgtttccgaactgaaggctgctggcgatatttattttgagatcttccatattcaaccaaccgtcttgcacctctcctttatacgatctgatgaaattagcccaggcttggctgaagaaactgaagagtcattttcgtcatcattatactacgtccatatgtttgctatgacactgggtaatgttaatgacgcacctgtcaaggtgaactctttgttcatggataatgtaagagtcccactgccaatattaatggaccatattgagagacactatactacccaatttgtgtaccaaattcataagatcctgggatctgcggattgttttggtaacccagtcggtctctttaacaccattagttctggggtttgggatttattctatgaaccataccaaggttacatgatgaatgatagacctcaagagattggtatacatttagcgaaaggtggactaagctttgccaagaagaccgtttttggtctttccgatagtatgtccaaatttacagggtcgatggcgaaaggtttatccgtgacacaagatctaaaatttcaaaaggttagaagattgcaacaaagagttaatagaaataacagaaaccccttggccaactcagctcagtcatttgctagtaccctaggaagtggtttaagtggcatagcgttagatccatacaaatccatgcaaaaggaaggtgccgtcgggttcttcaaaggtctcggtaaaggtatgatcggactgccaactaagacagccattggattcctggatctcacaagtaatctaagtcaaggtgtgaaaagcacgaccacagtgcttgacatgcaaaagggcagcagagtgcgtttaccaaggtacgtagatcacgaccagatcatcaaatcatatgatctacgggaggctcaaggacaatactggctcaagactgttaacggaggaatatttatgaaagatgaatacctgtcacacgtcatcttgcccggcaaagaactggcggtaattgtatctatgcaacacatagccgaggtacaaatggccacgcaagaactgatgtggagcacgggctattcgtccatccagggaattactttggaaagatccggcctccagatcaaactcaagtcccaatccgaatacttcatccctatcagtgaccctatggaacgccggtctctgtacagaaatattgctattgccgtcagagagtacaataagtactgtgaatccatattgtga

SEQ ID NO: 1663 - DNA, 1146 bp, Saccharomyces pastorianus
atgcagattttcgtcaagactttgactggtaagaccattactttggaggtcgagtcctccgacacgatcgacaacgtcaagtccaagattcaagacaaggaaggtattcctccagaccaacaaagactgatttttgctggtaagcaactggaggatggtagaactttgtcagactataacatccaaaaggagtctactcttcacttggtcttgagactgagaggtggtatgcaaatcttcgtcaagacactgactggtaagaccataaccttagaggtcgagtcttctgacaccatcgacaacgtcaagtccaagattcaagacaaggaaggtattcctccggatcaacagaggttgatttttgctggtaaacagctggaagacggcagaacgctgtctgattacaacatccaaaaggagtccactctgcacttggtcttgagactgagaggtggtatgcaaatcttcgtcaagacactgactggtaagaccataaccttagaggtcgagtcttctgacaccatcgacaacgtcaagtccaagattcaagacaaggaaggtattcctccagaccaacaaagactgatttttgctggtaagcaactggaggatggtagaactttgtcagactataacatccaaaaggagtctactcttcacttggtcttgagactgagaggtggtatgcaaatcttcgtcaagacactgactggtaagaccataaccttagaggtcgagtcttctgacaccatcgacaacgtcaagtccaagattcaagacaaggaaggtattcctccagaccaacaaagactgatttttgctggtaagcaactggaggatggtagaactttgtcagactataacatccaaaaggagtctactcttcacttggtcttgagactgagaggtggtatgcagattttcgtcaagactttaaccggtaagaccattactttggaggtcgagtcctccgacacgatcgacaatgtaaagagtaagatacaggataaagagggcattcctccggaccaacagaggttgatttttgccggtaagcaactggaagacggcagaactttgtcggactataacattcaaaaggagtccactctgcacttggtcctaagactaagaggtggcaattaa

SEQ ID NO: 1664 - DNA, 744 bp, Saccharomyces pastorianus
atgccgttgtttgaatcgttcaaaagtttcatccagtcgccgacggaatcgaaggtgaaacaggcaaccagcgaggacgagacaagtggtgccaccgggacgttgatgaacgagatatcgattttgacgtacagtcccaagacggtacgggagatcatccagatcatccgaaagcggctgttacttgggcagaacaggaggaactcacaccgcagctgtatccaggtgatgaagacactgacgctggtgtcgtacttgatgaacaacggatccaacgagttcatcaagtggcttaagggcaatatgatactgattgaaattttggaggactttcaggtccaggatacccgggacgaccgcaatggcgaggagatacgcaagctgagtaggaatctgcacgaattactgcaagacgacgagctgctggagagacagcgaaaggacgtgatccaattccggtcgagcatatcgacgccaggaaggaagtccacggacaatagccatctgaagctggaggagatgagaaatgagctcgctcgacagagcttggaaaagaaagccaagcccgctcccaccagcaccagtctggacttccagagacaacgcactaagaacacacacgaatacgctcgattttcattagtgcctctggcggaagaggacagtgaagactctcctagtgcagctggcggcacaagcagactatcgtttaggcccaagtcctcaaacaacccattcagatga

SEQ ID NO: 1665 - DNA, 1893 bp, Saccharomyces pastorianus
atggtaacagattccaaacaagatttgcctcagtatagcaaagactcagactcagattcagactctagcagtagctctaacttaagcgctgtgttcactttatcttcgaagagcgcgactgtagttctcaacagtgaagaatatgacgacgatgacgatgacgatgtgaacggattagataatgaattggccgacaacataacttatgtgggagacgaagatgaaaccatgcttgtaggtttgaaagaaaggcagaaactgcatctatctggcgcttttcgtttgcaaatagtgaaaggtggcatcgtctataacaatgtacactacaatgcctcgagagaaatcttgcacttctggcacccattatcacaatctataccgactatagatttttcacatttcgctggttggcaagatacgatatttttgcccagaaacaatagatttaatatcaaaaatgatgaattgaaatcattcccgtgtgttcttcgcgtcttcaattcaagccagacaggactgtcagaagctggtcgtctataccgtgatgttaattatctctggaagcccaaggaaccgtgtttcccattaaacgaaagggctacgtatcatctattacacgaatcagatgaggttcagtctttatctataccgagatattggtcggcccctttagaaaagttatatttgaatcataagaatgctacgtatgacacaagaatcatggtacttggtggtaaaaactctgggaaatccacttttttgaggcttttgctagaaaaatttacgcaggatatacgggcttccacgacagatcaggatgaattggtgtatctggacttagacccaggtcaacctgaatattcattgcctgattcaatttctttgaataagctgattccaaagccaattactctcggacaacatctttgtcagggttctaacttccaaactttattgcagttttacattgggtcctcttctcctcaagacgaacctgcatcatatttgaactccgttgataaacttatagattatttggaggaacaagccttttttggaacatccttgcttaacttgcctgggtggattaagggatttgggatgcagatcttgaatcacattataaagaaatacaagccgactcatttagtctttttggagacagcaaactcaaaaaggcatctggacgaactaactattccgcaaagtttttctacatcgttacgggacacatacctgcctgaagttgttcgcataccggcccataatttaaatcacgcttcacctgctaggttccatgcatcacaactacgaactttcaaagtattagcattatttcataaactgactcaattagattacgattttgctccgcttttgaaatcggctcctttacagatttcatacggtggagataaacgtggtatccaaggcatccggtttcccatggaattccaaaatttaaatcctgaagatatcagatctttactggaaggcgcagtagttgggatacacacacatttagaaggagacccgttagttgtaaagaaattggacaccttccccattttacaatccagcactccttctcgtaagagcttcgtaaccctaggactgatacattctattgacacattgcaacaaataatgaatatttatgtgcctccttgccataaaaaaaatttggatgaacagcctgaagatttcaaatggataatcgtaagaaacaagacagaaacgcccttctgtgacttgcttccatcgcatcgcgctataacttgggaccctagtatacaaataccgtttgcaacatttgaaagaaggaagaaattagaacatgtctggaaggttcgtaaaaatgtgatgagacgtgggcaattcatgaaaaggtag

SEQ ID NO: 1666 - DNA, 2499 bp, Saccharomyces pastorianus
atggatgactttacaatttatagtactatttctacaactgcttttttacaggttccacatttatacaccacaaacagattgtggaagcccattgaatcaccgtttttactcgaacttgtccaaaacaatgtgaattccaaagaaattgtaaacagaaaggcgatttgccacgtagaaccatcgtggataaatttaggtggcacatttgttaacgatgacatgatctcaataaaggctactagtagcaatatggaacgcaataccattagtcgagtttccttaccctttcccatgcatggggatgaccccgcggtagaattggaaaagatgaaacgtgtactagcagatctaagtgaaaaatttaatttggaactaatcgttactaatgaaccggcttatttggcatcaaagccaaccagcgaaaacaatgagtcatggctttacttacatgcactaggattggagtccaatttaatggaatgcgaaccccagttattggcatttttggatttgataaagaagaacgggatgactttgcctccacaacactacatcgtcgagccaatggaattggactcttattcaattatccccttatacatgggagtagatatggctaatttcaaatatatatcgaacgttttcaaaaccagtatttacgctcctgcccttatgactttgtccgcggattttagggcaaatccacagatatttttctctggaaccatccattcgttaactttattagccaagaaaaccttacaagagtccgtcgactttggttcaaagaagtttttttatcgcagattgacgaatattactccaggaaaattactattcattcaaaaatatcgccaacaaaaaataaaccagttaattttgaaataccaatcgctgattagggtcactaatgaacacattgaatttcaatcgatttctacaaaccttttagagatggtaataaaaaattttaccatccatgtcctacatgagattgtagaagtgcaaatttccctcaatgaaaactgcgaagtttcttcaaaagtaataattgataatatttttagcaacccagaaagcgaagtcatagtagttactccaggaaaagaatcgtttaatcaattaatgattgtcggcaatcaattctcgactaacaaagcatctgataattccataatacattatttatcccattttataactggcccaaataaaatcattaattcgaatctaagacaaattaaagccatttttgaaattcatccagattttgaggacttcatatcgggtaaaaaaaatggtaagctgacacgtataatggaactatccgcttgcttgatccaattggaaatggaagaagaggatgataatctctacctaaatttggttagtgattgtttctccgatttcacaaaatcgttcaaagatgtcatgaatgaatttcctgctgaagaatcatttttcattccagaagtttaccatagacctattataggcacaggtgggtcattgattcaagctacaatgaggaaacacaacgtctttatccaattttccaatagtttcaattttccacaaaacaaaatctctatggttagatatgacaatgtaataatcagatgccccaggaaaaacaaagcaaatatttgcttagctaagagggagttgaaagatattgtccaagagtacaataacttacaatcgagaacgcctattaggttctctaatgggcagtatagacatgtcttgaacgtcaatggcgaaaaaaatattataggccaaattgaaaagaatgagaatgtttatatcgtgatacccttggaagaacctttagatgggaatgtgcaactatccgtaagaggtaatgatgagaatacagtaaaggctgctaatgaattggtgaatggcgcgtttggtcatgaatacgaacttagaatagataaacctatagatgctcgcaaggagtatgagttctataatctgatcgttgttccttttctgcaaactatgaatataattgccacttttgagaaagaccttatcactttcactattgaaaaggatacaagtgaaaacactctaactaaagcaaccgaattgctatctgattacatgggaacacaaaagaggaaaataatattcaagaaactgatcaaagattttgttttaccgcccacaaccaacaagagtaatgctaaccacaatgctactaatggtaattcgaaaccaatgcatagttccaaaaatcgtaacgcgaccatcgataatatcaactctttgggaagtccaccacaacgtcaaacaaacagcctcaactacaaaatgccaggcgtgacaccagcagagggagctcgggccatcaagggatacatacctaatacttattacaacggacttggttacggctatggttatacgtatgagtacgatcgtaattatacgagtttcaatcaaactcaagccaaccacaggcaaaactatcaaaatggtagaaaatga

SEQ ID NO: 1667 - DNA, 3054 bp, Saccharomyces pastorianus
atggatgaaaagtcaataaagcagtcaatactttcatcttccaatgatgaaaaaattatatacaaatcacgaataaagaaatttcagaaaaatcataaattctatattattttgttgattttcattgcaatcttacaatttatatcaatagcttttttcacgcgcgggttcttactgtcaagacacgttctggataacatatccgcccaaaacgaaacgaccgccttacagccaaggttcaacaaaaccgtggttctggtcattgatgctttgagatttgattttgttatccctgttaatgaatccagttcgacccacaacctgaactaccacaataacatattatcactatatgactcttttgcaaacgatgaggatacatcttctttactgttaaaattcattgcagaccctccaactaccactttgcaaagacttaagggtctaacgacaggttcactgcccactttcatagatgccggatcgaactttgatggaactgtcattgaagaagacaatttgctcaagcagctctacttggcaaacaagacggtcaagtttgctggagacgatacctggatggccctgttccatccattcttgtctaacgatagttttccgctggaatcacttaatgtttgggatttggatagtgttgataaaggtgttatggattactttcatgatcacttacagcaagatcaagaatgggatgtaatgatcgggcacatgctgggtattgatcatgtaggccacaaatatgggccagatcatttcaccatgaaggaaaagcaagtgcaagtggatcagttcatcgattggatactaaaatctattgatgaaaacaccctgctggttattctcggagaccatggtatggatcatacaggcaatcatggaggcgactccattgatgagttggaaagcactttgtttctctattcaaagaagccaaatctatggaaactcaaagactcttccaattacgacattagtgctttgggacacgattaccgctctgttagacagatcgatttagtgtccagtttatctttattactcggtcaacctattccatttaataatcttggatggccaattgatgaaattgcaagaaacgataacgaatggtccgagtttgtccgcctagctataaaccagttacaactatacaaggatacgatgcaaattcatgattccaatgacgagatactaaagccattagcagaaaatatactaaacacttctcctaaaactaatccgaaaaaattcattaaattggggcacaaatatcaaaaagtatttttacaaacctgcgaagaattgtgggcaaagtttgattattattcaattgccaccggtataatattactcaccatctctttaattctattgatatccatcacaaaattaatcccttctattgtcgtgaatcaaatggttccagaatttgtcccaggtattatcattatggtcttggtcacaaacttgtgttttcatggaatcttttatgtttaccaacaaccgacttttgtagatcagttttggggtactctgttagcgactgccgttggcatcattattggttgttatataacaatcttcgataggtataacttcatttggatcgctatgagacttggcgaaacattggctgattattggtcaagaatagctgtcatgtttatgattatacatgctttactttttacttccaattcctttacagtgtgggaagatagaattgtggcctttcttttgtccacttttggtatgctaacactatatgaatttgtgttcttaccaaaaagacaatctaccacggcattattaaccgcgacaattagtgaaaaggagggaactacttcaggtgtgaattcttcaacggcaaattcaaattatttaccactaacaagatttgcaagattattaggtggttaccattcagcagttttaatcatttttaccagattagcttctacaatcaccatttgtagagaagaacaaggtgaatattgtatcccaactttcaataatcaaaataattccgcttggtgggtattgggtctctgcttcctgatgatttttatcttgccggcatgtatcactggttattacaatctaacatcatcgtaccaggctgcagctccgatttggataaacgttttcctgaaaggtatccttggtttgaatttcgtttattggtcactgacttcattagaaaataacaatgcgacaattacactaccgtttttaaataatattacaattttcaagttcactttggctagaatcattgctggattttcgttgatcgcctccaacgtgggttggctaatggggccactctgtattaaattaaatgttcacaatactgacgtcaaatctcatgaagctacaattttgggttataccaatatttacggttcggagtttttcctcttagtcataaatgttttgatgagtatcctattcttcaataaacctctggctcaattatcatacttcctcatgtgtaaccaactattatcgattttagagattattgatcttttgaaattgaaagaaaacataattggtccaattgccttagggctcttatcataccaacactttttcaccacaggtcatcaagcaacgattccatcagtgcaatgggatattggatttatgctttctgaaaaaatcacgttccccttcacccatatagccatcatcctgaacacttttggacctcaaattctcgtttctttatctgtagcattactaacgctttggtcacagcctccagatgtcttaaagccacaaacgcttttggggaggattgtttcaaactgtggtatactactcacgtacaacaccattttgtgtttgagttcatttatctgggttactcacttccgtaggcatttgatggtttggaagatcttttgcccaagatttatcttcgctgctttgagtttaatagtcactcaactggtggtcacattcggcaccattgcatttgctagtgggagattgattaaacatatcaatgacattttctggaaatga

SEQ ID NO: 1668 - DNA, 2250 bp, Saccharomyces pastorianus
atgacttcaaaaccatccactagtgaagctagggctcactcagtatcccatgtatcgagcacgggtatgaagggatcatcgacatccaacagttctagaccatttagaccatgtgcggactgtacgtgttcgcccggtctgctgtccaggcaaggacgtagagcctctctattcctaaggaagctggaaaattcaaggaggtcgtccagcatgctgctcaatgacccgaagggagctggtgggagtagcgccgcaggaaacgggtctgtttactcctgtgactcgctgtgtgctattaatagggaggttaacaccaccgagaggctgttgaaattgcgccaagagatgaaaaaacacgatttgtgttgttatattgtgcccagctgcgatgagcaccagtcagaatatgtatcgttgcgagatcagagacgcgctttcatatccgggttttccgggtctgctggtgtcgcttgcatcactagggatttgctaaatttcaacgaggaccatcccgacgggaaatccattctgagcaccgatggtagatacttcaaccaagccagacaagaactggattataactggacacttttgaaacagaatgaagacccgattagttgggaagactggtgtatcagggaagcattggaaatggccaagggacttggtaataaagatgaaacggtgttgaaaataggtatcgaccctaaactcatcacctttaacgaatatgtgtcgttcagtagaatgattgacactaaatataaagccaagggtaaagtggagcttgtgcccgtggatgaaaacttgatcgacagtatttggtccggtttcgaaaccttgcccaaaagaccttgcaacgaattactgctgttgagatatgaatttcatggtgaagaattcaaagacaaaaagcaaaaattactggcaaaactaagtaataagtctggaagtgcaacagctgctcctgccaagactttcatagtcgttgcgttggacgaagtttgctggttgctaaacctgcggggatccgacattgactataatccagtttttttctcttacgtggctattagcgaagaggagactattctcttcaccaacaattctttcaatgatgctatatcggaatacttcaaagaaaacgatattgaagtgaggccctacgagcagatatggcagcatttaaccaaggtcactgcccaggcctcctccacggaccacacatttttgattcctgatggagcgtcgtggcagatggtccgttgcctaaacgttccagaaggaaatagccaagcgacgaacacggcggccccaccaaactaccgcatgattcactcgcccatcgatgttttgaaatctatcaaaaacgatatcgaaatcaaaaacgcacacaaggcgcaagtcaaagacgcagtatgcttggtgcagtattttgcgtggctggaacaacaactggtggtgcgcgaggcattgatagacgaatatcgtgccgcggaaaaactgatcgagatcaaaaaaacgcaaagaaacttcatgggcaactcattcgaaacgatatcgtccacgggcagtaattccgccatcatacactattctccaccggcggacaactcgtctatgattgaccctacaaagatgtatctttgcgactccggttcgcagttcctggaaggaacaacagacataacaagaaccatccatctaaccaaacccacgcaagaagagatggacaactacacgctggttctcaagggtgggctagccttggagagattggtgttccctgaagacacggccgggtccagtatcgacgccattgccagacagtttctatggtcgcgtgggctggactacaagcacggcacgggccacggcatcggatcttttctgaacgtccacgaaggacccatgggcatcgggtcccggcctcatctgatgaacttccccctaagagccggaaacatcataagcaacgagcccgggtactacaaggacggcgaatacggtatcagagtagaaagcgacatgctgatcaagaaagcctcgtcaaagagcaagttcctcaagttcgaaaacataacagtagtgccatactgtaggaaactgatcaacaccaagctactaagcgaggaagaaaaaacacacatcaacgagtaccactcgaggatatggagaacggtggtgcatttcctgcaacctcaaagtatctcatacaagtggctgaagagagaaacgagcccattatga

SEQ ID NO: 1669 - DNA, 1764 bp, Saccharomyces pastorianus
atgtcggatcattcccgtgtttccaacaaggaaaaccatctgatgccaacggattcgtcaaggagctcatcgagcgctacgcgctcggcgggcaccacagataccactggcgttgaaccagtggatttcacaggtgaaggagccaagtacaccacggcgacagaaaatgacgttggtgccacggagtccgccctccaaaggactacgactatgaattccgcggcagagtcagatgtcaagatcaccaggagactgaccaagattctgacgggatccgtcgacgaacccgaccgtatagaagttgattactcgcactgtccgcccatgggtggtgagagaccttacccaccaacattgccaaatagagaccagttcgaagtaactttcgatgggcccaacgatccgctacatccgttcaactggcccataaagaaaaaagtcctgctgtgtttcgttctatgtttggattgtattgctattgctatgtgttcttccatctttgcctcggccgtgccacaaatctgtgagatttaccacgtcatccaagtcgttgcgatcctcggtgtcactcttttcgttcttgggtttgctgcgtcaccaatcgtttatgcacctctttccgaactatacggtagaaagggtgttctggtgttgtctgcgtttgggtttgctcttttccagtttgctgtggctaccgccgaaaatctgcaaaccattttcatttgtagattttttggtggtttcatcggtgctgctcccatggctgttgtccctgccgcttttgccgatatgttcgacactaacgtcagaggtaaggccattgccctgttttccttaggtgtctttgtgggccccattctagctccggttatgggttcctacattgcccaaagaaccacctggagatggttggaatacgttgtcggttgtttcgcctctcttgttttcgttttgatcgtggtgttttttgaagaaactcatcaccctactattttggtcaacaaagccaagcagatgagaaagcaaagtaataactggggtattcatgctgcccatgaagacgtggaattgtccatcaaggatattgtccaaaaaaccgtgacgagacctattgtgatgctattcgtggaaccattgttattattcgtgactatttataactcgtttgtctacggtatcctgtatctactgctagaagcctaccctcttgtgtttgtggagggttacggatttaccgagaacggtgaattgccgtatatcgccttgattattggtatggtagtgtgtgctgcttttatctggtacatggacaacgactatttgaaaaggtgtaaagccaaaggtggcttagtccctgaggccagattgtactccatgatcgttgcaggtactattttccccattggtatcctgtggttctgctggactggttattatcctcacaagatccattggatggtccccacagtaggcggttccttcattgggtttggtctgatgggtatttttttaccatgtctgaactatatcatcgagtcgtacttgcctttggccgcttctgccgtcgctgcaaacacttttatgagatccggatttggtgcgtgcttcccgctgtttgccgggtacatgttccgcggtatgggtattggttgggccggtttgttactaggtctattttccgctgccatgattcccgtgcctctgctgtttttgaaatacggtgaagccataagaagaaagtccaaatacgcttacgcctcttaa

SEQ ID NO: 1670 - DNA, 2727 bp, Saccharomyces pastorianus
atgaacgacgaaacacaattcacagaaagagccctaacgattttgacattggctcaaaaattggcttcagaccatcaacatcctcaattacaacctatacatattctagctgccttcattgaaacgcctgaggatggatctgtcccatatcttcagaatctgattgaaaagggccgttacgactatgatcttttcaaaaaagtggttaataggaatttggtaaggattcctcaacagcaacctgcacctgctgagataactccaagttacgctctgggtaaagtgctacaggatgccgccaagattcagaaacaacagaaggactcattcatagcccaagaccacatattatttgctcttttcaacgattcatctatccagcaaatcttcaaggaatctcaagtagacatcgaggccatcaagcaacaggctctcgaacttcgtggtaatgcaagaattgactcccgtggtgctgatacaaacactcctttggaatacttatctaaatatgccattgacatgaccgaacaagcccgtcaaggtaaactggatcctgtcattggtcgtgaagaagaaatcagaagcaccattagagtcctagcaagaagaatcaagtccaacccatgtttgattggtgagccaggtattggtaagactgctatcattgaaggtgttgctcaaagaatcattgatgatgatgtccctacgattttacaaaacgcaaaactatttagtttggatttggctgctctaaccgcaggtgccaagtataaaggtgattttgaagaaagattcaagggtgtgttgaaggaaattgaagaatccaagactttgattgttttattcattgatgaaattcatatgttgatgggtaacggtaaagatgatgctgctaacatcttgaagccagctttgtccagaggtcaattgaaagtcatcggtgccaccacaaataacgaatacagatccattgtggaaaaggacggagcctttgaaagaagattccagaaaattgaagtcgctgagccaagtgtaagacaaactgtggccatcttgagaggtttacagccaaaatatgaaattcatcacggtgtaagaatcctggatagtgccttagtcactgcggctcaattagcaaaacgttacttaccttataggagattgccggattctgctttagatttagttgatatttcttgtgcaggtgttgctgtcgcaagagactccaaaccagaagaattagactccaaagagcgtcaactacaattgatccaggtcgaaattaaggctttggaaagagatgaagacgctgattctaccacaaaggacagattaaagttggcaaggcaaaaggaggcttctttgcaggaagaactggaaccattgagacaacgttataacgaagaaaagcacggtcatgaagaattaacccaagctaaaaagaaattggatgaattggaaaataaggcccttgatgctgaacgtagatacgataccgctactgctgctgatttgagatactttgctatcccagacattaagaagcaaatcgacaggttcgaacaacaagtcgctgaggaagaaactcgtgctggtcctaactctatgattcaaaacgtagttaactcagataccatttccgaaacagccgcaagattaacaggcatcccagtaaagaagttatcagaatccgaaaatgaaaaattgattcatatggaacgtgacttgtcttccgaagtcgtgggtcaaatggatgccatcaaagccgtctcaaatgccgtgagattatctagatcaggtttatccaatccaaggcaacctgcatctttcttattcttagggttgtcaggttcgggtaaaactgagttagccaagaaggttgccggatttttgtttaatgacgaagatatgatgattagagtcgactgttctgaattaagcgagaaatatgcagtttcaaaactgttaggtaccaccgcaggttatgttgggtatgatgagggtgggtttttaaccaaccaactgcaatacaagccatactctgttttgctattcgatgaagtggaaaaggcccatccagatgttctaactgtcatgttacagatgttggatgatggtagaattacttcgggtcaaggtaagacaattgattgctctaattgtattatcatcatgacctctaatctaggtgccgaattcatcaattcccaacaaggagccaagatccaagattcgactaaaaatttggtcgtgggtgctgttaagcaacacttcagaccagaatttttgaacagaatttccagtattgttgttttcaacaaactttcaagaaaggccatccataagatcgtggatattcgtttgaaggaaattgaagagaggtttgaacaaaacgacaaacattataaattgaacttgacgcaggaagccaaggatttcctagccagatatggttattccgatgatatgggtgcacgtccattaaacagattaattcaaaccgaaattttgaacaagttagctctcagaatcttgaagaatgaaatcaaagataaggaaacagttaacgttgttttaaagaagggtaaaacccgtgatgaaaatgtctctggtggagctgaagaatgcttggaagtcttaccaaaccacaaggctactacaagtgctgacacattaaactatgatgacaatgaagacagtatggaaatcgatgatgagctagattag

SEQ ID NO: 1671 - DNA, 843 bp, Saccharomyces pastorianus
atgtcgtcaaaaccaaccaagaaccaaggctccgcctcagcccctcccaccagagaccagtccctcgtgcagaggtttatggcggtggccaagagcctgcagtttgcgtggtttaccggccattctgtcgtattgatcagcacgatcctgtacctgttcaagatgtctgaggtctactacagactggtctacctcggtgtcatcgaatcgttcggcatcatcatctaccagcaatttttcacccgcaacgaaccattgcaaaccccaggggccgctgccaccaaggcctcggtgaagtcgcgcatttccggcttgttaaagagcgaagatgtgttgtacctgattctggccgtgttctggttgttcaccccaagattttccttcagtttgatcccatttttcgcatttgccgtgttccacgtcttaatctacgttgaaaaagtcatcttgccaaaagtgttccatctgtccagcaaggagtcgagtggcatcctcaggttcatcgacaagtttgttgttcagtacaatgacctgtgtatgcactgggtcgggactgcagagctactgattttcatcttgatcctgttcagagccattttatgcttccagagatcctggatcatgctggcagtgtacgccgccttcatcaagcttagatacgaaaactccaagtacatgaaagccgccttcgcccaatggagagtcagaatggacgggatcataagccatccatctgtcccaccctacgtcaagagagcctacaacgcggtcaagatgagtctggtccgcgtgtcccagatccgtttgagcggtgccccacaggaaaccaagaagcaaaactaa

SEQ ID NO: 1672 - DNA, 1674 bp, Saccharomyces pastorianus
atgtcccaagacgaaaatattgccaaggctgttgccgaatctgccgaacccgcccaagttatcctcggggaagacgggaaaccattatccaagaagggtttgaagaaattgcagaaggagcaagaaaagcagagaaagaaggaggagagagctcttcaattggaagccgaaaaagaggcccgcgaaaagaaggctgcctccgaagacactgccaaggaaaattacggtaagttgccattgatccagtcccgtgattctgacagaaccggcgaggaacgtgtcaagtttatcgatttggatgagactagagacagtgacaaagaggtcctattcagagccagagtccacaacaccagacagcaaggtgccacattagcctttttaacattgagacaacaagcctctttgatccaaggtcttgtaaaggccaacaaggaaggtaccgtcaccaagcacatggtcaagtgggctggttctttgaacctggagtccattgtccttgtcagaggtattgtcaagaaggtggacgagccaatcaaatccgccactgtgcaaaacctggaaatccacatcacaaagatttacaccatttccgagactccagaaacgctaccaattcttttggaagacgcttcccgttccgaagcagaagctgaggcggccggtttgccagtagtcaacctagacactagactagactcacgtgtcatcgacttaagaaccgtcaccaaccaggctatcttcagaatccaagccggtgtctgcgaactgtttagagagtacttgtccaagaagaagtttactgaagtgcacacaccaaaacttttgggtgccccaagtgaaggtggttccagtgtgttcgaggtgacgtacttcaagggtaaggcctacctggcccaatctccacagttcaacaaacaacaattgatcgttgccgatttcgaaagagttttcgaaatcggccctgtgttcagagctgaaaactccaacacccaccgtcacatgaccgagttcaccgggttggacatggaaatggcgttcgaagaacattaccacgaagtcttggacactttgagcgagttgtttgtgttcatcttcagtgaattgcccaagagatttgcccaagagatcgagctggtacgtaaacagtacccggtcgaagaattcaagttgcccaaagacggtaaaatggtccgtcttacatacaaggaaggtattgatatgctaaaggctgccggtaaggaaatcggcgacttcgaggatttgagtaccgaaaacgaaaaattcctgggcaagttggtgcgcgacaagtacgacaccgacttctacatcttggacaaattccccttggagatccgtcccttctacacgatgcctgatcctgccaaccccaaatactccaactcttacgatttcttcatgagaggtgaggagatcttgtccggtgcgcaacgtatccacgaccacgccttgctacaagaaagaatgaaagtgcacggcttatccaccgaagacccgggtctaaaggactactgcgacgggttcagctacgggtgtcccccacacgctggtggtggtatcggtttggaaagagttgttatgttctacttggacttgaagaacatcagaagagcctcgttgttcccaagagatcctagaagattgagaccatga

SEQ ID NO: 1673 - DNA, 327 bp, Saccharomyces pastorianus
atgagctccaatgaagaggtctttagtcagataaacgcaactgtgaatgtggtcgataataaaaagcgtctactattcgttcaggatagttgcgcactagtcctggggcttgttgcagggtttttgcagattgaatctgtcaatgggttcctttggttcctagccctgtacaacttgatcaatatggtttacattgtttggatctgtcaattacaaccagggaaattctaccaaagcccactgcaagatatttttttcgaatcatttatcagagagttaactgggttcgtcatggcatggacatttggttatgccttaatcggataa

SEQ ID NO: 1674 - DNA, 1242 bp, Saccharomyces pastorianus
atgggctttatatcgtcgatattgtgctgttcttccgagacggctcaatccaactccggttctgcttatcgccaccaacaatccagctccctcaataaaaacagaaacgtcaagcactccaacacgaaaagtcgagcacgtgccgtgcagaagacaaactctccgccctccaagactaattcggccaccactttgagctctacagaaagatccacgggtaaatctgggataagtacgaacgataatgagaaaaagaaaccagtgtcgccgactgtagctgctaccaccgtcactagtaataatactacaaagaaagtcgacagaaaaatcagcaaagaagacctacacgaggaaaaatacgaagttgatgaggatgaagaggttctcgatgaagataaacgtcgcagccgcggcgccctacgtgataagggatccgtcgtgaaagaagtgcccaagcagcagaaacagcacaagcaacaaaaacagcagcaacaagagtccatcgtacgagtatcgcctgaccatcttatccaagatattgatttgagtagagtaagcagtagtccccaggctagtgtgacttccaacgatgctgatgatgacgaagatgacgacgaagacgacgaagacgaagagtatatcaatctaacgctcttgcaacaagaccagtaccatgcaccgggcttcaataccctgctccccccacaagatgaaagtacaaaggataagaaatgtttaatactggatcttgatgagactctagtacattcgtctttcaaatatttgcgatctgctgatttcgtcctacccgtggagatagatgaccagattcataacgtctatgtcataaaaagaccgggcgtagaggagttcttggaaagagttgggaagatattcgaagtcgtggtctttactgcaagtgtctcgaggtacggtgacccgctactcgatatactagacacggataaagtcatccaccacagattattcagagaggcttgctataactatgaaggcaactatatcaagaatttgtcccaaatcggaagaccgttatcggagatcatcatccttgataactccccagcttcttacatcttccaccctcaacatgcaataccaatatcgtcctggttttcagatacccatgataacgaactattagatattattcctcttttagaagacctttcagtgaaaacttcattagacgtaggcaaaattctggatgtaacaatatag

SEQ ID NO: 1675 - DNA, 210 bp, Saccharomyces pastorianus
atgactgaaactgacaagaaacaagaacaagaaaaccacgcggagtgcgaggacaaacctaagccatgttgcgtctgtaagccagaaaaggaggagcgggatacatgcatcttattcaatggacaagactctgaaaaatgcaaggaattcattgaaaagtacaaagagtgcatgaagggttatggcttcgaagttccaagcgcgaactag

SEQ ID NO: 1676 - DNA, 2244 bp, Saccharomyces pastorianus
atggtggtaggaactaaaaaatactctaatttggactttgtccctacaatcagtgacagtgaagacgatgttccaattctagattcttctgatgacgaaaaagtcgaggctaagaagactacgaagaagcggaagggtaagaataacaagaaaaaggttagtgagggggataacctcgatgaggatgttcatgaggacttggacgcggggtttaagtttgatttggacgccgatgataccacttcgaacttccaaggctggaactttctagcagagggcgagtccaataaggacgatgccgaagcttttgtgaagaaggacgttgacttggataagattattagaagaaaaggtgggctggtgaaaatggcccatattgagagtaaacaagaagaagaaaccgagaaagaacaagtagaaaaagaaaacgatagcgacgatgaggaattagcaatggacgggtttggtatgggagctcccgccaagaatgaagaggaagatgattcagaagacgaaccagaagaagagcaggaacaggaggaggaacaggaggaacttaccatggaaaagggcggcaaaaatgacgaagcagttgaagaagacgattccgaagaggcaaaagccgatttttacgcacctgaaactgaggcgaatgacgccaaaaagcaaatgtatgacaacttcaacagcctgtccctgtctcgtcccgttctcaaggggcttgccagcttgggttatgtcaagccttccccgattcaaagcgccaccatccccatcgccttgttgggtaaagatatcattgccggtgcggtgaccggttctggtaagactgccgcgttcatgattcctatcattgagcgtttgttatacaaaccgggcaagattgcctccaccagggtcatcgttttgttgcctactcgtgaattagccttgcaagtcgctgatgtcggtaaacaaattgctcgtttcgtatccggcatcacttttggtctagccgttggtggtttgaacttgagacaacaagaacaactgctgaagtctcgtcccgatatcgttattgctactcctggtagatttatcgatcatattaggaactcggcaagtttcaacgtggactcggtggaaattttggtcatggatgaagccgatagaatgctagaagaaggtttccaagacgaattgaacgaaatcatgggcttattgccaagcaatagacagaatctattgttctccgctacaatgaactccaagattaaaagtttagtaagtctttctttgagaaggccagtaaggatcatgattgatcctccaaaaaaagccgctactaagttgacgcaagagtttgttcgtattcgtaagagagatcacttgaagcctgcgttgctctttaatctgatcagaaagctggatccaatgggccaaaagaggattgttgtctttgttgcaagaaaggaaactgcccataggttaagaatcattatgggtcttttgggtatgagcgtaggagaattacatggctctttaacacaagaacagcgtttagattccgtgaacaaattcaaaaatttggaagttcctgtactcatctgtacagatttggcctctagaggtttggatatccccaaaatcgaagtcgttgtcaattacgatatgcccaagagttacgaaatttacttacatagagttggtcgtactgccagagctgatagggaaggtcgttctgtcacacttgtgggtgaatcgtctcatgatcgtagcattgttcgtgctgctatcaagagtgtggaagaaaataaatcgcttactcaaggtaaagctcttggtagaaacgtggactggattcaaatcgaagagacaaataaactcgtggaatcaatgagcgataccgttgaagaaattctagttgaagaaaaggaggaaaaggaaatcttaagagcggagatgcaattgagaaagggtgaaaatatgttaaagcacaaaaaggaaattcaggcaagaccaagaaggacatggttccaaaatgaatcagacaagaaaaattctaaattgctaggagctttatctagaaacaaaaaagtcaccaacagtaaaaagagaaagcgtgaagaagccatcgctgatgataatggttcacgttcctatagaaagactaagaatgatcgtgtcacagaccaagaaagaactttcaaaaaacagaaaagtgcaaatccaaacaagaagaagggcttttctaaacgtaggtaa

SEQ ID NO: 1677 - DNA, 2004 bp, Saccharomyces pastorianus
atgagcagtaacgagcaggtattagacgaaagcctggagaaagtgagagccttactgaattccaaattacgggagccgatcgagttcctaacaggtgcagagtcagatttttgctacactacgctaattgttagtgaaaatctgaatttaataggccgtggctatgagcagatattgacagattacgtttccctttgcgatcaaaagtacctgcgtgaagttgcaatttcagattcacgattttggaatatattgtatgataattgtccaaaattgaggccagaaacagtagtgtcaaacctcattaggctttttaatataacactcgattgcccaaatgctggtgaggatgaagtaataaagagtctctgtcgtattctcacaacgaatcctcagattatagggatgcttctactagttctgtcgcacagaccgattcaaaagtcattattcatgaacactattctatgcattaacctatttttgaaatgttcacttatcttatgcgagacttcagtatcacacgctgtagaatgtgtgccagcaattctgattttattattccaatacaactttccagcttctatatccgaactgatttatgtagaagagctacaaccactgattttagaagagtttgtacctttgaagcaaaggttgataaactttctatcgtcggttaacattgaggactattcatgttccctgaaagagaaacttctcagggctattaaaaaccattccgtatttcagaaaggacttgaaatggaactgggcgagctcccaagtataaacctgttgaatgcctatgacacatatacattcttaaatagccccaatggatcattcaagaggctttacactgaacaactgctattcggtgaaaatgattttcctctttatgaagcaatattcaaactatcggatcagtttcgaagacttttcaacttaaccgggaaacagcaagatttcgattccgagtctgattacaatttgaaactccaaattgccaccgctgttctaaatcgacaaacttgcttctataaaacacttgagttgtttttgaggttctggatagaatctttagcaagatcggaaaacgatatggtttcactactaagcttagccattatcaccctaaaatatatttgtttatcatcaggcgacttaaaatcagcaagggagtccaaatcactccttaaaacccaggtcggggcacttgactctatgaactataaatttgcaagaaaactgcaattagactatataaaagaagaccattatcggacctggtcgtcaagtatcgctagcttcgatacaatgctatcaggccaggtacacgattacgttcgtcatcaaaggctccttcaattgcaaaagggaacatgggtttattcagaagacccattaaacacggaagccggaaccccgaaagtttatttcatcatagtgtcggataatcatgcgagtcttttagccagagaatttcaaactcaaacggatgatttgccttatttatttgataataaaatcctaacaagtccaagttgtgaagcattggctaaaaacggcagaacgaaagttgtagttttgaagcatataacctgcttcaagagcagagaacttacaacaccgagccgtcgaactggtagtaatgtttacatcaaattgcaggaacaaaatgtatacaccgaagttgagctaaaagaccgcaacgacagaacggttttgaagttttacttagacactgaagagggaaaatatatatggctagacggattgaaacttatatcaccatcccatcatgaggatatatctagagatacaaaggagcaaatagacacactgtttgacttgaggaaaaatgttcaaatgataaatttgaacgttcacgaggaggattcgatagcgcctccacccaaatcgaatgatgagaatgaagatgaggaattttatgacttggaaacgctaaagagaataacggaagatttttatttcgattag

SEQ ID NO: 1678 - DNA, 1854 bp, Saccharomyces pastorianus
atgggtcagcttaatgaagctaaaaagatgaatgtcactgagtttgccgatgcccaaagaagccattacacagtatatcccagtttgcccaaggcgaacgaaaacgacaaacacattccatttgttaagcttctgtcaggcgaggaatcggaaacaaatgtcgaaaaaaggtgggagttgtacgaccagttacattcacatttccacgaccaggtcgaccatattattgataacattgaaactgacttgaaaacagaaatttcagacctcttgtataatgaaacggctcaaaagagacgatgcttcaacaccatcttcctattaggttcagatagtacgacgaaaattgaacttctaaaagatacgccctctcagtacaatgccttaattgaacttactccaaaggaatctccaaatgtgagaatgatgcttcgtaggtccatgtataagctttacagcgctgccgatgctgagcaacatcccaccataaaatatgaagagactaatgatgaagataccgattttatggagcaaaacaatgatgtgtcatatgacttgtcccttgttgaaaatttcagaaggctttttgggaagaatttgaacatggttttcaatttcaaagatgtcgattctatcaatttccacactttagacagtttcatcatcttactaaaaagcgcctttaaatatgatcacgttaagataagtttaattttcaacatcaatacaaatttatcaaatattgagaaaaatttaagacaatcaacaatacgacttttaaaaagaaattatcacaaactggatgtatcaagtaataaagggtttaaatacggtaaccaaatttttcaaagtttcttagacaccgttgacggaaaattgaatctttccgatcgatttgtggaattcatcctcgacaagatggcaaataacaccaatcacaatttgcaattattaactaagatgttagattattcgttgatgtcgtacttcttccaaaatgctttttcagtttttatcgaccctgtaaatgttgattttttaaatgacgattacttgaggatactaagtaagtgccccacattcatgttctttgtcgaaggtcttataaaacagcatgctcctgctgacgaaatactttcgttgttgaccaacaaaaacagaggcctagaagagttctttgttgagtttttagtgagggagaatccgattaatgggcatgccaaatttgttgctcaatttctcgaagaagagttgcatataaccaatttcaatctgatagaattatatcataacttattaattggcaaactagattcgtatcttgatcgttggcctgcatgcaaagagcacaaggaacgacttcattttgagcctattgatacaatcttccaagaattattcactttagacaacaagagtggactactcacccaatcgatttttccctcctacaaatcaaaccttgaggataacctgctgagttgggaacaagtgctgccttcgctcgatggagacaccgatgggggcatttccgaaagcttggataaagtgatggctccagtagtgggccagttgtttaagctttatcgtgaggcaaacatgaccattaatatatacgatttctacactgcgttcagagagactttgccaaaggaagaaatactgaattttatcaaaaaggacgcctctaacattagacttcaagagctaggagaagccccagatgcgtttgaaaaagtatcattgattctatttatgcaagcaatctttgcctttgaaaatatggggctcattaaattccaaagcgttaaaaattacgatcttgtcgaaaaatgtgtctggaaaggcatctaa

SEQ ID NO: 1679 - DNA, 2277 bp, Saccharomyces pastorianus
atggctagtttagaagatctaatccctactgtcaacaagttgcaggatgttatgtacgactccgggatcgacacactcgatttgcccattctggctgtcgtcgggtcacaatcctctgggaaatcctccatcttggagactttggtcggtagagattttttacctaggggtaccggtattgtcaccagacggccattagttctccaattaaacaacatacctccaaactctcctctaatagaggaagatgataattcggttaaccctcatgatgaagttacaaaagtatcagggtttgaggctggtacgaaacctttggagtacacgggtaaggaaaggaaccatgcagatgagtggggagaattcctacatataccggggaagcggttttatgattttgatgatattaagagagaaatcgaaaacgaaactgcaagaatagccggtaaagacaaaggtatcagtaagattcccatcaatttgaaagtcttttctccccatgtgttgaatttaacactggtagatttaccggggattacaaaagttcctattggagaacaaccacctgatattgaaaaacagatcaagaatttaattctggactatatagccactccgaactgtttaatcttggccgtctctccagctaacgttgatcttgttaattccgaatctttgaagttagctagagaggtagacccacaggggaaaaggaccattggtgtcatcaccaagctagatttaatggattctggcactaatgctctagatatcttgtctggaaaaatgtaccctttaaaattggggtttgttggtgtagttaatcgctcgcaacaggatattcaattaaataagacagtcgaagaatctctggacaaggaagaagactactttaggaagcatccagtttacagaaccatctcaactaaatgtggtacgcgttacttggccaaattactgaaccaaacattgctaagtcacattagagataaacttccagatattaaaaccaagttaaataccttgatctctcaaactgaacaggagcttgctagatacggtggcataggagctaccaccaatgaaaacagggctagccttgttttgcaattaatgaataagttttctacaaactttatttcatctatagatggtacatcttctgatatcaatactaaggaactatgtggaggtgcccgtatatattacatttacaataatgtctttggaaattctttaaagtcaattaatccaacttctaacttgtccgtccttgatattagaacagcgataagaaattccacaggtcctcgtcctacgttatttgttccagagttggcatttgatcttttggttaagccccagattaagcttttatcagaaccatcacaacgttgcgtggaactagtttatgaggaattaatgaagatatgccataaatgtggttcttctgaattggccagatatcccaaattaaagggtatgcttatagaagtaattagtgagctacttagagaaagactgcagcctactcgttcttacgtggaaagtttaattgatatacatcgagcatatattaatactaatcatcctaatttcttaagtgccacggaggcaatggatgatattatgaaaacacgtagaaagcggaaccgggaattgttatcaaagagcaaattatctcaacaagaaaatggccaaaccagcaacactaatggcactccatccatctcctcaaatgcagaccaagattctgttaggaatagtgactacgatgatgaaggtattgatgccgaatcaaagcagacaaaggataaatttttgaattacttttttggtaaggacaaaaagggccaaccagtgtttgatgcatcaggtaaaaagagaaatattgtgggtgaaggaaatgttgaagattttagaagcttacagatatcagatttttcattaggagatatggacgaccttggaaacgctgaaccgccactaaccgagagagaagagctagagtgtgaattaatcaaacgattaattgtttcatactttgacatcataagagaaatgattgaagatcaagtgccaaaagcagttatgtgcttactcgtaaatttctgtaaggattccgttcaaaataggctagtgactaagctttacaaagaatccctatttgaagagctattagttgaggaccagactttggctcaagatagggaactatgtgtgaaatcgcttggggtttataagaaggctgcaacacttattagtaatattctgtaa

SEQ ID NO: 1680 - DNA, 1983 bp, Saccharomyces pastorianus
atggctaagagaaacagatcccaatttcgtatccaggaaagaactgcaaagaaaagaaagcaggaagattccttgttagaaagtagtgctttccaaaatgtgccagataatatagatgaaaataacataaataacacgaatggcacatcctgggatgaagaagaacaaggatacgaaatgattcccagaaagaatcgctctgatacatccgatcttgtggaagggttacctattaaaattaacggtaaagttgaaagaacactacataaagctcaagaaaagcctaagaaaaacgaagaggtagacgaagttagcgacgattcagtggacagcaaatcagatgatgaagaagaagaggtaaaggaagaagaacctgatacagaagaaaagattataaagttaaaagaagatattgcggatttagttaccagaattatggaagagcctgaagaaaatacaactgcattaggacgtctttgtaaaatggcagaatctaaaaatcctaatacttgtaagttttctatgttagctctggtgcctgtgttcaagagcatcataccaggttatagaattaggccactaagtgaaaccgaaaaaaaagaaaaagtctctaaggaagtttctaagcttagaaattttgagcactcgttggtttacaactataaaaattacattgagacattgaagaacctttccaaaacccccagtaatgctgctcctatcaaagtttcattaggtatcttggctactcaagctgccaaagaattgatctcgaccgcgtcgcatttcaattttaggacagatatctttactttgcttctgcgtagaatttgtaaaccaagaatatcaacagatccaacctccattcaaataatcaagacattcgaaactttattgaatgatgatgaagagggcctaatctcattcgaaatactcagaatttttagcaagatactaaaaacgagaagctttaacgttgaagagtctgtcttgaatatgttattatcattggatgttttacatgactacgatcctaatactaaagctgaagagcagattagagcccctaaactaaagaaaaaagatagagtccatctttccaaaaagcaaaaaaaagccagaaaggagatgcagcaaatcgacgaagaaatgcgtaacgctgaacaagctgtctctgcagaagagagagaaaaaaatcaatcagaaattttgaaaattgtgttcactatatacttgaatatcttgaaaaacagttcccaggtgctcattgggtccgttttagaaggattaacaaaattcggtaatatggccaattttgatctattaggggacttcctcgaagtaatgaaggaattgatcagcgatactgaattcgacaacctttcttctgacgaagtacgtaaggccttactttgtatcgttagtgcgttctcacttatttcaaacactcaacatatgaaggttaatatggatttgtccaaatttgtggatgggctttacacgctattaccttatatttgtcttgatgcagatattgagctttcctataaatccctaaggttggccgatcctctcagtaacgaaacaacgaaaccatcagttaacgtttccactaaagcagagcttttattaaaggcgctagaccatatattcttccgttccaaatcaggaactaaggaaagggctacagcattcaccaaaagactatacatgtgcattggtcatactccagaaaaaacgagtatcgcgattctcaaattcattgataaactaatgaatagatatcctgaaatctcgggtctttactcatctgaggatagaataggcaacggtcattttgtaatggaggctaataatccttcaaggagtaatgcaaatgcagcaacactatgggataacgctcttcttgaaaagcattattgtcctattgttgtaaagggactgcgctctttatcgactagatcaaaagactactctaaatag

SEQ ID NO: 1681 - DNA, 846 bp, Saccharomyces pastorianus
atgtccaacccagatgacttagatgacggccttgtatatgattttgattctcaacaggaagtagaaatcgaagctaatggtaacgatggattacaaaagagacctatacaagatgatgatgatgagaaagaagtgaaggagacctcagaaggtgaatctgaaagaccaatgtccaaaagacagaaaaagctgcagaaaaaatcaaagttcatcgagaaaaagaaggaggaaagtcaatatattgtttcgcaacgaaaatcgattcctacaagttcacctgagaaaattattgagtatttaacagcattgatacgtgaaaagaaccccgacttgagtgctttggaattagaggaactgtactttaaaaaaaaggatttcctctctacagaaaaatttgacaccgaacgtaaattaactgatttctcaacatttatgcaaaagttttctgtggcaccaaaaaagatcgtcttttcaatgtccaatattagagtagctgacgtttatcgtagtttgaatggtggtaagaactgtgttaaattgttttccaaaagcaaactgaaggacgatatagccactgtggaacgtttacttggtgatagctcgaaaaagtccaaaaatagtaacgattctttttatttcattgccacgccaacaagaatgcaaaaaattatagaggaaacagagttactatttcaaggtaaagagaaattggacatcattcttgatgcaagttatctggatcctaaggataatactatattatcatttgagaatgcagtcgttctctgtcaggttttgaagacctttttgaataaaaaaagttccgtgaaaatactactatactag

SEQ ID NO: 1682 - DNA, 1446 bp, Saccharomyces pastorianus
atggctcctgcagtagtttcggaatctgaagaagatgaagacaaggtcgcggtctcaagaagaagcaagagacaagttcatttcgatggttcgggcaatgaacgtttaggccagcaacagcagcaacagcagcaacagcagcaacagcagcaacagcagcaacagcagcaacagcagcagcaacagcagcgttctagtcacagggataaagacaggcatgcacagcgaaaaaagaagaagaggctctcgaataggaatctgcagggtgctagcggagggtacgcctgggaagacgagatcaagagaagttgggatctcgtcaaagtggacgatgaaggagatatggcctctcttgtggccagtatcgtagaggccagaaagaagcgtaccgcaaagaggaatatcacaccgtaccagaggggtatcatcagaagtctgatattgaccttggattgcagtgaggcgatgctggaaaaagatttgagacccagcagacatgcaatgatcattcagtatgctatcgattttgttcacgagtttttcgatcaaaacccaatttctcaagtgggtatcatcataatgaaaaacgggctggcacaactagtcagccaagtgagcggaaatccgcaagaccacattgatgctctgaaagctatcaggaagcaagatccaaagggaaatccctccttgcagaatgcgttggaaatggcaagaggtttgctactgcctgtccccgcccactgcacaagagaagtgctgattgtattcggtagtctttccaccactgatcctggcgatattcatcaaactatcgattcgttggtgagtgagaaaatcagagtgaaagttctggggttatcagctcaagtggccatttgtaaagagctatgtaaggcaacgaactacggtgacgaatctttctataagattttactcgacgagacccatttgaaggagctattcaatgaggctattactccattacctgttaacaagataaataaaggtttcacactggtgaagatggggttcccgacacgaatatttgaagatactccaactttttgctcatgccactccaaactggtttatggtggttatttttgcccaaattgtcatagtaaagtctgttcattgcccacagtgtgtccatgctgtgatttgatgctgatcctctctacccatttagccagatcataccaccatttaatgccattgaaaacgtttacagaagtacccacaacagaatcatttcgatcagaagattgtttcagttgccaatctagattccctatattgaaaaatcacaaaaacggtaatttgttaacaagttctcgttaccgctgcgaagattgtggagaggaattttgtgtcgattgcgatgtgtttattcatgaaatacttcacaattgtcccggttgcgaatctaaacctgtaataacgtaa

SEQ ID NO: 1683 - DNA, 1011 bp, Saccharomyces pastorianus
atggaagtatataaagaacgggtatctacgtccgcaaaaggggatgctacggcgaagtacttattgcagtatatcttatcagcaagaggtatttgccatgaaaattcattgatcctagccctaatgagactggaaactgatgcttcgacgtttgacgcgcaatggtcgatccagcagtggatagacaagctgaatgatcacatcaatgccataaatgtaagactaaacctcctgggctataagatcgttcgaattaaccatgggattggtagaaatgcagtgactatgaaaaacaggaagaattttgggctcttcgaaaataatgcagctgctcgagcccatggtggtagtgcaccggattcgcaagtgacggtactgccagagagtaaccgattttttgtctatgttaacttggcgtccacggaggagaccaagttagccactcggtttaatcaaaatgagatcgagtttattaagtgggccattgagcaattcatggttaatggggagactataatcaagggtccggcattggagacctcagtcgtcgtgaaggagatcaactgtattctcatggcagccacggggaactccaatctgccgaaatgggttaaatcctgtactttcactgtggggtccacggatctcttacagtttcaagagttgacggcaatggagattgaagatttgttgctccgattgtgtgaactgaaatggttttacagaactagggaggggaagctcggcattgatcttcgctgcattgcagaactagaagaatacttgacatctacttataatttaaacacttgtcaaaattgccataaattggtccttcaaggcgttagatgcggccacgaatcgtgccgaaatgaaaataacgaagatggagagaacagcctaccccaaatttggcacgttgattgcttcaagcattatataacacatgtaagtaaaaactgtgatcgttgtggttcattactaatcacagatggtgtatacgttctttaa

SEQ ID NO: 1684 - DNA, 600 bp, Saccharomyces pastorianus
atgagaatttatcaatgtcatttttgctcatctccatgttatccaggtcatgggatcatgtttgtacgtaacgatgctaaagaattcagattctgtcgttcgaaatgtcacaaggcattcaagcaacgtcgtaacccaagaaaattaaaatggactaaagctttcagaaaggctgctggtaaagaattggctgtggattctaccttgactttcgcccaaagaagaaatgttcctgttagatacaacagagaactagttgccacaactttgaaggccatggccagaatcgaagaaatcagacaaaaacgtgaaagagccttctacaagaatagaatgagaggtaacagagaaaaggacttcttgagagataagagattggtcgaatctaaccctgaactattgagaatcagagaagtccaaatcgccaagaatttggccaaggaacaagaaagagccgaattagaaaaccaacaagaagaatctgaagaagaagaagaagacatggaaattgacagtgatgaagaagaagaagaacaattagaaaagcaaaagatcttgctaaaaaacaaaagaagaaattcaaagaaaattgctttttag

SEQ ID NO: 1685 - DNA, 480 bp, Saccharomyces pastorianus
atgagtcagctagtggtagatttgaaacacctgaaaacattagcaaagaggtacgaaatcgctgatggtattgatgatggagacgagaagaagcacaaccgtattcaatcatctaaaagatttagaatggtcgttcagttagtagacttcttgttctgtgagcgtaataaagaacgcactgacggccttttctgtaagatggtggtaaggaacctttgctgttctggtgtaataaatggtggagaagagatgagtctatatatgagcgagcgattgttttcggctcataaagacgatcccatgttaataaatggacagatccttgacattcgaattggattatggtacggaacgtaccaaagcccgccaatctttgaaactatcaacttcaagattttatctcagagtgatgtttgcgagttttgtgaatttatcagatcaccaatcggtgaaacttttctaaacatttctaattcgtag

SEQ ID NO: 1686 - DNA, 615 bp, Saccharomyces pastorianus
atgttccacagacgcaagaggcccttggataggaggtaccatgatcaagatagcaaaaaatttaagcctaaatacgttgatatattgcctgatttcagaccttcagggctgctagaattggagtcgaacaataaagagggcatagccttaaagcacgtggaaccacaggatgctatctctcccgataaatatatggataagctggacttagatccgcgagataggacagtttacgaacttttagtgtataggaagaatgacaaggataaagccgtatggaaaagatatgaattgaacgacaggagttgttttttggttggtcgtgagttgggtcgcagtttggatgcagattcggacgatagaaaggagacggtggtcgcagatataggtataccagaagaaacatcttcgaagcaacattgcgttatccagtttaggagcgtccatgatattttgaaatgctatgtcatggatttggactcctccaacggtacctgtttgaacaacgttgtagtgcctagggccaggtatatagaattacgaagtggtgatgtcctgacactttcagaatttgaagaagatacagactatgaacttgtctttatgaatgtataa

SEQ ID NO: 1687 - DNA, 1014 bp, Saccharomyces pastorianus
atgaaccggattaagaacacaatcgctgtcgctaagaggttgaaactaagcagtattatgaccaactcagaattaccaagcattttcaatggcaccgttgatctggggattatcggtggcacaggtctatataacctggactgtctagagcccatcgcattgctgccacccatggtgacaccctggggtattacatcgtctccagtcacgatttcacagtttgttggtaccaacagccatttccacgttgcctttatcgccagacatggtgtcaaccacgaatatccacccactagagttccattcagggccaacatggcagcgttgaagaacctaaactgtaaagccgtgctttcattcagtgccgtggggtcgttgcaggcccacatcaagcccagggattttgttttgccgcaacaaataattgacagaaccaagggcataagacactcatcgtacctcaacgacgaaggcttggtgggccatgttggattcggacaaccattttctgagaaatttgcagagtatatctaccagttcaaggatgcgataacaaaccccgaatccgaggagccatgccacttgcactacgacaaagacatgaccgtagtctgcatggaaggcccacaattttccacgcgtgctgagtccaagatgtacaggatgtttggtggtcatgttattaacatgagtgttatccctgaagcaaaactagcccgtgagtgtgaactgccttaccagatggtttgcatgtctaccgattatgacgcatggagagatgaggcagagcctgtcaccgtggaaaccgttattggtaacttgactaacaacgggcgtaatgcgaacctcttggcctccaagatcattgtgtccatggccaaggaaataccagagttcatgcacagcggcgatgggctacgcggttccatcaagaaatctatctccaccaaaccggaagccatgtccaaggacacgctagagaaattgagatacttatttcctgattattggtag

SEQ ID NO: 1688 - DNA, 906 bp, Saccharomyces pastorianus
atgagaagacaagcggaccaattggccctggacaacaacggtgtgtcggagttgctacaaggcacagaccgcacgaaaccctcatcgcaaacgcaaagtaccacaccagtgttcaagttgggcaacttcgaaagtcctgtgctcaaagagctgtcccggcgaacggtcaataaggagctggagacgcagaggatcattgcaaacgcgattgcatttgcgctttggaacctgctggtgaagttcatcagattcttccgagacaacactcatgttggtgcgcaattttgcaacaggttgtcccggctccatctatacctgctcacgttccatgcggtgaagcaggccaacaccgtgtactactcgacgttcagttggttgacggcggaacttgtcgactacgtgtgccagctagtgatctctctgaacattctattctccttgtggaagcttttgtccaccgtcaaaatcgccgatttgagcctgaccaaaaggcaaagaaagctcctgggtgtggatacgccgtcctctgatgacggcgagacgccacaacgagcacagcagcagcctcattacgtgcccaccgccaaggctcaaaaattggcacaagacaaaacgcatattcctcaaactagcactaaccatccagcatatctcttcaagggcctagagacgcctctaaaggcgagacaaagggaaacagcggaccaggcaaaactgcaacccaactccttactaacaagcaacgtttttggcagtctacaaagaggccaagctaccagcggcactctattgagaacggttaacaacagtgactcgccgcacacccctgtaataagaaagggctacattccaagtagtaaatacgcatacatgatgaattcacaaactccaagaaaaaaaatataa

SEQ ID NO: 1689 - DNA, 1158 bp, Saccharomyces pastorianus
atgggatttatagcaaatatactgtgctgctcttcagaaacctccaggattcgccgtcaacaccaacaaccagaaacccgccttaatcacagccacactcaccgccagaaacaaagccgaaagcaaaaagttactccagacgttgataagatgcaatattccacaccggagatcctgatacccagttccgatttaggaagtaacgtagatgccaaggctaaccacgataacggaaccagaagactggggctcttatcgagaaacgagacccacgagacccatgactcgtacgacgaggaaaaagaatacgaagattgtaacgagggagacgtggagatgaccgatgtcaacaatgccggtcaagacgaggcaaaagagaaggaagatcatgttgttcacgaatataacgtcgacgcggacagaaactcgagccttgtcgacgaagctccacaacagaaccagtatcaggttgaccaagaaactatagacccgcagtatctggccagcagcaccgatatcaatttgaacttgacgccaaccctagaggaggactttccagatttgatgcacttgcaaccagagcagtaccatgcccctggctacgacactctattgccacccaagctgcagccatttcaacagaagaagtgcctgatcttggaccttgacgaaactttggtacactcttccttcaaatatctgcacaccgccgatttcgttttgcccgtggagatcgatgaccaggtccataacgtctatgttatcaagagaccgggcgtggacgagttcttgcacagagtgagtcaactttacgaggttgtcgtcttcactgctagtgtctcgaggtacgcaaatccccttttagatacactggatcccaacagaaccatccaccaccggctttttagagaggcctgctacaactacgaaggtaactacatcaagaacctatcacagatcggcagaccgttgtcggaaacaattattctagacaactcaccggcttcctatatcttccacccacaacatgctgttccaatctcttcttggttttcagacactcacgataacgagttgctggacatcatcccccttttagaagacctttcagcagaaaatgtgttggacgtgggcagtgtgttagatgtaacgatataa

SEQ ID NO: 1690 - DNA, 543 bp, Saccharomyces pastorianus
atgacatcatacgaatttaagaccagcataccgaaagaaaccaatattctttcaagtgcatcacccgacggcaatgaattatatttgcaagctactcactttaacaatacaatcctattacaagttcgattaaatggagaaatggattccacttatgaggtgtccttaaaagggctaaacccgcttcttgatattgatccagtgccattagcaggaagcttaggaaacactggcgacaattatgacgatgagcaagatgaatttgtaagagatcatttatctgattaccaggtagttaccaaattgggagatagcagcgacccaaaagtacctgtggtatgcatacaaatcgctgaattatacaggagggttgtgataccagaagtgaacggcgcaatggttcaaggcaacatggaattcaacctgttgatatctatgagcagtaagatgtggagggctgcaaaaggacagaatgatgacgataacgattttggcaaattagtgtttttattaaagtgtatcaaagacatgtatgtaaaatga

SEQ ID NO: 1691 - DNA, 753 bp, Saccharomyces pastorianus
atgcctatcaaccaaccatccggacagatcaaattaactaatgtttcattagtgaaattgaaaaaagcccgtaagagattcgaagttgcatgctaccaaaataaagtccaagactatcgtaaaggaattgagaaagatctagatgaagtgcttcaaatacaccaagtttttatgaacgtttccaagggtttggttgccaacaaggaagacctacaaaaatgttttgggactacgaacattgatgatgttatcaaagaaattatgcataagggagagattcaactatcagagaaggaaagacaattaatgctcaataaagtgaacaatgagttgctaacaataatcagtgccaaatgtattaatcctttatcaaagaagagatatccgcccacaatgattcataaagccttacaagaactgaaattcagccctgtaatcaacaagcctgccaaattgcaagctttagaagctattaaattattagtctctaaacagataatcccgatcgtaagagccaagatgaaggtcaaagtggccataggcgagccgtcgaagcaacctgaacttatccagaaaatcaataaattgattactacatcaccacaagagccaacagatccggaatcgaatccatggacgtgtataggtcttattgatcctgtcaattatagagacttaatgaccctgtgtgataaaaagggagctgtacaagtcttggatatggcagtcatagataatacaacgcataactaa

SEQ ID NO: 1692 - DNA, 723 bp, Saccharomyces pastorianus
atgtggtcgtatttttttggtggagcatccggtagtgcgaagaacaaagagttgcctaaaaaggctatagtggaactgagggagcatatcaaccttctttccaaaaagcaatcacatctgcatacccaaatcacaaaccaagagaatgaggctaggatctttttgacgaagggcaataaggtaatggccaagaactcgctgaagaagaagaagatatacgagcaaaacttaagcaagttggaaggaacgatggaatctctggaacagcagctattctccatagagagcgccaacttaaacctggagacgatgagggccatgcaacagggtgctaaggcaatgaaatccattcacaatggtctagatatagataaagttgatgaaacgatggatgagataagggagcaggtagaattaggagacgaaataagcgatgctatatctagaccattaaacactggggcaaacgaggtggatgaagacgaattggatgaagaattagacatgctggctcaagaaaacgccaaccaagaaacgtccaagattgtcaataataacgtcaatgcggcaccggcagcagagaataaggtctcgttgcccaatgttccaagcaataaaattaaacagagtgaagcctccctaaaggaaggccaagaagaggacgaggaagaggacgaggacgaaagggcactaagggagttgcaggcagaaatggggctttga

SEQ ID NO: 1693 - DNA, 1023 bp, Saccharomyces pastorianus
atgaatataaaagatagaacttcagaatatcaacaaagcgtgttgagttacaagaaaagaaacaaaaactttaaacagcagcaaagagagcgtgttcaagagcaagaaaatggaaactctgctgacagcacaaccaagaatgggaaacccgtgtcagagtttcaaaaaaaagcctctggcatagcccatgaaatttcatctaccgcccaattactatctaaattagccgtcctggccaagaggaaaccaatgttcaatgataaccccatcgagattgcagagctgtcgttcttaataaagaggaagatctacgccattgaacagagcctagtacagttgagtcagctcaagaagaacgacgcgaatggcaacgcatcaaatcaatcttctagccaaccaaacgccgtacagcactccaaaaacgtcgtaaaccttctaaacacgcaaatgaaaaatatatcggggaatttcaaagacgtattggaggaaagacaacgattggaaatggcaaacaaagacagatggcaaaagctctccaccgacacggaacacgcccaaacagaagatcatacacagagcaacaatgtagtggatatgaccacctacaacaactccaacccgttcatgacttcgttactcgatgagtccgcagagaagaataaaaactcatccaaccaaggtgaactatctttccctcaaaacgattctcagttaatgctaatggaggagggccaactatccaacaacgtctacttacaagagagaaacagagctgtggagacaatagaatctaccatccaagaagtggggaaccttttccagcaactggcctccatggtccaagaacagggtgaggtcatccagagaatcgatgctaacgtagacgacattgacttgaacatcagcggtgctcaaagagaactgatgaagtacttcgacaagataaaaagtaatagatggttagccgcgaaggttttctttgtcatctttgtattcttcctgttttgggtcctagtcaattag

SEQ ID NO: 1694 - DNA, 1776 bp, Saccharomyces pastorianus
atgggtaagtataccaagaccgcgattctgtcagtttatgataagacaggtttattagacttagctaagggattagtggagaacaatgttcatatcctagcatctggggggacagccaacatggtcagggaggccggtttccctgtggacgatgtttcttcaatcacacatgcgcctgaaatgctagggggcagggtgaaaactttgcatcctgcagtacatgcggggatccttgccagaaatctagagagtgatgagaaagacttgaaggatcaacacatcgacaaggtggattttgtcgtctgcaatttgtatcccttcaaagaaactgtggctaagatcggtgttacggtacaagaagccgtggaagaaattgacattggtggagtaactttattgagagctgctgcgaagaatcattccagagtcactattttgtcagatccgaacgattactctagcttcctacaagatttgaccaaaaatggtgaaatatctcaagatctaagaaataggttcgctttaaaggcattcgaacacacagccgactatgatgcagcaatttctgattttttcaggaaacagtactttgagggaaaagctcaattaccactaagatacggttgtaatcctcatcaaagacctgcacaagcttacatcacccaacaggaagagttgcctttcaaagttctttgcggtacgccagggtatataaaccttttggatgccttgaactcgtggcccttggtgaaagagttatcggcgtcattaaacctaccagccgcagcatcgttcaagcatgtctctcctgctggtgctgcagtgggtattccattgtctgatgttgaaaggcaagtttattttgtaaacgatgtggacgatctatcaccattggcatgcgcatacgctagagctcgcggtgcggacaggatgtcatcatttggcgatttcattgccctatctaacatcgtggacgtcgcgacggcaaagatcatctccaaggaggtttccgatggtgtgattgcccccggatatgaaccggaagcattgaagatattatctaagaagaagaacgggaaatactgtatcctacaaatcgacccgaactttgttcctgggcaattggaatccagagacgtttatggtgtaacactacaacaaaagaggaacgatgcgattataaaccagtccactttcaaggagatcgtgtccaaaaataagggactaactgagcaggccgtaatcgatttaaccgttgccacgttagttttgaagtacacgcagtcgaattccgtttgctatgccaagaacggtatggttgttggactgggagctggccaacaatcgcgcatacactgtactagattggccggggacaagacggacaactggtggctaagacaacacccaaaggtgctgaacatgaagtgggccaagggaatcaagagggcagacaagtccaacgcgatcgatctctttgttacagggcaaaggatagagggtccagagaagacggactatgaaagcaaattcgaagagatccctgaacctttcaccaaggaggagagactggaatggctgggcaaactaaccaacgtgtcgctatcgtccgacgcgtttttccccttcccagataacgtttatagagccgtgcagtccggcgtgaagttcattgctgccccatcggggtccgtcatggacaaagttgtgtttcaagcggcggattcattcgatgttgtctacgtggagaacccgatccgtctgttccaccattag

SEQ ID NO: 1695 - DNA, 615 bp, Saccharomyces pastorianus
atgggtgcctacaaatatttggaagaattgcaaagaaagaagcaatctgatgttttgagattcttgcaaagagtcagagtctgggaatacagacaaaagaacgtcattcacagagccgctagaccaactagaccagacaaggctagaagattaggttacaaggccaagcaaggtttcgttatctaccgtgtcagagttagacgtggtaacagaaagagacctgttccaaagggtgccacttacggtaagccaacaaaccaaggtgtcaatgaattgaaataccaaagatccttgagagctaccgctgaagaaagagttggtcgtcgtgccgctaacttgagagttttgaactcttactgggttaaccaagattctacttacaagtacttcgaagttatcttggtcgaccctcaacacaaggctatcagaagagatgctcgttacaactggatctgtaacccagttcacaagcaccgtgaagctagaggtttgactgccactggtaagaaatccagaggtatcaacaagggtcacagattcaacaacaccaaggctggtagaagaaagacctggaagaagcacaacactttgtctctatggagatacagaaaataa

SEQ ID NO: 1696 - DNA, 3516 bp, Saccharomyces pastorianus
atgagccagatcgagcaggaggaaagtaaaaggtttttcaatgatgagcttgatacttcggaggtgtcattgaattttaaatctgagaataaagagtcatttctatttgcaaatagcgataatgataaggaatccgtatcagtcagtgaaactccagaagacgaaggtgaaaaaacctttccatcggcagtgaaggaagttgttaaagatgaccaagatcagtttattggggagcttcagagaattatcccagagatgccaatgagtcttgcagtggaactgaatgaaaagttcagtagccagtctgaagggctctctttggcattgtctcactactttgatcattataatggaaaacttggcggtaatttgccgtcttccccaacccaggtaaacacaagccctgatacttctatttcagccttatccccctctccatctcatgttagaaaaagaaaaaattacggtttcagaaatcaaacgcgattagaagatgatattaattggaaaaggtttataggtgctctgcaagtcactggtatggctacaaggcccaccgttagacccctgaaatacggttctcagttaaagctaaaaagatcaagtgaagagatttctgccaccaaagtttatgattcacgaggcaggaagaaaacctccatggccagtctagtcagaatatatgatatccagtataatagagaaattggccgagtccccgaagacatcgctcaaatactatacccccttttaagctcttcagaaataagttttgaagctacgttagtcttttgcgataacaagcgtttgagcataggtgacagctttatcttacaattggattgctttttgacctccacaatttttgaggaatcatcgaacgatgatctatctttcatgaaaaaaagacgtacagaaagagacaataaaagagaaaaagacaatactagatttggtagatcattgaccgaaaccgatgaggagctggagaatcgttcgaagagactggctctactaaagttatttgataggttgaaactaaaacctattttggatgaacagaaggcattagaaaagcataaaatagaacttaatagtgacccagaagttattgatatagatgatgacgagataaacgctgaccaagtgactgaggtccatgaggacccccggaatacccaacatgaagaagaaacaatgaacctaaatcaactgaaaactttctataaagctgcacaatcttcagattctttgaaaagtttacctgaaacagagccttcccgtgatgttttcaaactggaattacgaaactatcaaaagcaaggtcttacctggatgttgagaagagaacaagaatttcctaaagccgcatctgatgaggagactttggaaacagatgctaatatgataaaccctttatggaagcaatttaaatggccgacagatatgtcgtgggcatctcaaaaggccagacaagatcatgttaatttggaagacgatatattcttttatgcgaacttgcattctggtgagttttcattagcaaaacctatattgaaaacgatgataaagggtggtatcctatcggatgaaatgggtttgggtaaaactgttgcagcatattcactaattttatcttgtccttacgataccagtgctgtcgacaagaaacctttcgatgttaagactacagaaggtgctgatgatattcctagttcctttacatcatcttcacaagataacaaaaagccttatgcatctaaaacaactttaattgtagttccaatgtcgttattgactcaatggggtaacgagttcacaaaagctaacaattcgtctgatatgtatcatgaagtgtattatggtgggaatgtttctagcttgaaaacattactgacgaagactaggaatccgccaactgtagtccttactacatatggtattgttcaaaacgaatggaccaagcattctaagggaatgatgacagatgaggacgtgactataacatctgggttgttttctgttgacttttatcgtataattattgatgaaggccataatataaggaacagaacgactgccacatccaaagccattatggatttacaagggaaatgtaaatgggttttaacgggtacaccgatcattaacaggcttgatgatttgtacagtcttgtgaagtttttaaaattagacccctggcgccaaatcaactattggaagacttttgtatcaacgccctttgaaaataaaaactataaacaagcatttgatgtggtgaatgcaatcttggaacctgtcttattaagaagaacaaaacagatgaaggacacagatggtaacttattagtagagttgccgccaaaggaagtcgtcattaaaaaattaccgttcagtaaatctcaagatgtattatacaagtttctactggataaagctgaaacgtccgtgaaatcgggaattgcacgaggtgatttgttaaagaaatactctacgattcttgttcacatcttgagattaagacaggtctgttgtcatccagaacttattggaacccaagatgagaacgacgaggatttgtccaagaataataaattagttacggaacaaactggggagctcgatactttggttcgtgtaacctccgaaagattcggtagctctttcaccaaggaagatttagaaacagtgatggaaaagttgagattcaagtatccagataatgaatcacttcaactgttggaatgttctatttgcacagcggaacctattaacttggataacgtggtattcactgaatgtggtcacagtttttgcgaaaaatgtttatttgaatatgtcgagtttcagaacggtaaggagcttcctttaaagtgcccaaactgtcgtgaagcaatagatgggagtcgtttactggccttgaggcgacaaaatgtcagtccaggaaacgtggaatttaaagcatatacctctgcatcgaagtcaagtaagatcactgccctaatgaaggagcttcaattgctacaagatagttccgcaggtgaacaagttgttatattttcccaattctctacctacttggacatcctggagatggaacttactcacgctttccccaatgacgtcgccaagatctacaaatttgatggccgtctttctttaaaagaaaggactagtgtactagctgatttcgctgttaaggactatagcagacagaaaatattgctactgtcactgaaagccggtggtgtgggtttgaatttgacttgtgcatctcatgcctacatgatggacccatggtggtcacccagcatggaagaccaagctatagatcggctccatagaattggacagacgagcagcgtgaaggtcgttagattcattgttcaaaatagtatagaggagaaaatgctgcgcattcaagaaaagaagagaaccattggtgaggccatggatgccgacgaggacgaaagaaggaaaagaaggattgaggaaattcaaatgctgttcgagtga

SEQ ID NO: 1697 - DNA, 1503 bp, Saccharomyces pastorianus
atgacggaaagcgtggatgacaggactttcaaagatcttttggtgaatgtgcaatccattctgattgctgcttccgtaaaatgtcgcgtagtagatgagagtttcccagccaagttctttgagaaaaatccggataaaatatatgaatcgtattgtaagttcattaggaatagaagcaactcggaaggctccatacgtaatgaggataagctggctttaaccaccatcaataagaggtttgaagatggagagtatgagcctgtgcaaggtgggttttacaagctgtatcacgatatcaaattggtctgtacaatgctcatccacttttacccgcagggcacaaggaactaccagttagttgacaagttctacaaattctcctctgaacttttattacgggaatgttttagaataggaattgccttaacacaaacaaataaatcgaagtcaagaagtgggaagattttaggtgggaacgaggcggatgactacgatgatgatgatgctacagaactagacaagactatctccaatgactttatcaagatctctatgaactattctctaccaatttctcaaacatttcatataaaaaccaaagatttggatcttttctcgtcgatcatttctaaatctaaccttgataaaagaccccatgaattgcccaacacaaactttaaaataaacaatgtcataccccaaactgacatagaaaatgaagcccctagattagggtttgtgggcgctaatactagtaatattccggatccgactctaccaccgactgagatgatgactaggtttttgcatcctaactggtatgcactacctacgactgtttggttgaaatatgggaactacaattcttgggccccttcctttaatgaaaacggtacagttgtggactcaacaacaagagggcttatttggcttgaaagaataggttacatggacttgtatgaaacaagcgaaaaaaagacgacgcaagaggagaaactggatgcgaatgaagatgacaaaaatattgaacagaaacatgaccatgaggttgttgatggcaagattgatggtaccgaaagtgttgatgacaatgatgataatgtaagtaccacctctaagaatactgagggcactgaagataacgaacagactataattaagcttcaaaatctgtataattggacaccatcgaatcatattggggatgatgaagtcgaaagcttccaaaatggtacgccagataagttagtttcagagtcccttttaaaactaaaacaattaagaaaagagcggattttaaatagagtttccaagcccaccaccgaggagagagaagtatattttaaagtgaagagaatactaaaggaaattattttggccaaaaaagtttccaagttaccaataaacagtgtaagggcattcccagtcttacaaacaaactacaatggcagtatacccgtagtaagggcccaaccaggtcgtaaaaggaaacacaagaaatga

SEQ ID NO: 1698 - DNA, 1422 bp, Saccharomyces pastorianus
atgcggtcctatacggaaattcttcagaaattcgttaggttcattgggccagggatcctggtcagtgtggcctatatggacccagggaattatgctactagtgtttctggtggtgctcagtacaaatataccttattgttttccattttcatatcgaatatctttgctgtgcttttacaatgtctttgtgtcaagctgggtactgtgacgggttatgatttggctgaaaactgtcgtcataatctacctaagaaactgaactatactctttacttttttgctgaagtggccatcatcgccactgatttggctgaagttgtgggtactgccattgccttgcaaattcttttcaagataccactgacttggggtgtcttattaacggtgttggatgtcctagtaatcttaatgttctacacaccaaacggtcagtctttgaaaaaagtcagagtatttgaatttggtgttggtatcctggtcatcggtacttgtatttgtttcgtcctagaattgttcaagatttctattcccgataaagctgaactgtttaaggggtttttgccttcgactattatcttcaaagagcaacaagctctttatatctccttaggtatcttaggtgccaccgtcatgcctcattctttgtatttgggctcgtccattgttaagccaagattgcatgattatgatatgaagaaatatgggaaggttaatgatcgtccaagcttaagcgctataaaatactcgttaaactacgcttacgccgagttaatcatctctctgtttttgatcgctactttcgttaattccgctattttaatcgttgcaggtgccactttatctggtcaacctgaagcagaggatgctgatttattatctatttacaaattgctggtccattacatatcacccgcagcaggtttgatctttgcgttagccatgctatgctcaggacagtctgcaggtatcatttgtacacttgctgggcaaatcgtttcagaagggtttctgcaatggtctttaccaccttgggccacaagattgtgcacaagattaatcgccattgtaccatgtgtatttgttactttaaccatgggtgaaaaaggaatttcagatattttgaatctctctcaagtggtattatcgttgattttaccaatcgtttcagcgcctttgatttactttaccgcaaataggaaactaatggtcgttcatgatgaaaatggagtggtgagggctcccaacgatgctaacacaatcacagacgaaactactccattgaattccaagcacagtaaaatcgtcgattttacaaacagtcgcttattaacctatacctccattttcgtgtgggctttaataggtagtttgaactgttatctggtgatttcgttctgtttaggtgctgacatccacttttag

SEQ ID NO: 1699 - DNA, 252 bp, Saccharomyces pastorianus
atggctgatcaagaaaacaccccattacacacagttggtttcgatgccagattccctcaacaaaaccaaaccaaacattgctggcagtcatatgtggattaccacaaatgtatcaatatgaagggtgaagatttcgctccatgtaaggtgttctggaagacctacaatgctttatgtcccctagactggattgaaaagtgggatgatcaaagagaaaagggtatatttgcaggtgatatcaatgtgaattaa

SEQ ID NO: 1700 - DNA, 705 bp, Saccharomyces pastorianus
atgagatttactgctgctttatattcctttaaaaacctcttctcattaggcttgctggtcagccattgctctggtgcacaggcaataacgtccagtgcagatgagaatacactggccaggtccgccgctgcagatgctgatatgccgttcttcctggtatttttggaggatttcgaaaccgcatttccacagtatacttcatacatgatgcagaaccatctgacccttcctcaagctgttgctgactattactaccatattgctgacttagcctcaacggctaatctggaatctgatattgctcagagtttcccgttcacgcaattcaaaacatttattacggccttcccatggtatacctctttgctagaaaaggcttcggctacgactatatatccaccgcaacacttcctaacagatgacacgcagcctagcgaaactagctccgcctattccagtcggacagcctctacttccacagaaaactctattgcttcatccacagcaagcacgagtcagcccatattttcaaattccaagtcacatgataactcgacgttttctagtactaacgaagatacggcctcaacatccacagaaaagtcttcatcaatctcgtcaaccacacaatcacaaaacggtgcccgcacaaatagcttgtatttccccatggcgttatttggaatccttgccgcagcgctttaa

SEQ ID NO: 1701 - DNA, 480 bp, Saccharomyces pastorianus
atgaagatcagccaattaagtgctctagcttttattccaattgccctattacaattactagtcgttcaagcgcaacttctcacggatacaaatgctcagaatttaaatacggccttgggccaaaaggtgcaatacacctttcttgacgctgggagttccaacgatcaattgcttcatcttccaagcacgacgccttcgtccagtgttataactaatagtttggcaatggctaatttcaccggatcttcctccttcccagtagtgacttccagcgtcatctcatctatagactaccaatccgcaaactctactataaccactcagcttacaacgtccccatcttcgtcagcaaactacacaacgagctcccacacaaccaaaactataggctcaagtacaagtacgggtgccgcaggttcaatcaagccatgtttttactttgttgtactgttagaaacaatcgcttatttgttttcctaa

SEQ ID NO: 1702 - DNA, 312 bp, Saccharomyces pastorianus
atggttacccaattcaaaactgccagtgaattcgactctgcaattgctcaagacaaactagtcgtcgttgatttctacgccacttggtgcggtccatgtaagatgattgctccaatgatcgaaaaattttctgaacaatacccacaggccgccttttacaaattggacgttgacgaattaggtgaagttgcccaaaagaacgaagtctctgctatgccaactttggttcttttcaagaacggtaaggaagtcgctaaggttgttggtgctaacccagctgccatcaagcaagccatcgctgctaacgcctaa

SEQ ID NO: 1703 - DNA, 1692 bp, Saccharomyces pastorianus
atgtctgaaattactttgggtaaatatttgttcgaaagattgaaccaagttaacgttaacaccgtcttcggtttaccaggtgacttcaacttgtccttgttggacaagatctacgaagtcgaaggtatgagatgggctggtaacgccaacgaattgaacgctgcttacgctgctgacggttacgctcgtatcaagggtatgtcctgtatcatcaccaccttcggtgtcggtgaattgtctgccttgaacggtattgccggttcttacgctgaacacgttggtgttttgcacgttgttggtgtcccatccatctctgcccaagctaagcaattgttgttgcatcacaccttgggtaacggtgacttcactgtcttccacagaatgtctgccaacatttctgaaaccactgccatgatcactgatatcgctactgctccagctgaaattgacagatgtatcagaactacctacgtcacccaaagaccagtctacttgggtctaccagctaacttggtcgacttgaacgtcccagctaagttgttggaaactccaattgacatgtctttgaagccaaacgacgctgaatccgaaaaggaagtcattgacaccatcttggctttggtcaaggacgctaagaacccaattatcttagctgatgcttgttgttccagacacgatgtcaaggccgaaaccaagaaattgatcgacttgactcaattcccatctttcgtcaccccaatgggtaagggttccattgacgaaaagcacccaagatacggtggtgtttacgtcggtaccttgtctaagccagaagtcaagaaggctgttgaatccgctgacttgattttgtctgtcggtgctttgttgtctgatttcaacaccggttctttctcttactcttacaagaccaagaacattgttgaattccactccgaccacatgaagatcagaaacgctaccttcccaggtgtccaaatgaaattcgttttgcaaaagttgttgaccactgttgctgacgccgccaagggttacaagcctgtcgctgtcccagctccaactccagctaacgctgctgtcccagcttctactccattgaaacaagaatggatgtggaaccaattgggtgaattcttgcaagaaggtgatgttgtcatcgctgaaaccggtacctccgctttcggtatcaaccaagttgctttcccaaacaacacttacggtatttcccaagtcttatggggttccattggtttcaccactggtgctaccttaggtgctgctttcgctgctgaagaaatcgacccaaagaagagagttatcttattcattggtgacggttctttgcaattgactgtccaagaaatctccaccatgatcagatggggcttgaagccatacttgttcgtcttgaacaacgatggttacaccattgaaaagttgattcacggtccaaaggctcaatacaacgaaattcaaaactgggaccacttatccttgttgccaactttcggtgctaaggactacgaaacccacagagttgctaccaccggtgaatgggacaagttgactcaagacaagtctttcaacgaaaactccaagatcagaatgatcgaaatcatgttgcctgtcttcgatgctccacaaaacttggttgaacaagccaagttgactgctgctaccaacgctaagcaataa

SEQ ID NO: 1704 - DNA, 486 bp, Saccharomyces pastorianus
atgaaatttggacgtcgtgagcaacagttttacctgtggtacttcatcgtgcacattccgataacggttttcatcgattcatcggtggtcatccccccaaaatggcaattggggtttgcgcaaaaggtcgtcaacaatcacattgcaaagcaacacgattttttgctgtcagagaagccaaactggctatactggtttgttcttcttgaactggttttgcaactgccccttttcggctatttcgttgacaaactctggaacttgaacaaattacaagtcaatacggacaacaagctactaacctggctgcggatctatggttggaacgcctcgctaactacgctagtgtgtatcatcgtcatcttccagcgtggttacatcccttacgatgtgctaagaacagctctgaccacgacccagaagtgccaactggcctccgtatacttacccacgtttctcattccgctgcgcctgtgtcttttatag

SEQ ID NO: 1705 - DNA, 651 bp, Saccharomyces pastorianus
atggatcagagtgtggaagagctatttggagcattgcgagatgctagtgtgagcctgaaagcaagaagctcatcgaaagaggaaggttcattcgaacaagacgatgttttgcagatagacaagaacgacgatggagtagataccgaaagcaagttccaagagatcgaagccaatttaaagaaactccccaagttggaaaacggattcgatgccctagccaagaaaaagacgaagaagggcaagttgcccagtatcgagatagaggaaggaaacactaagaagagtaagaaggatgacagcgactggttcgccttacccaagccggatgacaacatgcgccgtgaagtccagcgagatttgctactgattaagcatagagccgccctggacccaaagagacactacaagaagcagcgttgggaggtcccagaaaggtttgccattggtactatagtcgaagacaagaccgagttttatagtagtcgtatgaacaagaaggaaagaaagtccaccatcctagaaacgctcatgggtgacgatacctccaacaagtacttcaagcgtaagtataccgaaattcaggagaaggccactagtggcagaaaggcacatttcaagaaaatgaaggaaatgaggaagaaacgcaaatga

SEQ ID NO: 1706 - DNA, 759 bp, Saccharomyces pastorianus
atgcagttcgaagagcttctcgacacagacaaacaagtacaatacgctcatgcagccaccctacactacaagaacaccaaaaccccagatttcttggaaaaggacacacatcacaagaagtttcacactgtagaaagcttgaaccaacaaagttcatcgaccccgcctacagccactgatgcgacttccgcctctaccttttctggtcacaccaatagctcgactttcaaaagacacattgtagccgtggacgatatatcgaaaatgaactatgaaatgataaaaaattccccagggaacgtaataaccaacgccaatcaggatgagattgacataagtaccctcaagacgaggttatacaaggataacctctacactatgaatgaccagtttctacaagctgtcaatgaccaaattgtaacactaaatgcagcagagcaagagcaagagcaagagactgaggaagttgatttgccagatgatgaaaaaatcgatatactgtccaagatccaagaaaacctactcgacgagtatcaaactctttcacaaaaggaacgaaaatggtttgttttgaaagaattgctattggatgccaatgtagaactggatttgttcagtaatcgcggaaggaaggcaaaccacccaatcgcattcggagcagtggccatcccaaccaatgttaatgctaattccctggcgttcaatagaacaaagagaagaaaaatcaataaaaatggtttattggagaacattctttga

SEQ ID NO: 1707 - DNA, 1785 bp, Saccharomyces pastorianus
atggacgaggttgacgacattctgaacaataaccaggtggtggacgaagaggaggacgacgaagagatgctgagtgggctggaaaatgactctaagcaggacctcgaggggaacgatgacggtgatgatgatgatgacgacgacgacgacgagcaggaagaagaagatgagcaaggcgatgacaacgatgatgataccgcaaaggaaggcaagaccgatacgtctatggacgaccagcgtgttggccgagagtcttctgctgctgcatcggcatcggcatctgctgttgctgctgctacggacggctctgaagagggtgaaattgatgatggtgatggtaacggtgatgatgatgatgaagttgaaaataaagatgaggaagtgaaacctgaggagtcttctctaaatggagaggtgtacgagtactacaagcacatgttgcaggctgcacagatctctgactcgtacaatatctaccccacggcagctatccccattcagacgcacgtcaacgcgctagcggtgtctagagggctcaggtacctgttcctgggcggcaacgacggctacatcaggaagtacgacctgctgaacacgctcgaggggaagctgtccctgacgattttgcagaagcattcgctggctgagtctatccagaatgcaggtatattgcaatcgtactgggtgaatgagatcccgcaaaaaaaatcggaaatgaagctctctgccaacaaggccgagtacgagcccaaagtgagtcccgttcactcccttgaagtgcaaagcgagtgtctctttattctaagcgggctgcagaatggtggtatcaccatgcagggcgttcgatatatggaggggagcattgcccactatttcaagggcaggaacggccacaaccagatcgtcaatatcctgaaactgaacggccaagaggacagatttctcagcggttcctgggataaacgtctcttggaatgggacttgcaaacaggtgatatcgttaacgaatttcagaaatcaaggtcagagttgtcgtctttggaaatgcgcccactgttttcttccgttgatgtttccagtaacgtcaacaacggcaaagagaacgaaaacgccgatgacgatatggattcgctgttcggtgatgaagacgaagatgaaaagcaagataccgacaacgaccccaccaaaacggacaacgcgtctcatgacgaacaaagcaaggaacagatatgcagagagtctttaaatacagtctatgacgaatcggtgttcatgacttccggattgaacggctcaatacatatttgggatcgacgcacgacccagtcgcccgcattgaacctggaaagaggcccaaacattccaccatggtgtctgtcagcgtgttggggagtagatggtgatcatgtgtatgcagggagaagaaacgcttgcgtggaacagtttgacctgaaaatgccctcgaaaccaatgcacaacttgaaattgccgtccatttcgggtcccgtctcctgtgtgaaagccatgcccaataacaaacacatactatgcgcatccagagataacattagactgtacaacgtggatgtcgcagtggcagcttcaaatccctctaccaagagttctaaagtaccgttcctcatcgttcctggtcatcacggtggcattatatcaaacttatacctcgatccaacttcaagatttttaataagtactagtgggaatagaggctggcaaggtaattctactgatacgacgcttatatacgatatagacttagaatag

SEQ ID NO: 1708 - DNA, 1098 bp, Saccharomyces pastorianus
atggatttggtcttggaagtcgctgaccattatgtcttggacgacctgtacgctaagatcctacccacgtcgctggctgccagcatccctgccaaatggcagaactggctgactttgaacagcgggtttaccaactctaccatcttgcaacagacgctgaactctaagaatgccgtcaaggagtgcagaaaattctacgggcaggtgcccttcctgttcgacatgtccagcactacatttgcgtcgcttttaccccgttccaacctgataagagaatttttttcactatgggccatcgtcaccatcttcggtcttctactgtacttgttcaccgctagtgtcagttatgtctttgtcttcgacaagtccatcttcaaccatcctcgttacttgaaaaatcaaatggccatggaaatcaagttggccgtcagcgccattccatggatgtcgatgttaactgccccatggtttgtcatggaaatgaacggccactccaagctttacatggacatcgactacgaaaaccacggtgtgagaaaggtcgtcatcgaatacttcaccttcatctttttcaccgattgcggtgtctacttggcccacagatggttgcactggccaagagtctaccgtgctctacacaagcctcatcacaagtggttggtctgcacaccttttgcctcccattctttccaccctgtggacgggttcttacaatccatctcttaccacatctacccattgatcctgccattacacaaggtttcctatttgattctgtttactttcgtcaacttctggactgtcatgatccatgacggccaatacttgtcaaacaaccctgctgtgaacggtacagcgtgccacacagtccaccatctatatttcaactacaactatggtcaatttaccactctctgggatagactgggtggttcataccgtagaccagatgactcattgtttgaccctactttgagagactccaaggagacctgggatgctcaagttaaggaagtcgaacagttcatccaggaggttgaaggtgacgataatgatagagtttatgaaaacgatccaaacatcaagaaaaataactga

SEQ ID NO: 1709 - DNA, 2547 bp, Saccharomyces pastorianus
atgtccctagcacggctagtgtactctcttttcagaaaagtacgatcggtccttctgctattcattaccatatcactattattctattatacgttccaaaatgaaatcgatatcctaaattcgtatgctttaaacgattcgctgccatctataaacaacaacgagcacgatacggagacatccacgaacttggagtctgcaaccctatactcatccatttctgaccgaatttccgctgataagggcaacagcaatattattctggatttgtctgatcctgctacgttaagagagaaaaacaagtactttccgctgctaataaggaaatcttccaacaaaattggttcgaactcaccaatctcatctctactgacattcaaggaaaaatatgccgtcttgtttgaatattcattgccttctcaaacttccgcaacccaggatgaggcccacaaagtccaacacaatatgcaattaactccagattttgccatggttcaacaggtcaaagaaattttcatgaaatcgtgggaacaagagcaattactactgaaaagtaaattaaaaagagaatccacatggcccatagatctaattgattctctagatacattgtatttatgcggcgaaactaagctttttcaagattcagttaacctaatagaagatttcgactttcggatacctccactggcagtagaagttattgatattccagacgtcactaaccgcgtacttgaagggttgctatccgcatatgaattatccatggataagagactgcttactaaagcaaagcaagtggcagatttcatattacggtccttcgatactcccaatagggtccctattttaagatttttttggaaatctgacttgagaaataggtttcccgatcgtgagactccctcgggtcaattaactacaatgtcgctcgcattcattagactgtcacagctcgctcatttgaataagtattttgacgctgtagaaagagttttcaccacaatacgacaatcctataatgaatttgatatggatttcatgttacctgacgttgtagatgcatctggctgccagctgctgacttcaagggaaattgaaaagggcgtacacataaaggggtccggtatcatgaaaagcatcaatgaagatttcaaattcgttcaatgtcaacagctaggtatatttttgagctctccttcgcttgacgactctcaagaacaacctcgatatcagtcttatggaattaatgaaaagacaataccgattttggagaatttgctcaagattgatgatcttttccaatcctcttacgatattttgggcggatcaagtaagaacgccaaccctgcgacggaggatgctaacgccaatgatgatatagtagaagacggtgaatatattgagaaaaggaatttgaaaagcggtcagaaaaaggaatcagcagaaaatgctttgaatggtaaatcggtaatagactcgcaaatgtttctaacgtactcaataagtcatatttttaaattcatgactttccaacccatgttccccaagcaaaagggaaatccaacagttaaatttttaagttccgtactgacaaaatctcaatttacgcccgcaaccaatgagttggatgtcacggtaaaaagatcatacaacgtttcattaaactcttgcaggcttggcggcatcctgggtttaagttcacgtatttcccctcaaggcggtgtcaacagcaaatatatcttaccatcgtcactattggaaatgagtgaaacaattacacagagttgttttgcattaatgaaagagtttgacgggctggtccctcaaaaacttcaattggacccttgctctgacgacaaaaatgagggttgcgaatttaatagtgaagtcaaatctcaaatgattatcggtggtgaatatgagatccttgaaaatgaccaggatactggaatcaaagtttggaaccacggtacaaatggagataaccatagagtaaagagaaatataatagcaggggacgaactagtagaaaacgaaagcattaaataccacacccttggaaaaacaaagtctgccactgcagcgaatgatgacgaaataacgcaaatgcgtagagtttacacatttggcaaagacatcaaaccgcatataacgaaggatgatattgttggttacaaatggacaaaccatccggactggccattgtgggtcaacaaagtggaatcgagaagactattggattcgaatattatcgaatctatattttatatgtatagaatcagcggagaagaaaaatggagaagcatgggcagacaatcgtttgaaatcctgctgagagagctaatgaaattaaacagtggtgccaagggaatgtggcaggtaaaggaattttatgaaaacggtgaaaagacaaacaatgacttacctagctattggttttccagaacattaaagtattacttgttactatttagtggtggggatacaatttcattggatgagtacatcttaactcaaggtggccatataattaaaaagaaatga

SEQ ID NO: 1710 - DNA, 1410 bp, Saccharomyces pastorianus
atgccttacactctatccgacgctcatcacaaattgatcacctctcacttgatcgacactgatccagaagtcgactccatcatcaaggatgaagtcgatagacaaaagcactccatcgatttgattgcttccgaaaacttcacctccacttctgtttttgacgctcttggaactcctttgtccaacaagtactctgaaggttatccaggtgctcgttactacggtggtaacgaacacattgacagaatggaaattctgtgtcaacaaagagctttgaaggctttccacgtcactgctgacaaatggggtgttaacgttcaaactttgtctggttccccagccaatttgcaagtttaccaagccatcatgaagcctcatgaaagattaatgggtttgtacttgccagacggtggacatttgtctcacggttacgctactgaaaacagaaagatctctgctgtttccacatacttcgaatctttcccatacagagttaacccagaaaccggtattatcgactacgacactttggaaaagaacgccatcctatatagaccaaaggttcttgttgccggtacctctgcttactgtcgtttgatcgactacaagagaatgagagagattgccgacaagtgtggtgcttacttgatggtcgacatggctcacatttctggtttgatcgctgcaggtgtcattccatctcctttcgaatacgctgatatcgttaccaccaccacccacaagtctttgagaggtcctcgtggtgctatgatcttcttcagaagaggtgtgagatctattaacccaaagaccggtaaggaagtcgtctacgatttagaaaacccaattaacttttctgttttcccaggtcaccaaggtggtccacacaatcataccattgctgctttggccactgccttgaagcaagctgctactccagaattcgtagaataccaaactcaagtcttgaagaatgctaaggccttagaaagtgaattcaagaacctagactacagactggtttctaacggtacagactcccatatggttctagtatccttgagagaaaagggtgttgacggtgcccgtgttgaatatatctgtgaaaagatcaacatcgccttaaacaagaactccattccaggtgacaaatccgctttggtcccaggtggtgtccgtattggtgctccagctatgaccaccagagggatgggtgaagaagacttccacagaatcgttcaatacattaacaaggctgtcgaattcgcccgcgaagttcaacaaagcttgccaaaggatgcttgtagattgaaggacttcaaggctaaggtcgatgaaggttctgatgttttgaacacttggaaaaaggaagtttacgactgggctggcgaatacccattagctgtttaa

SEQ ID NO: 1711 - DNA, 810 bp, Saccharomyces pastorianus
atgaagtggttattacttccggtcacacgcatagcaaatatccgccctagatttgtatctccgtgtataagatccgtttcacagtacttacgacgtcgaaccctccaaaattcgcccgcaatggcacaaacacccgaacttaagaccaagctgttcaagcccctggtctggatcgattgcgaaatgaccggcctggaccacgtgaacgaccggatcatcgaaatctgctgcattatcaccgatggtcatttaacgcccgtgcaggcgccagatggccaagcggagtcgcactacgagagtgttgtccactatggtcctgaggtgatgggcaaaatgaaccagtggtgtgtcgagcaccacggcgatagcggtctcacagccaaagtcttggcgagcgagaagaccctggcccaggtagaagaagagctgctcgcctacatccagcgctacattccagacaagaacatcggtgttttggccggcaacagtgtgcacatggaccgtctgttcatggtccgcgagttccccaaggtcatcgaccatcttttctaccgaattgtcgacgttagtagcatcatggaagtcgcccgcagacacaacccggccttgcaagcacgcaaccccaagaaagaagctgcccatacagcttacagcgacatcaaagagagtatagctcagttacagtggtatatggataactatctgaagccaccacaggagacagagtcccacgagtcaactgcgtcgcagcaaccagagtcagcgtcttcgtcaacctcttctctaaagaggccacgcaccgatttttga

SEQ ID NO: 1712 - DNA, 1788 bp, Saccharomyces pastorianus
atgcctaccgtctctgtgaacaagcagcaactgtttgaccttttgggcaagaactatacctcccatgaatttgacgaattatgttttgaattcggtatcgaaatggacgaagataccaccgaggaggccttgaaaactggcgaagagcccgaattgaagctcgacattagtgctaaccgttacgacttgctttgtatcgagggtatttcccaagcgctaaatgagtacttggaacgtaaagaaaggcccgattataaattaagcaagccaaccaccaagttgatcattgacaaatctacggaacaaatcaggcccttcgctactgctgctgtgttgagaaacatcaagctaaacgaaaaatcgtatgcctctttcattgccttgcaagataaactacatgccaatctttgtagaaacagaagtttggttgccatgggtacccacgatttggactccattgaaggtccattccattatagagctctaccaccaaaggatattaaattcgtgccattaaaccaaacccaagaatttactggtgacaaattgatcgagttctacaagtctccagaacagaaaaacaacattggtaaatacgttcacatcatcgaagattctccagtcttcccagtcatcatggacagcaaggaccgtatttgctctttaccaccattgatcaacagtgaccactccaagatctccgtggatacacgcaatatcctaattgatattaccgccaccgataagaccaaagctgaagttgttttgaatatattaaccacaatgttctcacgttactgtgacgagccattctcagtggaacctgtggaaattgtttctgagcacaacggccaatctcgtttggcaccaaacttcaacaagaggatcatggatgtctccatcaaatacatcaactcctgtctagatctaaatcaatctgccgaggaaatcgcacactgtttgaagaaaatgtcattgcacgccgttccatccaaggaagacaaggacattttacacgttgacattccagtgactagaccagacattttacacgcctgtgatataatggaagatgctgctgttggttacggtttcaacaatctaccaaagggtgagaagctatccaatgccaatttcattgccaaaccactgcctatcaacaagatatctgacatcttcagaattgcatcatcccaagcctcatggctggaagttttgccattgaccttatgttcacatgatgaaaacttcggatacttgaagcagcctgacaacaatgacctagcagtcaaattggccaatccaaagactctggaataccaagtcgtgagaaccaccctattaccaggtatcttgaagactgttaaagaaaacagaaagcattcattgccaatcaaagtcttcgaaaccggtgatgttgtcttcaaagacgaaactcttgaaagaaaggcttacaatgaacgtcattgggctgcgatttatgtaggtaaaaattcaggatttgaaatcatccaaggtttactgggtaagatcatgcagactttcagaacagaatggattgccgactacggtgctggcgcatccggtagaggttactggatccaagaagacaactctgtcaagacctacttccctggaagaggagccattgttatgttcagatccaaagaaggtgctaagccaatacagatcggccacctgggtgtcttgcatcctgaagtcatgatgaacttcgacgtcccattcgctgcgtccttcgtagagattaatgccgaagtcttcctataa

SEQ ID NO: 1713 - DNA, 822 bp, Saccharomyces pastorianus
atgaccgttcctaagaatcgccccatggcaccctttggcaccattatcaaatcaaggataaaacaacctcagttttactggtttgttggccattttttaacaatctttaactttatacaatttcatctctcaatcacgtctaaacaaaaccaattgtcatgctacaggaggtcgttattttatatagccattacatatgctatcgtgctttaccagttctttaaaagcgaccagttgaagttcaatatcacgcttttgcgacaagagatcaaaaaattggacaatttgcagtacttttccatgctattcatactcttcatcttatcacagttcaacatcataatcagcggctcattatacagtcctgttattttttctatcttccacttcctaaattacttcaaggaaaatctactaccatttctaccattgttaccacataatctgaaaaatctgttgaactccaaaataacagtgttcattcagaactacaacgggtttttcttacagatggcccaagtcttcgaaattatttgcggattgcgcgtgggccttttcttattgccctttaaccttttcctattagtgataaaaaggtcaaatgcatcgtttgaggtatttggtacgatcctagccggtttgacgtacctgtggttcttcaagttacggtacttacaaagcgaatccttaagacagatttttaagcaatacgttcttagattggatgcctacatcagccgtaccttgcccccatacttttcccttttctggagtggctataagaatttcgtcatggctgtgttttggaaaatacctgtatag

SEQ ID NO: 1714 - DNA, 549 bp, Saccharomyces pastorianus
atggctggaaaagcaggaaagaagcaagctagttcgaatacgaagataatccagggcttgtacaaacaagttttcctgtttttagggatggccattgtacgtcttttaatctcttataaacgaacctcgtttggacaatggattaaattggtgattttgaatgttccaatgttcattgcgatctatattatcgtgatatccggttcacccaagtatgacgggaaccgtgtagtgaagcaaggtatagacttgaaagatgactctaatttgatatcatatttcttcgatttgatttatttatcactttttggtaacgttggtataatagccttcagaacttttaaattttggtggtgtttattactgtgtccaatttacgcaggctataagctatacgggctcaaaaatatgattatgcctggcgctcaacaacaaacacaaccaaatgatggcccagatgccggcgatggcaagtcaaagtctaaaagacagatgaaaagggagaaaaaaggtgacaatgactctaaaatcaagtacaaatatcgttaa

SEQ ID NO: 1715 - DNA, 555 bp, Saccharomyces pastorianus
atgttctcctttgttcaaagatttcagaatgtatcgaatcatgccttttcattagggattgtaattgttgtgtttatcatggcatcttcctactaccagttaatcaataacagcgcgttctccctacctagtgatattgacaatgtgaagacactaatcaacgtaagaacaagtagatacttcggctcacaaagaggcaagccaaaggagaatatgaagattaaattcgacctaaatacagatttgactcccctattcaattggaatacaaagcaggtatttgtctatttgactgccgaatataacagtagtgacaaaatagccagtgaagtcactttttgggataagatcataaaaagcaaggataacgccgtaattgaggtaaacgatttaaggtccaagtattctatttgggatattgaagataccaagttcgacaataaggacgtagttttcaaattacattggaacattcaaccatgggttggcttgttaacttacggtgaaacagtaggtaatcaaacggtcaccatagagaatccagaaaaagtttaa

SEQ ID NO: 1716 - DNA, 2898 bp, Saccharomyces pastorianus
atgaaaaggtgtgctccggccatattgaaaacttacaattataatagaggtatatggaatagtggcgtgcccgatcgtataagaaaactacttcgagataagtcgacctcacctttatgttcacacgatgagagaaatctagtctcattctttatgacgcgtgaaaatatgcctctgaagtcagctggtactgcattaacaaagaggacgacatcagcaataacaacaacatctgttaccacggcttttgaacggcagtatctcataaagtatctttaccgacatcaagctcatggaaacgtgataaaaattgcgcaaaactttctttataccaccatcgattcacgaagattgttaaggcaggatgtatcgttacctgaactgaaaaagtttcttctctctttactaattttacaaagaggtgtccaattggatcaagcaatgggtgatgttatatctcagtttctactaacacaaaagcaaatggttgtagatttgattaactcgattttttcaaagatggttacaatgaacatgcatggtgaagcagtatataagtgggtcaagtggatgaaattagttaacggtcattgtcaatttacaaattatatggaaaacagaatagtattgaggaacttcctatcattcatgaggcgatctgatgttcaccctgattatatatcctacttgaaagctattcagctcactcaagggcctgcactcgcatcccaatttgcaaccacgctgatatttttactgacctacattaggaacttttccttggcagaagatgtttggaactacaagtgtgagcataacctaccgataatagattctgacctgacgtgcattctaaagacatactgtcacatgcaaaaattttcactggttccacaaacatattataaatatcctgatgctcaacacgatcaaaatcaattcgattatttattgatagcacattccaagctccataattgggacgcattacaatcacagtttaatgctcttttcggtgtcggtaaattgccctcaatacaacattatggtattttgatgtacacaatggccagaattggtgagttggatagtgtcaataagctatatactcaactattgagaagaggaatgataccgacatacgtcgttttgcaatctctattatacgcacattataaagttggggactttgcagcttgcttcaatcaatatgaactattcaagaaatatgacatagcgccttcaacagcaacccataccttaatgctcaaagtgtatcgtggtctaaacgatcttgacggtgcgtttagagtattgaaaagactaagtgaggatcctagcgtggaaattaccgaggggcattttgccctactgatacaaatgtgttccaaatctacgaactatctgattgctcaagaattattcaatcttatgacggatcattatagtattcagcacactggcaaaagtgttgcttcattgatggatgtatacattgaaagtaacagggcagcagacgcaatagccctgtttgaaaaatactcaaaggacctatcctggagagatggcttaatctcagtatacaacaaagctataaaagcacatattagttcacagaactccagtaagtgtgaagaaatttttcacaagattacagatttaaacctagctgttgacagtgaattttataagatgatgatcagatttctagtcaagttaaaccgggattatgatacggcattaagtatcatagatcaactgataaaacatcctgtgattaaagtagacgctacacattttgagattatgatggaagcttatgacaaaataggctatcgcgatggtataattaatttatacaagttaatgtctcaaaataaggtcgcagcaaattccaagatcttatattttatattgaaggccgttgccaagaaaagtttacaaaatgatggagaagttaaagagacgataaagatggtagaagagattatggaaaatgcttccaatggaacccttgatgttacgtacaacaagcttcacccttccgtcatggcatggccaatgaggatggttgtgaagcatgatagtccacagcgggccttggagttatacaatcgctacaatgagcttttcttcaaaaagcatgactggatatcaaataacaacaaattcgtaatgatgagatctttgctggtactattggctcagattgaacaatggaaagattttgaaacattgttcattaagtatatggatcgtgtagaaaatattgagagtttaccatcgtctacaacaccaaatatcaaaatgaaaagtctgttcagtggacttttcccatataaagtaagccaattggttgcaatgaataaaattgatgaattaccactgctgtggaaaaaattacacgagaaaggtttcattttggacaatatgtcctggaatagcacagtagacgcactttttaaagattcaaggaccatttcatatggtttgaagattgtcgatgatactttaattcatggacatgacttgattcacaaatttagactattaacaaaactatcccaagatacggcacactcaagtcataaatcttggtcaacattagaaatgaaagaaaaagatccgtataagttccaacccaagttatacttacaaagtgacacttacaacagtatagtgaaacagctggatacatatttaaatggtattgatgatataacagaattggaaacccggatacgtgattttatatcgaattacagatatttcatgaaagattatttattgaaacctagagacaacattagtaaatgggaacagattgaaatgagacattcctcgtactttaaagaactaagaaaacttaaaatagtactgccagccagcaacttttaa

SEQ ID NO: 1717 - DNA, 456 bp, Saccharomyces pastorianus
atgggtacagctaagcagagtcagaatagaaagaagtttacaagggagtataaggtaaaagagattcagagaagtatcacgaagaagaccagacttaggaaggaatatctcaaagctctaaaggatgaagggtatacggtaccggagaaggaacctagaaccggtgtgaaagactctgttagaaagatcaaggaagccagggctacggaaggcaagaaaaaactggacgagaagaaggagatcaagaaacaaagaaagaagctacaaagagatgaactgaacgaacgaaggaatgatgagctggaacgaatcagagtatccaaggaaaagttccagatgagagaggacaggaagaagagaatgacccaaagaacaaggtcgggtcaacctctgatgggtcctaagatcgaggaccttttggataaaatcaaaacagatgacacttatacttcctga

SEQ ID NO: 1718 - DNA, 1071 bp, Saccharomyces pastorianus
atgacagaattaactacgcaacaagctgttgtcttagagcagcctggtaaaattgtcttaactaatgttagtatccccaaaatttcagacgcaaacgaagtaatcattcaaatcaaagccacagggatatgtggttcagatattcactactatacgcatggcaggatttctcatttcgtggtgaagtcgccaatggtgcttggacatgaatcctcgggtgtagtggcacttataggcgacaatgtcaagacgcttaaagtgggagacagagtggcactagagcctggcttccccaataggttctcatcaaaattaaaagagggaaggtacaacctggaccctgatttgaaattcgcagctacaccaccctatgatggaaccttaacaaagtattatagggctcccaaggattttgtctacaaaatacctgatcatgtgtctttcgaggaaggggcattgatggaaccattgtcggtggcagtccacgcaaacaagctggccaaaatgagatttggcgctcgatgcgtcgtatttggagctgggcccgtaggtctgttgactggtaaagtagccagtgtatttggggccactgaggtagtcttcgtggacctgtcagaaaccaaactggaaagggccaagcagtttggtgcgacacatacggtcaactcaggcgacttgccacctggtgtcagtgtagaatctgttatcagaaaggctattggtaagaaagatgccgatgtcatatttgaatgctctggtgctcagccttgcatcagaacaggcatcgaggtttgcaaggcaggtggaacgtacgttcaagttggaatggggcaagaagagatccagtttccaatctcaaagatctctaccaaggaaataaccttacaaggctccttcaggtactgtcagggagactacagcgactctatcgagttagtctcgactgggaagctctcgctcaaacccctgattacacatcgctaccagtttaaggaggcaattgaggcattcgatgagaacagggaccacccgctggacaacgttaagacaataatcgagggcccagaatga

SEQ ID NO: 1719 - DNA, 3249 bp, Saccharomyces pastorianus
atgactaccacgataggttccccacatatgctggctaatgaggatagactttctaacgagatgcccgcgctgaaggaccattctgagcagaatggacaagagcaacagggtcctgttaagaacactcaactgcatagtccctcagcaaccgtcccggagaccacaactgctcagaaggagtctctggaaatggtaccgaccagtacaagtgctgcagcgggagccgtaacgagcacaccaccgccctcgttaccacacgttgagattaatcaggtcagtttagcattggtagtaaggaacttgacggtatttaccatgaaggagattgctcaatacatgaagactaacgtgcacactcagatgaatgagcccaattcagcaaagaaaatacgttttttgcaactgattatattcttaaggacacaatttttaaaactttatgtgcttgtaaaatgggcccgtaccataaaacagaacaatttccatgtattaatcgatcttttgaactggtttagaatgaccaatatgaatgtcaacaattgtatctgggctttgaagagtagccttgattccatgaccaatgctaagttgccaaatgtggatttggtcactgctttggaggttttgagtcttggcagacctaatttacctacgcacaacttcaaattgagtggtggcggtgactccacggatgcagtagatggaatggctaaagtgcccctgagtttgattttacaaagattgcaggatctgaacttaactgtttcgatcaaaattgcattaatgaacgttcctaaaccgttgcataactatcgtattaagaacggcagaatatactttgctgtaaccaatgaatttgagattcagttatccactgtaaatagacagtcgcccttgtttttcgtggatttgaaactcctatttagcacagaagctgagcagagcgtttcaaccgtaacagaatccaattcacccaacggtagcagcggtaacaacgatgatggctccaaccctaacggtaatagcctacctttaaataagccaagactggagaagttaattaatgagattcttttgaaaagtaatgatcccttatcatctctttacaatttcttacacaaatatgtgttgacactacaactatacatggttcatagagaatttttaaagctagccagtggtgggaaattttccaaaagtaacctgatccataactatgactccaaaaaaagtgtaattacggttagatattggttaaatggtaagatggacagtaaaggtaagataaccattggtattcaaagaaccacagagagtcttgttttgaaatgggataatcaaagtgcatcaagggccaaaaatatgcctgtaatttataataacattgtatcaaatatcgaaggtatcctggacgagatcatgttcaaccattcaagaattatcagatcggagctgttagcaagggatatatttcaagaagacgaggaaaatccggatgttttattattccaacttcctacaacatgcgttgctatggcacctatccaattaaagatcgacttattaagtgggcagttttatttcagaaatccgactccacttttatcgaattacgcctcaaaaatcaatagagcagagagtccagaggaattggcaagaattttacaacagttgaaattagacaagataattcacgttttgactaccatgtttgaaaacacaggatggtcgtgtagtaagatcatcaaaattaataagccaatcaggactcagttgaatatcaacaacaacaatacttcgaagacggaaagtagcaccgttgttgataataacgccaacagtggcgatttttcccttttgttacaaagggatctgttcattaggttaccacactggcccctcaactggtatctaatattgtcgataatatcctctaaaacatcttgtgtggtggaaaaaagaattggtaagattgtctcacaacgtggaaaatggaatttaaaatatctggacaattctaacgtaatgacagttaagttggagtcaataacgtatcaaaaaatcatgatattgcagaaaactattttgaacagaattattaaccatatgctaattgattccttgaatcagttaaaaatccataataagatttgttcatctgaaatgattagcgaacaaaaactacctcaatatatcgttcagggaggtagtactaacgataacatctctatcataacactagagttagaatcctttttggaaggttctaaggcgctaaattccatactggagagttccatgttcttgaggatagattattcaaactcccaaatacgattgtatgccaagtttaagagaaacacgatgatgatccaatgccaaattgataaactatacatccactttgtgaaagaagaaccactagccttctacttggaggagaatttcacaagcttaggtataataattcagtatttgaccaaatttagacaaaaattgatgcaattggttatattgacagatgttgtggaaagattacacaagaattttgagtccgaaaacttcaaaataatcgcattacaacccaacgagatttccttcaagtatctctctaacaacgacgaggatgataaagattgcacaataaagatactaacaaattacgattctattaaaaatttaacagtgcaattatcaccttcgaacccccaacatataatacagcctttcttagataattcgaaaatggattatcattttatctttagctacctacaattcacgtcatctttgtttaaagctctaaaagtaatcctcgttgaaagaggggaaaaattccgtactggtggaagccagtactcgaccatggtgaacattggattgcataatctaaacgagtatcaaatagtatattataaccctcaggcaggtactaagatcacaatatgcatagaattgaaaaccgttttgcataatggtcgtgacaagatccagttccacattcattttgcagacgtggcacacattaccacgaagtcccccgcctacccaatgatgcatcaagtaagaaatcaagtttttatgcttgatacaaagagactagggactgcagaaactgttaagccaacccttgcatcgcacgccatccgtttaggcaatggtgttgcttgtgaccccagcgagatagagcctatcctgatggaaatccacaacatcctcaaagtcgattctaactccagtttatcctag

SEQ ID NO: 1720 - DNA, 585 bp, Saccharomyces pastorianus
atgaagtctagtaagctgttggtccaggacgctaaggattaccgcttcaatccgtccataccgctgaggatatatttgaaaacatgcatcggcatcttggaaaaggcgcagtgtgcgttccagaccggtgatctgtcgctggcgtttatttattactttagatacgtggatttattgactaataagctgtctaagcaccctgaattgtccatgatggacccgtcgtctatttataaaagagaatacttgcagctgataaaacttgaggtacccgcggtctgcaaaataattgaaggtctgcgcaaggaaatcgactctcagtatagcaagctgcagacttcattggccaataatatagctaaaccaaacacgaacacaaacacaatgcccgcacaactgcagcaacagtcgctgccgaaggagtcgttcaacgaatacagattcaaccagtcaatctccttcttccagaaaatatcaaattcgcaactaaacgccacaaccaactcaccgagtcaggataccgcccgtgacgaagcctacagactgaattacccagaactaccacggttcacgttttctacatag

SEQ ID NO: 1721 - DNA, 666 bp, Saccharomyces pastorianus
atggctagaagaccagctagatgttacagataccaaaagaacaagccttatccaaagtctagatacaacagagctgttccagactccaagatcagaatttacgatctaggtaagaagaaggccactgtcgatgaatttccattgtgtgtccatttagtttccaatgaattggaacaattgtcttctgaagctttggaagctgcccgtatttgtgccaacaagtacatgaccactgtctctggtagagatgctttccacttgagagtcagagtccaccctttccacgtcttgagaatcaacaaaatgttgtcttgtgccggtgcggatagattgcaacaaggtatgagaggtgcctggggtaagcctcacggtttggccgctcgtgtcagcattggtcaaattatcttctctgtcagaaccaaggacaacaacaaggatgttgtcgtcgaaggtttgagaagagccagatacaagttcccaggtcaacaaaagatcatcatgtccaagaagtggggtttcaccaacttggacagaccagactacttgaagaaggctcaagccggtgaagtcaaggatgacggttctttcgttaagttcttgtccaagaagggttctttggaacacaacgtcagagaattcccagaatactttgctggtcaagcttaa

SEQ ID NO: 1722 - DNA, 1752 bp, Saccharomyces pastorianus
atgtcactcagattattagcgagaagccaacaacttctgccccgtcgcaactggttcttccccgtcaggcagtatgccaaagaacctcaatacgatgaagctgacctatttgcagaaaacataaaccatggggcgtataaagccaagaaaagatcgtctcaagaccagttccaatggcctgaaaagtcagcagaacaggtctcgaaggaagcagaacggcaatgggaaagaatggctaaattgtctgctgttgggcaggggattcttatcatcctggtagtgggtgggttaggatccgcctacttgcgttggcctgaattgaaatcctggtggttgatcaagatgaatggaggtcgtgtaaacacagtccaagagcaaaatggacaggactccttggagaaactggccaggcaaaaggccaagaatcttcttagggagatcccgcaggtgcccacctttcaacacggaatagactatcccggtgtgtacatatgggggaaatgtcattctaaagattcgttgttccccatcagagtccccaacttggataaccgtaaatttagagacatcctactggccccctccgacgacttcaactgtaactttgcacttgacgaaaagggcgatttgatatcatgggatgacttgggccaaacgaagacgttattggcaggtcaacatctgacttcaatgaagtactcaagcgactatctgtacgcactaactagaaaaggtgaaatactggtcgtaccgataaggactccaaatctgattgcatcgaagctatcgtcaagaagatcaaagctgttgccatggaaaaccaaacaaagatatgattggaaattagagacaaaacaagtatttgatactaaaaagggcgaaaatcgcgtagtacagttcgacactggtagccaccatttggtattgctatccaatctaggtaaagcctattcgtgtgctactgggaatgaccagaaacagcctcaattatcaagaggtcagtttggtataccaactttatctcaatttgatgagtttccgcctaacaatgagctgttcgaaattgaattactaaacaaatacaaaaatgaaggagagaacactattcagaaaagacaaatcgataagattgcgtgcgggtcttaccatacgctagcattggaccataatggggagctttacgcctttggttggaatcggtttgggcaattagctttgcccatctcgtacaatttagaatatgtttcattccccagatcagtcacacatgcattcaaaccgcatttccccgggttaacaaactggaaatgtgtggacattcactgtgatgacgaaacctcgtttgttaacattcgtaggccgggtgtaattccagatcattattatttcgcatttggtaatggacttttcggtgaattgggtaacaacactttcaagaactcacagtgtgagccaattaaaattaaattaaataacaagaaagtgatcaattggagttgcggttcacatgctgtctttggtgaaacagatcatgaacgtgaagtgattgtttggggtaataacgaccatggtcaattaggtataggaaagaaaaccatgaaatgcgccaagccaatgaatattccagacgtcttgaagcccggacaggataccacagacctaaagtcgatatacgacagcaaattccgcttaacaaatcaacaacgtattgtcacgaatggagataagagttgtatatattggcgagtttga

SEQ ID NO: 1723 - DNA, 3663 bp, Saccharomyces pastorianus
atgtttgttcatcgtctctggacactcgtccttcctcttcttacactgggttcgaaagcatcacaattacagagtatcaaatcattgctagatatcgaagacaatgtactgcccaacttaaatatatcgcaagataacgacaacgcggtacaaattcttggcggcgtggaggccttatcgttgtacaagtacatagggcagcagaattttaccaaggagataggcccggaaacaaactcgcgtggactagtgtattactccaatgatacttatattttattggaagacgccgacgaggacacccgaatagacagaatcacgccgtttggcaccgactcattcattcttagcgggtcaggctccataaaggatgtacctctgggaaaccagatactctacaatctgtcaacactatccatggagcgcatattcacccagccgttgggccatgtggaggccgttcttgtaaatgacacttctgtttacttcgggggtaacttttcatataacaacggttcaatgacgggccatggtgcccttgtttgggaatctacgtcaaataccacccagcttttaccttttggagggttcggaaaagactcctacgtgaactcgattgtcaaattgaatgatgataacattttatttgcgggcaagttttatacgttggatgactcttcgatcctcaccaccagctccaagaacactacgagtgcaacctccgcgttgaatgccacaactttggaattgggacaacggatcccattgagatacgcctcgtgggactcgcagggaagtacaacgtttgaatccagttacctcgtctgccctgatacggataaagacgcatggacatatccgggtacatcaggatctttcgtttgcactttgccttatgaagtcgcaccaacaaagataagactttataactctccaaattctaataacgaaatttccttatttcaaatactgaccaatccatcgcgcagtataatgaatctaacatatctggatccaataagtggggaactacagaattgtgacgaattctgtccattatatagtcgagatactctactgtcagcaagccaaaatgtgtcttcgtccctggatatgatttccttcattgacaataacaatacagatgtcaaatggtcgtcggacttccaagattttgcatttgcaaacgaagttgccgttacatcgttaaaactcaccgctttaaactcatacggagataacgttgcgttatcaggtttggaactttatcaagatacgttttcgacctacgctaacaattcactaaacgaatatggttgcagtgcactcgccaacgattcatcgtcatccacattatcggacaatgagtggtatgacggcttaacaggtcaaagttatatagccatcgactacgttccgaaccaaaataagccaactccaactgtgacgttttaccccagtatcattcaccctggtcattataccattaatacatacacacctgggtgcgtccaggataacacgtgctcttcaagaggtattgtaaacgttactatgtggaatccacagaataacacaatgatggagacttacctaatttacctaaacaatgacaatttgaagtatgataagatctattcgggatacttggatttctcaccggaaattgtcatggagtacgtttctggaatatatgcaagtaatactgcaacgatcatggtggcagaccaagtcaatatcatcaccgattcgttggattcttttagcagtctttcagaaactacgaccacgaaaagacatactcccttgaatggtgtccttcaataccaaagatcaaattttactgcccccacgtcaaacgaaatgaagatagccaatactactttgaaccttttctcagtggataactacccaaagaactcttccatattcgctgacatttacgatacgaaattaatacttggtggagcagataaccacatttctgttatagacttcaatgaaagtttgagggtaaccgcaagtgaaaacaaaaccattcagggtgatgtgtatggtatgacgcaaactaaccaaggtctgttgatattcggagatctccgttcttccgatgataaaccaacagtccttatgttcaatggatcatttgaaaatctatcaaactattctaagacggtggacaatgccattaacataagcttagcaaataacgacctgattgtgtttaacaacaattacatactcaacacatcctcgaactcagaaatatcgaactcctcctcttttagtctttcgctttggtcagccggtaataacggtaacggtgatgttttattttcaggtgcagtgtcacaaatgcagttcagtgacttgagtggatcagcacgattcttaaatgaggatatagtagaagcgttgaacctaaataaaggtattgtaccgtacttgggtgcgtatttgaatgagtccactatagcttatgcttacaaaacagattctttgagcaagatctatttttctaacaacgttaatccttcctggaattggtctaataacataactaaaatggtatatgcgaataatcaaacgttgctagctgtcggttctgagtcctcgacaacagcagaattatcgattttcaacctaaaaaatttcacaacaattgctaatgaaaccattgggtccaatgcaaagataaatgcatttgtcaatttcgaaaaaaattctagtctgttggtgggcggagatttccaaatgagcaagccgaattgctccggattgtgcctatacaactatgaaagcaaaagttggtctgcattcctcaataatactatttttggcgaaatcactgaattaaccttcaataatggatcagaattaattatttcaggtctttttgctacagaaaaatatcagtctatacgtttggggtccttcaatctcaccaattcgaccatgattccattattaacaggttcgggaggcaaaataaagtcatttaccgttaccgaagattccattgtggcatggaatgacacctcgttgcttatctacagggatcaaaaatggaatattacctcactaccaggtaacggcagctctgttagctctgtgacaacgatcaacacaaacgcagactcctatactttgagtaagcgagctactgacaatgttgagaaggggagtatcctgctcctcaacggtaattttagcattccgcagtacggaaatttgcaagggctgctgtttgattcccagaactggacaccttactttacgtcagaagcatcggaagcttccggtcacaatccaacaatttttataaatagagacgtgtcagccgaattcaactctcaaatcccactctccaattcaaacatggccgtgacaagtcctcaatcaacatcgcccctatctccatcttcatcggccagtagtgagtcgaacaagaaatcaaagaagaagaatatggatcgtgggtttgtcgttttaattgggctggcattagcattaggaacagtttctgttctcggtattgcaggcgtcattcttgcctacgtgttcaaagatccggagggcgattacgagcccattaaaccacgaattgatgagaatgaaatgctcgataccgttcctcccgaaaaactcatgaagtttgtctag

SEQ ID NO: 1724 - DNA, 1317 bp, Saccharomyces pastorianus
atggaaaacccgcccatcgtcattgataatggctcttacgagattaagtttggaccttccactaacaaagtaccctttcgagctttgaatgcattggccaaagataaatttggtacgtcgtacttatccaaccacatcaaaaatatcaaggatatctcctcagttacatttagaagaccacacgagctgggacaactgacactatgggagttggagagttgcatatgggattattgccttttcaatccatcagagtttgatgggtttgatctaaaggagggcaagggtcatcatttggtcgctagtgagagctgtatgactctgccggaactaagtaaacacgcggatcaagtgatattcgaagagtacgaattcgatagtctattcaagtctcctgtagccgtatttgtaccatttaccaagtcatatcaaggcaaaatgagaactatttcaggcaaagacgaagatgctgacgttgctattagcgacccggacgacaaaacgtttacgtccaaggagtctataaatcaaatgaactcgaacaacgattatcacgatttccaactggtcattgattctggctttgattgcacttggatcatccccgttctcaaaggcataccgtactataaggcagtaaaaaaactggacattggggggcgttttctaactgggctgttgaaggaaacactatcatttagacactacaatatgatggacgaaactatactcgttaacaacattaaggaaaagtgtctctttgtaagcccggtctcctatttcgatagtttcaagtcaaagaataagcacatagtggaatacgtactgcctgattttcaaactagtttcataggctacgtgaggcaccccagagaggaagacagcccgctgccggcagatgcacagaccatcgcattgacagacgagctgttcacaattccagagacgtttttccatcccgaaatttctcaaataataaaaccaggcatcgtagaggcaatactggagagtctgtccatgctgccggaaatagtacgacccctcatgataggaaacatcgtgtgcactggagggaacttcaaccttcctaatttttcgcagcggcttgccagggaactacagaggcaactgcctacagactggacttgccatgtgtcagtgccagagggcgactgcacacttttcggctgggaagtgatgtcgcagtttacagagaccgagtcctaccggagagccagggtcacgagggaagaatattacgagcacggtcctgactggtgcactaagcacaggttcggctaccaaaactggatatag

SEQ ID NO: 1725 - DNA, 1377 bp, Saccharomyces pastorianus
atgagtggcagtgatagtaaagatcgtttatatgatgttttgggggtgacgagagaggcaagcgtacaagaaatcaagacggcttataggaagcttgccctgaagcatcatccagacaagtctgtggatcaggactccaaggaggtgaacgagatcaagtttaaagagattactgcagcctacgagatcttgagtgatccggagaagaagtcgcattatgacttgtatggtgatgataatggcaccggtggtggtggcggtgatgagtttggagatgacgattttatgaatttcttcaataacttcttcaacaatggagcccatgagggaaacgatttttctcatgagcaggagatgtacgaggaagacggaactgcgagctccaagaatatcgacattaatttatcttttacgatgacagatttatatatgggtaagaagttgaagtttgatttaaagagacagattatatgtggcaagtgccaagggtctggttggagagcaaagaagaaaatgcatgttacgcatgaaatggaatgtgaatcctgcagcgggaaaggttccaaagagcgtctcaagaggtttggccccggtttggtagcatcacagtgggtcgtgtgtgagaaatgtcacggcaaggggaagtacatgaaaaggcccaagaaccctaagaacttctgccctgattgtgaaagtgtggggcttcagtctaagaaggaagtcatcactgtaaatgtgccaccgggccaccatttcaacgatgttatcatcgttaagggaatggcagacgaagaaatcgacaaggctgtctgcggagacttgatctttcatctcgttgagaagcaagaggacctgcaacagaagcaaatcttaatgaagatgttcggcgacgaaaacctgcaagatttatacgtaagcattacggtatcactaagtgaggcgttgacaggttttgaaaagtttttaacaagaacgttcgacaacagattgctaacgttgagcattaaaccggggaaagtcataagacctggcgatatcattaaaatcaccagcgaaggttggcccatcctggacaaccctcgtggccaatgcggcgatctgtacgttttcgtggatatcgaattccctccagataattggttcaatgaaaaatcagagctacttgcaataaagacgcacctaccgtcgtcatcatctcgcccctccaacatcactgcaaataccgggagcgacaacagtccgattaacaacgaaaccgtatcgaacttccagatcatccacacagatgatcttcctgaaggaatgaaggcgttcaatcccaaaccgcaagcctcagcgcaccagaaagcaagcagttcgtactgccccatgcaatga

SEQ ID NO: 1726 - DNA, 2685 bp, Saccharomyces pastorianus
atgccaagggaaacacattcgagtatcgaagaagaggtggaaatccccgattttcaagatagcgcaacagttcctgatcttgatgacttagagctggagtacgaccaatacaaaaataatgaaaacaatggtcccttcaacgataatgatctggaaagcaattccgttgccaaccacaacacggtgagcaattcgaagggcattaatggctcgaaggtcgagtattttaacgcttcggatatctcgttgtatgacaattctgtttcgcagttcgaagaatctactgtgtcgttcaaagattactacgaccatagtatacgttctcatcttactttgaaaggtgctagcgattatcttaaaagcgtctttccaatcattaactggttgccacactataacgttagttggtttattgcagatctgatcgcgggtatcactatcggctgtgttcttgtgccacaatccatgtcgtatgcgcaagtcgccacattgcctgcacagtacgggctgtactcttcatttattggtgcctatgcctatgcgttttttgcaacctccaaggatgtttgtattggacccgtcgccgtcatgtccttacagaccgccaaagttattgcagatgtcacatccagatacccagaaggtgacactaccattacgggtcccatcatcgccacgacattggcgttattgtgtgggattatttctgctgctgttggtttcttacgtttggggttccttgtcgaattcatttctttaaatgctgtcgctgggtttatgaccgggtctgcctttaacattttgtggggccaagtgccagctcttatggggtacaacaaattggtcaatacaagagtcgccacttataagatcgtgatagactctttgaaacatttaccggacactacactggatgctgtgtttggacttatcccacttttcattctttacacttggaaatggtggtgtggtacatatggtccaaagttgaatgacagattcaattctaaaaggccaagattacacaagattgtcaaatggacatatttctacgcacaggcttctagaaatggtattattatcattgtattcacttgtattgcttgggccatcacaagaggcaaatctgcagctgacagaccaatcagtgtcctgggatccgttccatccggtttgaaagaggtcggtgtcttccatgttccacccggactgatgtctaaattgggtccaaatctgcctgcttctattatcgtcttgctattagagcatattgctatttccaaatcattcggtagagttaacgattacaaagttgtccctgatcaagaattaattgctattggtgtttcgaacttattaggtaccttctttaatgcctatccagccactggttccttctcgagatctgctttgaaggctaaatgtaatgttcgtaccccactatctggtttattttcaggttcttgtgtgcttttagcattatactgtttaactggcgcattcttttacattccaaaggccacattatcggctgttatcatccacgcagtgtctgatcttctggcctcctaccaaacaacctggaatttctggaaaatgaacccactggacttcgtctgtttcattgttacagtcttgatcacggtcttttcctccattgaaaatggtatttatttcgctatgtgctggtcatgtgcaatcttcatacttaaagtggcattcccagctggtaaattcttgggtcgtgtcgaaatcgccgaagttactgatgcttatgtcagagctgattcggacagtgttagcttcacatctgaaaacaacaatcgtattttaacattggaagaagatactactgatggtgaaaaggaggggcgtaccggttatataattaactcctctaaaaaactagacacaaaagtccaaacgaagggtttcgaatccccatccccttcaattggccaaccaagaataaagtatcacaccaaatggctaccattcgaccacaaatacacaagagaattaaacccggatgtccagattctcccacctccagatggtgtcctcgtttacaggctatccgatagttacacgtatatcaattgttcaagacactatgatattataatagaccgagtcaagaaggtaacgagacgtggtcaactaattcgccacaggaaaaaatccgaccgcccttggaacgatcctggtccatgggaaccacctactttctttaagaatttgaaattctggaagaaaaaggaaacggatatcgagcctgccgaaaatgctgccaacaacccaactgatgctgaccgagatgatagaccattactaaaaatcgtgtgtttggatttctcgcaagtggcgcaaacagatgccactgctcttcagtcactggttgacctaaggaaagtcatcaaccaatatgctgatagacaagttgaattccatttcgttggtatcatttcatcatgggtgaagagaggtttgattagtagaggttttggtactctaaacgaagaatatagtgatgaatccattgttgccggtcatacaagttatcacgtcgcaagagtacctcaaaacaaagaaaccccaggcaaatatagcgtttacactgtttcaggtacaaacttacctttcttccatatagatattccagactttgctaaatgggacatttag

SEQ ID NO: 1727 - DNA, 1509 bp, Saccharomyces pastorianus
atgctgctgaacgtggagacaaatcattcagtaatgcatggtcatgaacaccgcctcatcggaagcatgcgcaatgacagcgcattgcattcatgtaacgactcctcgaaggtcttttatcctaagtcgttctacgccactgctaccaacaagaagaacaacaagctggccactgccagcttgaacaagacgatcccgagtacaagaacagtaagcgaccagagctacttctgctcctctgctggagcaccactcgatgggccagcgggttctcgaagtagcaatgtacccaccaagaggaagagctttaagcggaccagaatactgaaggctcgagtcgattccgaaatgtcaaacgaaaatcgctcatctttcatgaccccgtctttaagttcggttttgtcgcaggtcaagaaatcaaattctgtaaagacagtatcgggcgattgtccgatacatgagaacctcttaacacagagcattaagaggaagttttcggaggagacgcaaagtgactgttcttctttgggctcgtccaaagaccatcccttgacagataacattgcagaggctgccgatgcgcagacccccgccatcgacgacgaaaaccagatcgaggcggaggcgcccaagataaaaatactaaacatgaaggaccttgacctgttcgatgactgggaggttaaggatctggtagacctgttcccacccgtatacgaaagacattcgcaaccgttgtctgatctgtcgccggtaccgtcgctgtccgatgcgagtgcaaaacctcgaccaacctccgtggacttccagattgtcaacaaaacgggcggcgcctcgagaaggaagagcaagagcaagtccaccacagaaaacatgatatacgagaacgacctggttgaactggaacagtggccttccaccacgccatcttccgagaccaaggacgcggctgctcctaacgacctgcttctaccgaacaaaagaataagacagaaaagtttgaatacaaacttcttacaattgtattccatcgaaacatcttgcaaaagaaaaaatattctaccagaagtggaggtggacgaccatctgctgaagcaactcacatactccgatatctggtcgttggagataaaaaaggaacccaaggtctccacacgggacatcaaaattgccctcatcaccagaaaaaaactgtggtcagacatggtccacgaaacaaggaacgatctctttggcgattccacgccgtggaacctgcctttcatcgcaacggcgtccacggtgccgccagggacggaccacgaacccgcaaacgaacccggaacgatggacccaaagagctctttggttcgcgtgcactcggacgtcaagccttggttcaacaatcgcggtacaatgctcaaaccatgcgggaaactaagcttgggtaaagtctcaaacaagactactgcacccacaagagatatccagtatgtcgtaaagggctggtgcgacgccaggtttgtgtga

SEQ ID NO: 1728 - DNA, 1968 bp, Saccharomyces pastorianus
atggtgctggagccttcacctccaccgctaatagcaacagcgacaccgtctcttccatccagtttgaaaagatctgttgccaccgatgaccagagcaataatggcgggaccagaaagaggaaactggcgtgtcagaactgtcgtcgtagaagaagaaaatgtaacatggagaagccttgcgcaaactgtatcaagttcggtaccgattgtgtatttgctcaacaagacttgagaaacaaaagatactccacgacgtatgtcgaggccttacagagccaaattagcactctaaaagagcagttacaaatgctaaagtcttcaactcccactatagccaacgactccctgtctccactgaaagatgacgacgacggcgacggcgacggcgacgatgacggtgatgatatctccaatgagaaaattttaaagtatggtcaatcaccttcaccagcattaacgtcctctgagagcaccggcgaaaacgaatccgatacgtttaccaagaaactgccctcagaaagtcctccacccgtcggtacaaacagtatatatccatcaaattcactgtccataacaaagaaaaagacagatggcacgaggtaccagcaacaacaggtcagcttgaaaaatttatcaagaagcccgctcatcttgaggtcattatcgctgtttttcaagtggttgtacccaggtcactaccttttcattcatagggaaactttcctaagtgcttttttcggtgatacaaacacaaagagttattattgctctgaagaattggtatttgccattgctgcgttggggtctttaatctcttacaaatcggaaactgaacttttccaacaatctgaagtattttatcaaagagccaagacaatagtattgaaaaaaatttttcaactcgaagattcttcgttagctgaatcctcatcttcttccaaattggcaatcatccaaactctactatgtttggcgttctacgacattggaggcggtgaaaaccccatggcttggtatctttctgggctagcatttaggattgctcatgaaatcggcctgcatttgaatccagaagcatggagcaatgtttatgaggatgaattatcaataatggattttgaagtgagaagtagaatatattggggctgttacatcgcagatcatttgatagccattttatttggaagatcaacttctctacgtttgtccaattctactgttccagaaacagatgaattgcctgaaatcgagactggtatcgaagagtatatatatgatccaaaagttatattgtctacagcaaaccctttgaaaaaactgattgtactgtcaagaataactgaaatttttgcatccaagattttcagtcccaacgaaactttacttcagagaagcgagtacttatctaaattcaacctcgaagtttacaattggagaagggatttaccaattgaactgcaatggaccaagagatcattaatgggaatgtctgatttcaatcccaccattgcttatgtttggtttcattactatatcgtattgatatcctataacaaacctttcatatacgaaatcgaacagagtagagaattagtggaaggatatgttgatgaattgtactacctcttgaaagtttggaaaaataagttcaagacttttgagaaagctacgatttacatgatttattctgcgattttagccatccaatgcatgaagtcgaacctgattaagaaggacagaaaacaagactttttgaacttcttagacgcacctacattgaactatgaactcgccagaaaattcattgaaaactccgaagacactttgcataattctgaaacaatggatttattgggtaccttatctcacggtaatgattttgcattagaatataattttgacttcaccttactgaatgaaattgatatgttaattggtgggaacaccaacgacggtgtcaccaaataa

SEQ ID NO: 1729 - DNA, 1185 bp, Saccharomyces pastorianus
atgtggactaacacttttaaatggtgcagcaagactgagaaggaaaccaccactgcagacgctaaggtttgtgccaatgtgcatggcttgaaggtgctgcaacagcagatcatggacagcaccaacgtgaacgggtctgtgaacaacacgatgacccctggcgggatcaaccaatggcacttccacaacagtcgtgccagtaaggttaccacgcccacggtgctgatccatgggtacgccgcctcgtcgatggcgttttacaggacgtttgagaacctctccgacaacatcaaggacctgtatgctatcgatctgcccgctaacggtgcctcagaggcacctgctctcctggtggagaatgcgaagaagatcaagtcgcttaggttcaagcatatagaggacgacatggtgacccccgtgctggataaacgcccccccgccgaggagatcaagtcacacctggagcagtacgagaactacttcgtcgacagcatagagcagtggcggaaggacaataatctgcgcaagatcaacgtggtgggccattcctttggcgggtacatctcgttcaagtacgccctcaaatacccaaaatccatcgacaaactgtgcctcatatctcccctcggcgtagaaaacagcatacacgccatcacccacaagtgggacgccaacacaacctatccgatcacattgaccgacccgtcctcccgctactacaccagaaagctgaacgttcctcggttcatcttcgaaaaccaactgaacgttctgaagtggatggggcccataggctccaagctgtgctcgagttacatctccaccgcttacgtcaaggtgcccgaccaactgtacaaagactacctcttgcactcatttgtgggcaagaaccagagcgtgcagccacaaacgatcaaggtgttcacacaactgttcgaaaggaacctgattgcgcgagatccaatcataaacaacgtcggtcttttgaatccagcaacgcacgtcatgttcatgtacggcgaacacgactggatggataaatacgcaggctacctgactactgagtcgatgttgaaaaacaaggcaaaggctagctacatggaggttcctgatgctggtcacaacctatttctggacaaccctcaccacttcacctcttctttagtctccttcctatcgaaatag

SEQ ID NO: 1730 - DNA, 264 bp, Saccharomyces pastorianus
atggcggatatcgaggacacatcggttgtcctgcaaggccttggcacgatcagcagcctagagggtctggaggacgatgggtacctcagcgacgaggacacatcgctgagcaacgagctggcggatgcgcaacgccagtgggaggagtcgctgcaacagttgagcaagctgctcaactgggtgctgctgcccctgctgggcaagtacatgggcaggaggatggccaagacgctttggagccggttcatcgagcactttatataa

SEQ ID NO: 1731 - DNA, 1047 bp, Saccharomyces pastorianus
atgaacaggaaagtggcagtcgtgacggggacgaacagtaacctcggtcttaacatcgtgttccggcttatcgagaccgaagacgctaatgtcaggttgaccatcgtggtcacgtcgaggacgttgcctcgagtgaaagaggtcatcgagcagatcaaggacttctacaagaacaagtcaaagcgggttaatgacttggagatagatttcgactatctattggtggacttcaccaacatggtgagcgtcttgaacgcgtactacgacattaacaagaagtacgatgcgataaactacctctttgttaacgcagcacagggcatcttcgatggtatcgactgggtcggcgcggtgaaggaggtcatgaccagcccattagaggcagtgacgaatccgacgtacaagatccagctggtgggtgtcaagtccaaggatgacatgggtcttattttccaggccaatgtgtttggtccgtactacttcatcaccaagatcttgcctcagttgaccaagggcaaagcgtacattgtttgggtgtccagtatcatgtccgatcccaaatatctctcgttaaacgacatcgagctagtgaagacgaatgcgtcgtacgaagggtccaagcgattagttgacctgctgcatttggccacctacaaggacttgaaaaagctgggaataaaccagtacgtggttcagcccggtatcttcacaagtcagtccttttccaagtacctaaattttttcacctattttggcatgttgctcctgttctattttgccagatgggccggatctccatggcataacatcgacgggtataaagctgcaaatgcacccgtgtacgtgactaggttggccaaccccaatttcgaaaagcaggacatcaagtacggttctgccacttcatgggacggtatgccatacatcaagacccaggaaatagaccctaccaatatgtcagacgttttcgcttatctacagaagaaaaagttggaatgggacgagaaactgaaagaccaaatcacagaaactagaatccccatttaa

SEQ ID NO: 1732 - DNA, 801 bp, Saccharomyces pastorianus
atgaaccagaatggtgataaaagcgaaagtaaactgtttcaattaccatcattgccgccctggaggacaccaaggttcaacaaagtaaactttaacaacttcaccacaccgctaaggaaaagatcgacaagaataataagtaatgatccgatacccataacgaataaggtgttagaggagaaaagtgcggatgacgtgtatggaatggacatggatgaggatgaggttgatgacctcgatagtttgacccatatcgaagaagagaaagcatatgattacgcaccattttgcggccgtaatacattaagagaaagcaaaatcgataattttttgcgggctgaaagggcagcacattgtcttgtattccacaaacagggccatcttgatggtacagacacctatcgaccagatatcgatgtgatgtgcggtggtgaaaagcccgatgcgcatgagaacgacaacccagacgacagtgctgcaatgctgctggagagcatacctggatgtagtaaagaagacctgaggaagctatcgaggcgagagtttgtgacaagttcgaggccgaacatgagacggctggatgacataataaaccatgaaacaaacgcattgaaagatttttggaacgactcggatctggtcagttctttgcaaagtcaccatttacacgaagagtatctgctcttgcaagaagagttgaagaacgtttacaagatccaatgtcatgagagggttcccatagaaagtctgcgggataagtgcagaagacattataacaatgacgatagctcatttctttaa

SEQ ID NO: 1733 - DNA, 1974 bp, Saccharomyces pastorianus
atgtattatggaatcagccagtttagtgaggcctataacaagatcttaaggaattcatcatctcattcatcatgtcaattagtcattttcgtttcgtgtctgaacatcgatgcattatgtgcgacgaagatgctatcgctattattcaagaaacagctggttcaatctcagatagtaccgatcttcgggtattcggaattacgacgccattattcacagttggatgacaacataaacagtctgctactagtgggatttggaggcgttgttgatctagaatctttcctagggattgatcctgatgagtacgtaattgatacagatcaaaagcccggtgaaaaaagcttcagaagagacatttatgtattagatgctcacaggccgtggaatcttgataatatattcggatcgcagattatacagtgttttgatgacggtaccgtggatgacacattagctgaacaaaaagcagcctactacaagctattagagttggaaaatgaaagagagcaggatagcgatgatgggctttcagatgacgatgacgatgacgataatgatggcgaggatgagatgactgacgccgacgaggctactgacgaaggtgaagataaagaagaacaaaatggtagcacagcatctactaaaagaagtagttctgataaaaatccaaatgctcttccaaagaaaaagcaacgaaaaaagcaaatccatgaatctgaaggtgtgctagaggaatattattcgcagggcaccacggtggttaattcaatatctgcacaaatatattcgttattgtctgctatcggtgaaacgaacctatcgaacttgtggttgaatatattgggtgccacctcattagacaccgcttatgctcaagtctacaatcgactatatccattattacaggacgaagtaaaacgtttaacaccaagcaatagaaattcagtaaagactccggacacattgtcattgaacatccaacctgactactatctttttttattaaggcattcttcgttatatgatagtttctattattccaattatgttaatgctaaactttctctatggaatgagaatgggaagaagaggttgcataaaatgtttgccagaatgggcataccattaagcacggcacaggagacttggctttatatggaccattccatcaagagggaactcgggctgatatttgacaaaaatctagaccgttatgggttacaggatattattagagatggatttgtcagaaccctgggatatcgtgggtccataagtgccagcgagttcgtagaggctctaacagccctgttggaagtaggtaatacaagcgataaagacgacgtaaagataaatgataataatggagaagacactgatggagaagacgatgatggtgataatgtcgaaaaattgaataatctaaggaagaaatgggtctcgaatttctggttaagttgggatgctttagacgatagaaaagtagaactactaaatcggggtattcgattggcacaagatttacaaaaggcaatttttaacaccggtgttgccatactagagaaaaaattaataaagcatctaaggatttatagattatgtgtcttgcaagatggaccagatctggacttgtacagaaacccgttaacgttgttgagactaggaaattggctcatagaatgttgcgctgaatctgaagacaagcaattattacccatggtgcttgccagtatggatgaaagtacagatacgtacttggtggcggggctaacacctaggtatccccgtgggctggacacgatacagacaaaaaaaccaatcttgaataattttagtatggcgtttcaacaaataacggcagagacggatgcaaaagttagaatagataattttgaaagttctataatagaaattcgtcgagaggatctgtcgccattcttggagaaattgaccttgagtgggttattataa

SEQ ID NO: 1734 - DNA, 1134 bp, Saccharomyces pastorianus
atgtccaaagggagggttaaccagaagcgttacaagtatcctcttccgattcatcctgtagatgacctgccagacctgatccttcataatcccatttcttggatatattggacgtatcgatttttcaaaagtacaaatgcattaaataaaaaaatccatgtagactttattggagatacaacccttcatataatagtccaagatgacgaacagatgctatatctctgggataatggattcttcggtactggccagttttccagaagtgaacccacctggagaggtagaacggaagttaaactaggtctgaatgatgatccacgccaaattcaaagtggaaccaagaatgatgctgaaaatcagctaactttagaaaaaatcacacagcaaagaaggcagcaaaggtccgagttcaaaaaagaacgtgcaaggttagagaaagaacttctagcattgaggaagaagggtggccaaattgacggggagactattcttctagagaagcaaagagaatcgttaagaaaatttaagctcaaacaaacagaaggcacgaagacagtcgcacagcctcaagacgtttacgaattcaatccaagaaacgaagacaacgatcttctcgatgaaaatggtgaacttaagcaattagaatcattagaactcatgccggtggaggccttgtttttaacctttgcactgcctgttctagaaatatctcctgctaacctggcggggaaactatttcaacccggcgctaaatatgaggatatacattctttcgttcgatcctacgtgatatatcaccattacaggtcgcatggctggtgcgtacgatctggaataaaatttggttgcgattatttattgtacaaaaggggaccaccatttcaacacgcagaattctgtgtcatgggccttgaccatgacgcctcaaaggactatacatggtattccagtatagcacgtgttgtgggcggtgcaaagaagacttttgtactctgctacgtagaaaggctcatcccagaaaaagaggcgatagcactatggaaatcacataaatttactaagctgtttaatagttatcaagtcggtgaagtgctatataggaggtgggtccctggaagaaatagagactaa

SEQ ID NO: 1735 - DNA, 1455 bp, Saccharomyces pastorianus
atggctgatcaacagagcaaggttgtggttcatgcagagcatacacccgggatatgtgaactcttacccataaacgagcttttcaagatcaaggtcggtcagaaggtatttgaggtctcaggcgtcgtgttgaattcggatggccccaacttctttaccaagttttttacccagcatgacaaagacgttgttctgtttgtcgatagatcggaggatgtgttcatcccgatctacaggcatttacaaggttatttcgccgatgttaaagacgaagtggagtatcgcgttcttctcacggatgcgttgtacttccagttgccaaagttgatcgaactcctcaaggagagtgaatactactttaccaacgtgggcggtgtctccttcagggtgcccaaatcgttattccatcaggaaggcaacaggcaaaactacttcgaaatattatcccgctcattttacaaggagattgagaagcgggtgctggatgagcggttggttttctttctacatccacccacgtatgttcccaggtccgcagaattctttcaagatctgctgtctttgttaagcggcgccgaattagaactctccgaaaagaaaacagaatccttgatcaaagagtgtcgctattatcggttcagcaggttagagcaagaactagtgaaggcgaagactatctataaccccctaaccaacggccaagaaatatgcatagctctgaacaatgttttcaaaaacaacgtcacgatcaaagaattatcgtcgccctgtgctctaaaccagtcaccagctgcaaatagctgtctcagccaagttacagggcgaaattccgtcaccgcaaatgaaatcgaatcaagtgaaaatgatgactccgagccaccaaccaagagggcaaaaccgtctgcagaaaaaaacgaaagacaatggaatatgatcaagtaccgaaggccttatatcgacacggtttcatatgatcttatatttcaactgggttctaatcagtgtaagataatattcaacaaaaaggataagacagtccatgtagacctatccaaagaggctgcggaactatttgaaaggcaattttcagatgtcctgttgaaaactcccagcggtagaatcgatctgtccgaatacaaagtcaaactccgtaaaggtaaaaaccaacccgagtcacatctgataatccccgcatgcgtctccatctgtgatttggcggttaacggtacgaaatgcgccaatatcttttcattagtaaatgattccaaatgtaaagaaagagttttggattgtaccaacttgaagaatttgaactgtacacacggtttgaagctacatttatccaaatcgatgtggaaattgggcacaaataatgggaaattcattttaattgctgtaaaggcagaaactttttcggggacgaaggaatattgcaagatgattaattttctgtaa

SEQ ID NO: 1736 - DNA, 531 bp, Saccharomyces pastorianus
atgtccaacttagttaacaaacaattcccatccggtgactacaaattccaatacattgccatcagccaaagtgatgctgacagcgaagcttgtaagatgccacaaaccgttgaatggtccaagttgatttctgaaaacaagaaggtcatcatcactggtgctccagctgctttctctccaacctgtaccgtcagccacatcccaggttacattaactacttggacgaattggttaaggaaaaagaagtcgaccaagtcattgtcgtcaccgttgacaacccatttgccaaccaagcctgggccaagagcttaggtgtcaaggacactacacacatcaagttcgcttccgacccaggttgtgctttcaccaagtccattggtttcgaattggctgtcggtgacaatgttttctggagtggtagatgggccatcgttgtcgaaaacggtgtcgtcacctacgccgccaaggaatctaacccaggttccgaagttaccgtttcctctgttgaaagtgtcttggctcatttatag

SEQ ID NO: 1737 - DNA, 1713 bp, Saccharomyces pastorianus
atgagactggcaactataagatctgcgctacttccgtcgctctttgcatcgcaggcactggccaagatcataccggtggcggacaaccgcgacgacggtgacgacacgggctccaagtacgtgaagctctccttcgataagctttacggggattcgctggaaaatgctggcagcgataaaaccctagaagttcggctactcaagagagacgatggctacgaggaaattataataacgaaccagaaaagtttctactcggtggaactggaggtggggacaccagcccagaatatcacagttctagtggacacgggttcttccgatctatggatcatgggttctagcaacccgtactgttcgtcaagcagcggcggtttgcttgatggtatcaacccatttggctggcttacagaaacaggaagcgccacagccacgggctctgcaggaggatccggaggaggttctggaggaggtggcggaggaagcactggaggaggtggtggaggaggctttgcaacggcaactcaatcagtacccgcttcagaagccaccatggactgtaaggagtacgggacttttaccacttcggattcctccacgtttaaatcaaacaactctgatttcgaaatcagttacggagacggcacttttgcctctggtgtttttggtactgacgttttgaatttgagcgacctgaacgtcactgggttgtcgtttgcagttgctaataaaacaaactcgtcaatgggtgtgttgggtatcggtttgcctgcattggaagtcacctattccggctcttccgcttctactggcgggaaatcgtataaatatgacaatttccccatcgtattaaaaaattctggcgctatcaaatccaactcctactctttgtatttgaacgatctcgatgctaaacatggcaccattttgttcggaggtgttgaccataataagtattccggcactctgtacaccgttcccctggtaaacactttgagagggtttagctcccccatccaatttgaagttactttaaatggtcttgggacccttgaatccaacggtgacgaaaaaactttaactaccaccaaaataccggccttgttggattccggtaccactttaacctatttgcccgaggaaatggtagatctgatcgcggaagaagtaggggcccaatactcttccagagtaggatattatgtaatgaaatgcccatcgtctaataatagcactcaaatcgtgttcgattttggtggctttcacatcaatgccgcgctgtctagttttatcttgagcacaacgggcagtacgtgtattttgggtattcttccaacaggtgatagtagttctatccttggtgattcatttttgactaacgcatacgtggtttatgatttagacaatctagaagtttccatggcacaggccaaatacaatgtcacaagtgaggatatcgacatcatttcaacttctgttccaaatgccgttaaggcgccaggctacacaaatacttggtccacaagtgcatctatcgttactggcggtaacatatttaccatagattcttcagcaactgcttcgtacagtggtaacgtgacatcaagtactgcatccgccacttctactacatccagtaaaaggaacggtggtgatcgtactgtgccatctctacttttcacgctgatctctcttatttctgcattcatttga

SEQ ID NO: 1738 - DNA, 756 bp, Saccharomyces pastorianus
atgacagtgagaaaaatagctattctttatacagatgaagacagtgagtggactaaaccatggggaaattttgttgatatggcaatcgagctgttagaggaaaccaagaaattggagtgtgttgaacaagatgttgaatacgaggtctttcatgtccagaagggcaagttcccccgattgtcggaacttcaaaaagatgaatgtttggggatttacattaccggttccaaatatgattcatttgataacgaaatcgggtggattatagagctaagaaagtttttaaacgacatgttaactagcgactttgaacatccacccgtagcaggagtttgttttggccatcaggtaattgcggctgccctaggcagttcagtgggtcggaacccaaaagggtttgaaggaggcgttgtaccgcttaaactaaattcagtgggccaaaaattatttggagctgaaacattaaatctttccgaggtgcatagcgactgtgttttcgatgtcccagaggggtaccaaaattgggcatcgagtaacaaatgtggaaaccaagggctttatcggaaaaataaagtgctaacgtttcaaggacatcctgaatttaacagtggtgttgctcagaaaggactgttgaagtcccgagacaaggtgaaccttgaagagtttgaaaaatacgaaaggcagtgccgagaattgaataatgacggtgtaagagctgccagaagtatttggagattgttcttgcagggtgtgtga

SEQ ID NO: 1739 - DNA, 2565 bp, Saccharomyces pastorianus
atgacatatcaaatcactccgactcgagatttgcaaattattacagacgagctacaaaccctttcctcatacatcttccacacaaatatcactgatgatctgaactctctgctagtatggatgagccctgatgatcccaagagtaaccatcaactacgacccccaagccttcgtataaagaatattatcaagaacctgttccccaataacgcatctacttctccctatggtgtcatgaatagcgctcaagcgaacaattcaatcgtcaacgaagggaatacgaataaagagctgcaattacagtttatatcgacattcaaagagtactacgttttccagattcggtatcattttttttcacattttagtagtatcaattacctaaaagatattcagagatgggaaaattactatgagtttcccttacgctatgtttccatttttgattcgagtgttaacggttggtccctcgaacttaactccttaagacattatttgttgaatagaaataaaacgttcaagaccaatttaagaacaagattgaataaattaattatggatgatgactttgacttggcaagcaatttaattcgatggctcaactcagcaaatggatctttatcttccatgggattgattgtaaatgctctttttgataaaatcagtacgttttgcgaaatcaacatgagcgggatttggaataaacggtttatgatcatggaaaccttcaataaatttatcaaccaatattggtctcaattttcagaattgatcggttgccctgaagatgatcatgagctgacgaccactgtgttcaattgttttgagtcgaattttctcaggataagaacaaaagaaatcttcgatatatgtgtattagcttatcctgactcaaagatcacgctattggaattgaagaaaataatgaaagatttcaaagattacacaaatatcgtgacaacctttttgtcggatttcaaaaaacacattttaaaccccagtattactacagtagatgcgttgttaagttatgtaaaaactatcaaggcttttttggttttagacccaacaggaagatgtctacactcaataaccacatttgtcaaaccttatttccaggagcgaaagcacttagtaaatgtattattgtatgcaatactggatttgcctgaagaggaattaaaggagaagatttcgtttaaagtggatatgaaggcattactcttacttgtagaaactttacatgattccgatattgaccaaagtacaaatacacccaaaagcaaagacaagaataaagtaggttcatttccatggaatctccacgttaaaggaaagaaggaaaagaatgggagttcttcagtaaatcagagcatgctatacgagcacatccttaaccattatttaacgtgggtcccagaacctaacgatatgattccaggtaacattaaatcaagctcaataaaaacaaatctttttgaggtacttttagacctattcgaatcccgagaattctttatatcagaattcagaaatctcttaactgatagattattcacgttgaaattctataaattagataataaatggtcacgatgtttgaagttaattagggaaaagatcgttaaatcagcagaaacaaatcaagctaactatattgcaaatgggataattggactaccgcaaacaacggcgcctgcagcagatgcagatctgtcgaatatcaacagcatcgatgtcatgttatgggatatcaaatgtagcgaagagctgtgcctcaaaatgcatgaagtggctggcttaaacctagcgatttttccaaagtttatttctctgctttactggaagcataatggggatacgaataataccaatgagttgacatttaatctaccagcaagtttagagaatgaactacaaaaatattctgatatatactcacaattgaaacctggaaggaaactgcaactatgcaaggaccaagggaaaatagaaatggatttgaatttcaatgacggaaggaaattagtgctggatgtatctttggaacaatttagtgtaataaaccaatttaactctacaaatgatgaaccagtctacttgtcattagagcagttgtccgaatctctgaatattgcaccaacaagactgcttgatctcttaaacttttggattcaaagaggtgtcctttctgaagagaatgaagtttattctgttattgaatatagccacactgattttaaccaaacacaagtagagcttcctataaagaatgaaaacaataataatgagctacgtgacgagtctgaagtagagaaaaaatgtgaactaacgttggaaagaagtttaccattcatagagggaatgctagccaacttgggtgctatgaaacttaacaagatacactcgtttttaaagattacggtgccaaagaattggggatatcaccggattactcctttacaattagagaagtatctaaacgttctagcggatgaaggtaagttgaaatacattaccaacggttcatatgagcttgagaaaaatgggcacaaaaactcttag

SEQ ID NO: 1740 - DNA, 2832 bp, Saccharomyces pastorianus
atggtcaagtcataccagcgttttgagcaagccgctgctttcggtgtgatagcgtcgaatgcaaactgtgtttggatacctgcttcatctagaactaataatggtagtgggccagggcaattgatcacaagtgctctcgaaaatgttaacgtatgggacatcaagacaggagatttggtcactatcttgtccgatggcttgcctccaggtgcctctgatgcaaagggctccaagccagcagagtgtacgtatttggaagtacatcaagacactaatctgttagttgtcggttatgcagatggtgttattaaggtttgggatttggtatccaagacagtgctcttaaactttaacggtcacaaggcggctataacattattgcaatttgatatcaccggtacaaggttgatttccggttccaaggactccaatatcattgtatgggaccttgttggtgaagttggtctttataagctaaggtcacataaggatgccattactggattttggtgccaaggagaagactggttagtcagtacgtcaaaggatgggttgattaaaatatgggatctgaaaacacaacagtgtatagagacacatattgcgcatactggagagtgctggggccttgcggtaaaagacgacttattgattacaaccagtacggatagtcaagtcaagatttggaaattgaacatggagaatgacaaaatgggcgaaaagctaactgaaatgggcatttttgaaaagcaaagtaaacaacgtgggttaaagatcgaattcataacgaacgcatccgatggagtctcgttcttttacatccaaaacgcagacaaaactattgaaacctatagaatcagaaaagaggaggaaatagcaagaggtttaaagaaaagagaaaagagattaaaagaaaagggtttaacagatgaggaaattgcaaaatctatcaaagattcttactcttcactcattttacaccctttccaaactgtaagatcactgtataaaataaaatctgcatcatggacaacagttacaagctccaaattggaattggtcgtaaccacatcgaataataccatagaatactactctattccatacgaaaaaagagatccaacaagccctgcacctctcaagacgcatactattgaattgcaaggtcaaagaacagatgttcgtagtattgacgttagtgatgataacaggttgttagccaccgcatccaacggtttattaaagatttggaatgttaaaacacataagtgtatcagaactttcgaatgtggatacgcactaacctgtaagtttttaccaggtgggttactggtcatcctgggaacaagaagcggtgaattacagctcttcgatctagcatcatcaagtctcttagataccgttgaggatgcacatgaagctgctatttggtctttagatttgacttctgatggtaaaagactagtcaccggttccgcagataagactgtcaaattctgggatttccaagttgaaaaaaccttagtaccaggtactaaggacaaatttgtacccatgttgaaactaaaccacgacacaactttggaattgaatgacgatattctaagtgtacggatctcccccgatgacagatatttggccatttcattattagacaacaccgttaaggtatttttcttagactcaatgaaattttatctaagtttatatgggcataaattgcctgtactgtctattgatatttcatttgattcgaagatgattatcacatcttcagcggacaaaaacatcaaaatttgggggttagattttggtgactgtcacaaatctttatttgctcatcaagattcgattatgagtgtaaaatttttaccagagtctcacaatttcttcagttgctctaaagatgcagtggtgaaatattgggatggtgaaaaatttgaatgtatccaaaaactatacgcacatcaaagtgaagtctgggcactagcggtttctactgatggtagttatgttgtctcctcatctcacgaccacagtataagaatttgggaagaaaccgaagaccaagtgtttttagaggaagaaaaagagaaagaacttgaagaacaatatgaagatacattgctaacatctttagaagaaggtaatggtgatgatgcatttaaaggtgacgcaactggtgaaattgtcgaagatgaagcatctggtgttcataaacaaactctggagtcattaaaagctggtgaaagattcatggaagcactagatttaggtatcgctgaaattgaaggcatggaaatgtataacaaggacatgaagttgtggcaacgcaagaagttgggtgaagcgccaatgaaaccacaaggtaattctgtcttgattgctgtaaaaaagacgcctgaacaatatatcatggatacattatcgaggataagggcgtcccagctagaagacgcgttgatggtgatgcccttctcgtacgtcttaaaatttttgagatttactgatgccgtcatgaaaaataaaactttgttgcataatcacctacctttaatttgtaagaatttatttttcattatcaaattcaatcacaaagaattgatttctcaaaaaaatgaagaactgaaattgcaaataaatagagtgaagaccgaattgagaaacgcattaaaatctaccgaggatgatttagggtttaatgttcaaggcctgaaatttatcagacaacagtggaatctaaagcataactacgaatttgccgatgaatatgatcaacaagaaaaggataattctggcgcaaggaagagagtttttgaaagagtaatataa

SEQ ID NO: 1741 - DNA, 1263 bp, Saccharomyces pastorianus
atgatcgatctactgataagggatgactctacagatagctgccaggcatccaatgactacaatgggcacagtggtctccgaatactggcggtattcatcatattgatttcgtcaggactgggagtgtatttcccaatcttgtcatcgcgatattcgttcataagactaccggactgttgtttcttcatagcgaaattcttcggctctggtgtcattgtggccacggcattcattcaccttttacaacctgcagctgaggccctgggaaatgaatgtctcggcggtacgtttgccgaatatccatgggcttttggaatctgcttaatttcgcttttcttactctttttcactgaaataattacacattattttgtagcaaagacgctcggccatgatcatggagatcatggggaagtcactgctattgatgtaagggttcccagctctgaatataccatcagaaattcgaactcggatactgcatctttcaacaatgaagcggtttactctattcataacaacaaaaactcatacacaaccaaaaacgaagaacttgtcgctacttctgtaaaagaaaaggaaccagatatgttgaaatatgatctggaagtcggaaatacagagtcaattgcgaatgaaatagttccatcgagctcgcgtatgacaaatttcgcatctgtaccggggaaggatcactattctcatgaaaatgatcatcaagatgcttcccagttgggaacacaaatcgaggaggaagataaggagcaatacataaatcagatgctggcagttttcatccttgaattcggtatcatcttccactctgtgttcgtgggtctttccctatctgtcgctggtgaagaatttgagactttatttattgttttaactttccatcaaatgtttgaaggtttgggtcttggaacaagggtcgctgagacaaactggcctgacagcaaaagatatacaccttggctaatgggactagccttcactctgacgtcacccatagcagtcgcaataggcattggtgttagacactcttggatccctggttctagaagagcattgattgccaacggtattttcgattcgatatcgtcggggatcttaatttatactgggttggtcgaactaatggctcatgaatttctatattcgaaccagttcaaagggcccgatggcctaaaaaagatgcttagcgcctatttcatcatgtgttgcggcgctgccttgatggcactattagggaagtgggcataa

SEQ ID NO: 1742 - DNA, 1749 bp, Saccharomyces pastorianus
atggtttcagaatcgcgtcgagggagtgtaaaaagttattcggtcggctatcaagcaaggtctagatcgagttcccagaggagaccttcattgacacgtcaacgctcttctcaaaggttgattaggactattagcatcgggtccgatgttactaatgttactgacgatgatgatttgaaggctgtcaatgaaggagttgcagaccttgaattagatatttcagaaactacaaataagggacaaaggattacatcagcaacagacgccgcagacaatttgggctcggttccatcagaatgtattgagataccttttgtcgaggaaacactggatgcaagtttaccgttggattatttaaagcaagacatattaaatctcgttcagagcttgaaaatatcaaaatggtataacaacaagaaaattcaaccattggctcaggatataaacttaacaaagatgtccggtgcaatgaccaatgcaatcttcaaagttgaatatcctaatttgccgtcgctactattgaggatttacggtcccaacatcgataacatcattgatagagaatatgagttgcagatcctagctagactttcgttgaggaacataggtccgtcactttttggctgttttataaacggtagatttgaacagtttctagaaaactcgaagaccttgacgaaggatgacatcagaaattggaaaagctctcaaagaattgcaagaagaatgaaggagttgcacgtaggtgtacctcttctgagttcagaaagaaagaacggctctgcctgttggcaaaagattaaccaatggctgcgcacaatcgaaaatgtccaacaatgggtgggagaccccaaaaatcttgacaagtctctattgtgcgaggactggtccaagttcaaagatattattcaaagataccacaaatggttggtcgtacaagaacatggcatggaccgagtcaacaagaatttggtgttttgccacaatgatgcgcaatacggtaatttgctttttaccgcacctgtgatggacacatcaaatctgcactcggcgccttcctccacgtcactctcgtcacattcgagttcattgttcccttcagattctaatgtcatcgtggatgatattatcaacccgccaaagcaggaacaaagccaagattctaaactggtcgtcattgattttgaatatgcaggcgcaaacccagccgcatacgatctagcaaatcatctctctgagtggatgtatgattacaataatgcagaggctccgcacaactgccattctgataaatatcccgataaggagcaagtcctaaacttcttgtactcttatgtctcccatttaaggggcggagctaaggagcccattgatgaggaagttcaaaggctctacaactcaatcctgcaatggagacccacggtccaattgttttggtcgctctgggccatcctacaaagcggtgagttggaagaggaagagcctcacactgtcaccgccaaagaagaaactggccccaatggaaacaaatacatcatcaagacggatcccagccctgtggaagaggatctcgtggataacgaagatcagccagaggctggtgtcagcatcgacacgttcgattatatggcttatggccgcgacaagattgcggtcttttggggtgacctcattggtctgggcataatcaccaaggaagaatgcgaaaaatttagctctttcaaattcctagatactagctatttgtaa

SEQ ID NO: 1743 - DNA, 1692 bp, Saccharomyces pastorianus
atgtctgaaattactttaggtaaatatttattcgaaagattgagccaagtcgactgtaacaccgtcttcggtttgccaggtgactttaacttgtcccttttggataagctttacgaagtcgaaggtatgagatgggctggtaacgccaacgaactgaacgctgcttacgctgctgacggttacgcccgtattaagggtatgtcctgtatcatcaccactttcggtgtcggtgaattgtctgctttgaacggtattgccggttcttacgctgaacatgtcggtgttttgcacgtcgttggtgttccatccatttcttcccaagctaagcaattgttgttgcatcacaccttgggtaacggtgacttcactgttttccacagaatgtctgccaacatttctgaaaccactgccatgatcactgacattgctaacgctccagctgaaattgacagatgtatcagaaccactttcaccactcaaagaccagtctacttgggtctaccagctaacttggtcgacttgaacgtcccagctaagttgttggaaactccaattgacatggctttgaagccaaacgacgctgaagctgaagctgaagttgtcagaactgttattgaaatgatccaagacgccaagaacccagttatcttggctgatgcttgtgcttctagacatgacgtcaaggccgaaaccaagaagttgattgacttgactcaattcccaaccttcgtcaccccaatgggtaagggttccattgacgaacaacacccaagatacggtggtgtttacgtcggtaccttgtctaagccagaagtcaagaaggctgtcgaatctgctgatttgattttgtctgtcggtgctttgttgtctgatttcaacactggttctttctcttactcttacagaactaagaacgtcgttgaattccactccgatcacatcaagattagaaacgccactttcccaggtgtccaaatgaaatttgctttgcaaaaattgttgactgctatcccagcagttgtcaaggactacaagcctgttgctgttccagctaaaactccagctaacaaagcccttccagctagtactccaatgaagcaagaatggatgtggaaccaattgtccaacttcttacaagaaggtgatattgttattgctgaaaccggtacttctgctttcggtatcaaccaaaccactttcccaacagacgtttatgctattgttcaagtcttatggggttccattggtttcactgtcggtgctcttttgggtgctaccatggccgctgaagaacttgatccaaagaagagagtcatcttattcattggtgacggttctctacaattgactgtccaagaaatctccaccatgatcagatggggtttgaagccatacattttcgtcttgaacaacaacggttacaccattgaaaagttgattcacggtcctcacgctgaatataatgaagttcaaccttgggaccacttggctttgttgccaactttcggtgctaaggactacgaaacccacagagtcgttacaaccggtgaatgggacaagttgactcaagacaaggaattccaagataactctagaatcagaatgattgaagttatgttgcctgtcttcgatgctccacaaaacttggttaaacaagctcaattgaccgccgctacaaacgctaagcaataa

SEQ ID NO: 1744 - DNA, 870 bp, Saccharomyces pastorianus
atgtgggccccattagcgcataccagaccggaatctcaaaagaccgacttaacgtcattgttctcgaccgatcgcgagcagaacccattgaacgactaccaataccagatcaacatcagggaactggaggattactacaacaaaaccatcttgaatgaagacaccatacaggagacaagcagcgagatatcttctgcggtctcgttctccccctccaaacagaaaaacgctattcagccaggacttctgtacgacccacaattgataaaccctttcctcccatccgctagtctggacactagcacactgaccactttcaaaaagaagctggaggtacagatcaacccagattacgtccccaaatcttcacaattgccattgactttgcaaaatttgcagcagttgtcccagcaaagccccgaagacgatgctccatcttctccacaaaagatctctccctctcaacctaaggtgaaatgccaaccgcaggagaccccaaagcagctatacaagaccgaactatgtgaatcttttactttgaaggggacctgcccttacggcaccaaatgccaattcgcacatgggttgaacgagctgaaagtcaagaaatcatgcaaaaacttcagaacgaagccatgcatgaactgggaaaaactaggatactgcccctacggcagaagatgctgcttcaaacacggcgacgacaacgacattgctgtttacgtaaaagctggtacttattgtaaccgcagtgccaacaacaaacagtctgaccaaaagagaagcaccagtcgcggcgatgatcgtaattatgcaaagaagaaaaacctcaacgttaaagtgaaagctttgcaaagaatgacttggtga

SEQ ID NO: 1745 - DNA, 2973 bp, Saccharomyces pastorianus
atggctgtctgggaacaactagaagtctcaaaagcacatgtcgcttacgcctgcattggtgtattctcgtcagtcttctccttattctcgctttacgtgaaggagaagctgtatatcggtgaatccactgtggcagggatatttggccttatcgtgggtcccgtttgtctgaactggtttaatcctttggactgggggaactcggacaagatcacgttagaaataacaagaatagttttatgtttgcagattttcgccgttgccgtggagctgccacggaagtatatgctgaaacattgggtatccgtcacgatgctattgcttcccgtgatgacagcaggctggcttattataggcctctttgtctggattcttataccggggttgaacttttctgccagtctgttgatttcagcgtgtgttaccgccacagatccaattttggcgcaatcggttgtttctggtaagtttgcacaaagagtccctggccatttgagaaacctgctgtctgcagaatcaggttgtaatgatggtatggcattcccctttatattcctttcactgaatttgatcctgcatcctggcaatggaagggagatcgtcaaagattggttttgtgttaccatcctgtacgagtgtctattcggatgcctgttaggttgtttcattggttatgccggcagaatcactatccggtttgcagaaaagaaaaacattatcgatcgtgagtccttcttagcgttttacgttgtcctggcattcatgtgcgcagggttcggctccatcctagatgtggatgacctattagtgtcgtttgcagccggtgcggcttttgcatgggatggatggttttcccaaaagacgcaagagagtaacgtttctacggtgattgacttactattaaactatgcatactttatttatttcggtgccattattccatggagtcagtttaacaatgggttgattggtgcaaacgtttggcgtttgatcattctgtccgtagtggtcatttttctacgtagaattccggctgttatgatactaagaccacttattcctgatattaaatcgtggcgtgaagcacttttcgtgggccatttcggtcctattggtgttggtgcgattttcgccgctatattagctcgtggcgagttagaagctaccattaccgatgaacccactccattgaacgtagtaccgacaaaagaagaatccaaacattggcaattaatagcttgcatatggcccattacgtgttttttcattgttacttccattattgtccacggatcttcagttgccattataactctaggtcgtcatttgaacacaattacgttgaccaaaacatttaccacacataccactaatggtgaaaatgggaaaagttcatggatgcagagattaccttcattggataaagccggacgttccttttcactgcatcgtatggatacgcaaatgacactttcaggagatgaagaagaagaagatgatggagaccgtaaaggactcacaggaggcgaagatgaagaagggttaaacaatgatcagatcagcggcgtcgaaacaagcggagttccttccagacctattggcggtatgccgagaagaagaaaacgttcaatgagagagaagagactaagtcggggacaaaaactaaggaataaaggtagagaattgttttcatcaaaatctaaaaatgaaatgtatgatgacgatgagttaaacgatttgggcagagaaagactacaaaaggaaaaggaagcacgcgccgccacatttgcattaagtacagctgttaacacacaacataataaagatattggaatgggtggagaagaggaagaagacgagtatacaccagaaaacgaatacagtgacacttgcaattataatgataaagatatcacaccaagttatgaatcttctctaggatctccgtctctgagagaacaaagaagatacgtaccgagaaaccgttatgatgaagaaggagtagaaagtgaaattgagagccaagatgagacggaagacgaaagtgaaagatctatggccagcagcgaagaaaggagaatacggaaaatgaaagaagaagaaatgaaacccggcacggcttatttggatggtaatagaatgatcattgagaataaacaaggtgaaattctgaaccaagtagacatagaagatggcaacaagccgaaagatgaagaagccagtattggaagtactgcccattcaagcttaaccaccacaatgaccaatggatctagtaatagtgggggaaggttaaggagaatattgacgcccacatctctgggaaagatacactcactggtagataaggggaaagataagaacaaaaacaacaaatatcatgcattcaagatagacaatctgctaatcattgaaaatgaagacggtgacgttataaagagatacaagataaatccgcacacgactcgttataaggagaataagaaccgttcaaggaatgatagtgttgtatcaagagcactaactgccgtaggtttaaagagtaaagggaacagtggcgtgccgccgtcattaaatgaagagagcgctgtcgaggggtcttcaaagaagggacttgggatgttgaagaaaagaacattgacacccgcaccggtaggaggagtccaagcatcactaactttagaagatgcgacatcttctgaagaagacctgggtgacagttacgacgtggatgatagtgaagattacgacgataatgcatacgaatcagaaactgaatgcgaaagacaaagaaggctgaatgcgttgggtgagatggtggcaccagcggaccaagatgatgaagagttgccaccattacctgtggaagcacacggagggaacgatggttccggcggtgcggaaggcaagaaaaaacaaaagagtgctgctgttaagtccgctctatcgaagaaacttggtcttaataagtaa

SEQ ID NO: 1746 - DNA, 1920 bp, Saccharomyces pastorianus
atgtggaaattcaataggaagctagcccgtttaacctgccgtctctattcgaactcgggcgccagctcgcctgtttgcggtaaaaaaaaactgccccagaacttgaaattcgtcgttctgaaccctacccagtctggactggtcaagaatgaccagaagctggctaggcaccaaccctcgagcaggcgcgcttacaaagacaccggcaacgacgacaacgacgacttcggctcgaagctgctcgtcttcgagaagcagaactcgctggactccgcattgaactccatccgcttgaaaaaaccaaccaacaccagcttgtcctccctcgagtacaacgctcttctccagacgctcacgtcgagttacaaccgccaccagctgcgcgagttcatctcctctaaccacccggactcccctttgcatttgacacattggaagaaaagcaaactgtcacagtacatcattggaaacatctggaactgccacccagagtcaacaccgtccacgcccacgggaatcaagtccacgtcgttgaccttccagttcgacactccaagggagatcttccttttgctcatcacccaaaacggtaaaatcctcacaaacttcaataagctgggcttgaccttcatcatctccatccaggacaacgagttgaccgtcaagggctcgtccagtctgctcaaatatgtggagatttctcttaacaaaatatggtcaaatattacccaagaaacagtcgacatacacgcttccgccccgtcaaaagacctggtgaaccttattcagaaggaatctcacacttttttcgaatacctcccggagtcgccagcgtataagatctctgcactaagtcccaagaagatatccatggcgaaggcccttctgctgaacgcaatctcttccaacccgcacgcatcccaacaataccacacaatcgaatcggccccgccaaccaagctggcatcctacccattcaacaacactctggagaacttggactggctaaacaagtcccgagattggtcaagactgcagtcaaccgtccctagacccggcgcggatttgggaaccagcgccaccgctccacaagtgacagatgcgcaaattaaccaatacaatgctttcttgtccgcgaacgcgccctcttcccccactcccagctccatctctcagtgcctctcaatgacactaggctattccttacaatcgccggcgtctcccagcgtcttccagcctttggtacacaaaagctttatttcaaaactactaagcttatccaattttacagaatcgtcgtcgtcattgacgcccgcatctctggaccagcatctgatcacaaaccctcaccactcctttgtacagttgaattttactcctatgccgcccatctcgaacccatcgcccccttttttacaagtctggttcgaaaccgatgaattcgataatattgttactgcttcaatgagacctctcctgaaactgcaggaaaactctatcgttttacgaaccccacaatcccaaacagactacaaaatcacatccgactacatccaagatttgctgcccaattttgaccagacccacccggacgcttggttaagtgatcaaaaaggtctccaggaatttctcgtaaagtcccactggaaactaaacaagtaccaaaaccttatgaaaaaaatcacgatcgcagtgccgaatagccaagcacagcaatatcaattgaccgatatcttaacacatcgtgtcttgaatttgcaattccccgccggcagtgcccaggataaatacatcattcaatattctgatatcaaccgcggctttgtaaacaatggttcatacaggcagttggacttcattaatataaacccgaacgaaacttccttgaaaactttcattaatgacgttttgaacttctaa

SEQ ID NO: 1747 - DNA, 2061 bp, Saccharomyces pastorianus
atgaagtttctagcgctcatatcaggtgggaaggactcattctacaatatttttcactgtttgaaaaacgatcatgagttaattgcactaggaaatctatatccaaaggaatcggacaagcaagagttagattctttcatgttccaaactgtgggacacgatctcattgataactactccgaatgtattggtgttccattattcagacggcatatactatctaacagttctaaaaatgtggaactgaattattcagccactcaggatgatgaaatcgaagagctgtatcaactactgaaaactgtcaaagatcaactcccagatttagaagctgttagcgtaggcgccattctgtcatcttatcagagaaccagggtcgaaaatgtctgttccagattaggtcttgtagtgtttagttatttatggcaaagagatcaagctgaattgatgagtgaaatgtgtttcatgtccaaagacgttaacgatgttgaaagcgctactagttcgggaaataagtttgacgctaggatcatcaaagtggccgcaatcggattgaacgacaaacatctaggcatgtcgcttcctatcattcaaccacttttacataaactaaaccaactttatcaggtccatatttgtggggaaggtggagaatttgaaacgatggttttagatgcaccttttttcaaacatggatatctgaagcttactgatatggcgaaatctaatgacggtgatgtccataacgcaagattaaaagtggaatttcaaccacgtattttaagtgacgattttttacagactcaactggataagttacctgtacctccgattttgcatgatgactggctagaactatcccaagtactaaaacaaagacagacggaaacaagacaaagagagttaaaaaccctagcattagagaaagtaatgggaacgtcaaccaataaaatcaacgacaagctctacatctcaaacctaaaatcatgtacatccaaaacggtggaagaacaaagtaaagatatttttacagaactagctgagattttacgctccaatgggattccccgctctcatatattatcatcatccctacttgtcaaagatatgtctgattttggaaaaatcaataagatatacaatgagtttttggacgtgacgaaatacggtccattgcctccatcaagagcatgtgtaggctccagatgcttgcctgaaggttgccatgtccagctatcagtggtcattgatactgaagtaagaaaaaacagcggtgataatgttaaggaacacaagagcggcttgcatgtccaaggacgttcatattgggcgccgtgtaatattggaccgtattcgcaaggtatctggtcaagcgatgatgcaaaccaagtgtgttttattagtggacaaatcggacttatacctcaatctatggagctaatgcaacaggattctctccatcaaacagttctggctttacaacattttgacacactgtgtaaaacaataaacgcgcagagaaaattgtccatgacatgttatatttcagatgagtctatcattgacaatgcttgcgaagcctgggtgctttactgctgtcaaatgagtgatgaatcagacctatggatggataaaatggacgatgacaaagaatgtttaatcattgtaaagatttcggacttacctagaggtgctgttgccgaatggggtggtattacttgtaaggaattagttaaagaagaagaagacgaagttgatgatgacgaggaaacggacaacatctcacccaagattcaagagctaaacttagatactgatgacttacacaccatcacagtcaattcgcctggatctcataaacaattctctacagggtttgtagatgaaaaagagaagctattgcttgtcctaaaaaaaacctcaaaatcggctcaagtaactctctattataatccagacgatgacgttcctttttaccaacacgtagaatattatccggtagagagaatttttgactatcgtggtaatgagcatcgctttggcatacatgttcgttcatga

SEQ ID NO: 1748 - DNA, 606 bp, Saccharomyces pastorianus
atgtatgatatgaaggcagtaataagagccttagaacaagagtaccggttgatattgctgctgaaccacagaaataagaaccaacatagagtggccagttggtatggatcattcaacgagctaaaaagaaattgtgggcagatagtagagcttctgggattaacaagattaaaaacgacatgcatgagagatgacaagtgggtcaagttgcacagactattacagagggcgttgtttcggcagttgaagaggtggtactgggatttcaatagtattattgcactggggcaatttgtaacgctaggctgtgtactagtcgcattactagcaaacgtgagagccttatatatgaaaatatgggaactaagctatgatgagttcataaggtgtgaatgctttataaaaaaaataataaagggaaagaaagaatctgttatggacgacggagaggaacttggagaagctatcaatgaagatatccgcaacgttgtcagagaaagggagcatgtagagccaatacaggttgttgagccagagactgataaaaaaaagaagaaaaagaagaaaaagaagaacaaatcagccatcgacggcatatttggttga

SEQ ID NO: 1749 - DNA, 903 bp, Saccharomyces pastorianus
atggttaacagttcaagtcacccttgcatcaaggatggatggtttagagagataagcgacaaaagttttccaggccaggccttcactttggctgtcgactcgatactttatcaggctcagagtgaatttcaggacatcttaatctttagcaataaggtatatggtacggtgctagttctggatggcataattcaatgtacagagtttgatgagtttgcctaccaggagatgattacgcatgtcgccatgtttgcacattccaatccgaagcgtgtacttattattggtggtggtgatggaggtgtgctgagagaggtggccaagcacaagggcgtagaagagatcactatggtggagatcgattcttcagttattgagctatctcggaagttcctgcccacgttgagtaatggcgcttttgacgatgagaggttggatttgaaactttgcgatggcttcaaattcttagaagatataggtgaagctggcgctcaaaagaaattcgacgttattatcactgatagttcagaccctgacggtccggctgaagctttttttcaagaaaggtatttccaattgctacataatgctctaaaccctgatggtattgtcattatgcaaagctcggaaaacatttggttgaatctaaattacctgtgtgatttgaaaaacactgccaaaagagtgtttcctaacacagaatattgttataccatggttccaacgtatacctctggtcaactaggtttgattgtttgtagtaataatgacagtataccgttaattgccccacaaagatcgctttctggacgggagcaagaacagctaaagtactataatcctcaaatacattcgagttcatttgttttgcctacttgggccgataaagttatcaacaaataa

SEQ ID NO: 1750 - DNA, 2760 bp, Saccharomyces pastorianus
atgctgaaaacacgtatagaggaggtacagttacaattcctcatggggaatacagaactcacccatttgcaagtatccaatgaccagcttgtagtaaccacacagcgaacggtttacagaataaatctacaagacccagctatcgtcaataactttgaatgcccgttgaataaggaactagaatcgataatgaatgtacacatttctcccctgggtaccgccattttcattcgaaccaacttcggtagatatatgttgctaaaggacggcgaattcactcaatttaacaaaattaaaaaccttgatcttagttcattcttttggattgatgaaaccacctttcttatggggaccaagaaagtggccaagctgtaccgaatcgaatggactggcaaggactttacctcaaaactatggtacgacaacaagaaactgcccgggggtatcgatggtgtggcgtattggaaaggttctttattattaactattaaggacaatattttatattggaaagacataacgaaaatgaagcttcctttgctacaaccagatgaatctgagcaatttgagaggttgaagcatcacacaataaagaaatttgattcttataacgggttatttgcctgggtcacgtcaagtgggattgttttcggagatttaaaagataattttacggctaaagattctgcttcatctgataacgtggggaaattcttatcttcttcaaaagttcttctcaatttcgagttacctgactataacaacgataaagaccatctaattaaagatatagttttgactcccttccatattctacttttaagaaatgatacagttactatggtaagtcaattgaataatgacatcgtatttcatgaagctataccgagacaccgatttgcgagtgccactgctgatagtaatgaaaaattcctgggacttgtaagagattcggaaaaggaaacattttggtgtttttccaatagaaacgtttttgaaataataatcgagaatgagtctaactcaatatggaacttgttagtcagagataataaatttgacaaggctctgtctctaaagggcctgacgcccagagaaatggaagctatcaaattttcaaaggcaatgtatcttttccacactgctaaagattttcattcagctgccaacactttgggagttatcaaagatttatcacattttggggaaatcgcactgaattttctacaattaaaggattacaacgacttaaacatagtattgataaaacagctggaaaatgtgccttggaaatcaacacaagttgttttgtcaagttggattgtttggaatttcatgaagcaattaaacgatattgaactgaaaatgcacactaccaagactacgtctgtcgatgaagataacttgttgaattggaatttaatgctcaaagagaagtcaaatgaattgactaagtttttagagcgtcatttagaaacgcttgataatgaaaccgtttaccagataatgtctagacaaaataggcaaaatgaattattggtttttgctaagttgatcaacgacatgaaatttttgttgtcatattggattgatcaaggaaattggtatgaatccttaaaaattctgttgactataaacgataacgacctggtttataagtactctttgattcttttgttaaattcacctgaggcaacaatatcaacgtggatgaaacttagaaacttgaacccaaacaagtttgttccaacaattctaaagtatttcacaaactggcaaaatagcgccaaactcgttagtagctcatcggaatatccagaaaactactcattaacttacttgaaatggtgtgtcaaagaagttccaagaacatgcgatcctataatatacaattcaattctttacatgatgattacagacccgaaaaatgatgcaatattagaaaacgatatgataaaatttatgaggtcaaatgaaaataagtttgacctgaactttcaattacggctatcattaaagtacaaaaagaccaaagtttccatctttcttttaacacgcctaaaattattcgatgatgccattgatttagctttgaaaaatgatttgattgatgactgtaaaataattgtgaatgatgaaattcttatagaggattataaactcagaaaaaagttatggttgaaaatcgcaaaatatttattactttcaatgaaagacattgacattaaacaattgattaggacaattttaaatgattctaatgaagttttgacaatcaaagatctcttaccatttttcaacgaatatactacaattgctaacttgaaagaagaattaatcaagtttttagagaatcacaacatgaaaatgaacgagatctcagaagacatcataaactctaaaaacttgaaagtggagataaatactgaaatttccaaattcaatgagatttacagaattttagaaccaggcaaatcttgtgatgaatgtgggaagttcttacagataaaaaagttcatagtttttccctgtggtcattgtttccattggaactgtttgatcaggttgatattaacctcaaatgattataatttgagacagaagatagaaaaatttttaaaagccaagaacaagcataatctaaatgatttagagtctattattgtggaaaaatgtggattatgcagtgatattaacgtaaacaagatcgatcagccagtgcgcattgatgaagcagagttagcgaaatggaatgactga

SEQ ID NO: 1751 - DNA, 2196 bp, Saccharomyces pastorianus
atgaccattgatggtacggggcaatctaaggaggccttgcaagatgaacggttgaataccgggtctgataagatctatcagaactatatgatgcccgctttggagctttatgatgcaaaggtttctattaatcactggcaattacgagattgtatcaagccgagctccttgaaccagagcaaactgtattatatctacgaccattcgataagagtattagatacggactcttccaccttaaggcctttagtaaggcggcatcactctatccaaccgagtaacgccagtaagcactccatttcgaagacatccacaaagggtagtaaggcgacaggctcagtaatctcgaaaaatttgcacgtcccttccgaaaaactggtggaattcaactttaaaccaagatgttttaccgaattaaacgggttgactgtttgtggtgggctcattggctctgacgataaggggttcccttccaactggaaccgtttagctcaggatgcaaatacgtcactgcctccgccttctcaaccgattagcatttccaaaaatattagttttcctataaactcccactattcaaatcccaatatctggaaaggcattgtggaattttacaatgaagaaacagacactatgatgacattcactttgggccagttcattaacaattgtgttactcttcataacaaggccacgacacagttcgatctttttgcttgtaacaacgatgggcacctttatcaatgcgatgtaagcagtagggatgtaacattagtgaaacgctatgctgatttaaaatttcctttgaacaacgcttccttgtcgcacgatggccaaactatggtagtatctggtgattccaataaatttgctgtttacaaacagaatgaattaacaagccaattttccttacgttacgataataatccctcttggggcagttcctcccatcgcgtcagaagaataccgcggtttgctttgcctgatgaatcagaatgtattgaaaatgtatatgaagcgccaaactcagatcacgggttttataattgcttttcggagaacgatttacagtttgcaactgtattccaaaatggcacttgcttagtctatgatgtcagaaatatggctacccccatggcagaaattagttcaacaagaccgcattctcacaacggtgcatttagagtttgtaggtttagttatggcctagatgatttattattcgtctcggaacatcaaggtagagttcatgttgtagacaccagaaacttcgttaaccaccaagtcattgtaattcctgataaagtcaacatggaatacataaatgaacagagaaatagttcaaaccccagatttaatatgaacaacaataacgacaataatgataatgacaatagcaaacacgaatctcatttttctcaagggacagattaccgttccttagcaagaagaaggttctcattgccttctttgtcgaacatatcagaaccctggataacaatggcacaaagaatccctacaaaatatttagaaccacaaattttaccatttccaaaagttatggacaaaattagtaacgaatcaatcttattttcttcgccacgtaacccatcaaacgagacttctcatccaaacaagaggcgatgttcatttagaataagaagggtgtctacatcgggtccaattactgactcttctaatggccacgtaaatttgagcgcgcatactactgattcgactgcaacttcatcgtcaaattctgcatcccaaaatttgattgaccctttgattctttctcaccagcaagcacacaatgatgtttttgaagatgatgaatattatgaggcttataatgacgttcattcaacataccgtgtttcttcggactatcctggtctctcaccaagagcttttgaaagtttcctaagaccgccttcaactcctgacttaccgtcggatgatgacaattttgccacaaataatagaaataataggggaacatcaaattttttgagaagagcagtagtttcaactcaagagaataacgaatttctagaagaaaacaatatatcaggtgttgattgggttgaagacagaaacggtagttctttgattattggtacggattatggtattatgaggtggaatatcaactcatgggcaagaaggagtttctctagttacgatttatgttaa

SEQ ID NO: 1752 - DNA, 852 bp, Saccharomyces pastorianus
atgtccaacccatttgatttgttaggtaacgacgtcgaagacgctgacgtcgtggttttgccaccaaaggaactcgtcaagagcagcacttcttccaagaaggctgacgttccacctccatctgctgacccatctaaggctagaaagaacagaccaagagcttccggtaacgaaggtgctattaaagacaaggctgccggtagaagaaccaacaaatcaaaggatgtcactgactctgccgagaccaagaagcctaacactagaaaggccactgaccgtcactctagaacaggtaagactgacactaagaagaaggttaaccaaggttggggtgacgacaagaaggaattgagtgctgaaaaggaagctcaagccgatgccgccgctgaaattgctgaagatgctgaggagtctgaagacgctggtaagccaaagaccactcaattgtctctacaagactacttgaaccaacaagccagcaaccaatttaacaaggttccagaagccaagaaggttgaactagacgctgaaaagatcgaagctgctgaaaaggaagcttacgctccagccaccaaggtcaagaacgtcaaatccaagcaattgaagaccaaggaatacttggacttcgatgccacttttgctgaagccaactctaaaaagaactttggtgacagaaagaacttcggtgacagaaacaacaccatcaacagaggcaacttcaacaaccgtcgtggtggtagaaccgccagaaagggcaatgacagcactgccaccagcaacactgctaactctgctaactctgttcaaaagaaccgtaacatcgacgtttctaacttgccatctttggcttaa

SEQ ID NO: 1753 - DNA, 1761 bp, Saccharomyces pastorianus
atgtctcttactctaggtgccgctatctacattgctttgaaaccaatttttaaaatatacaccattatatttgttgggtttttattggctaagtttgatatcgtttccatggaaaattctaagggtatatcaaatatggtcgttaatgcaatcttaccttgcctaacattcaacaaaattgtagccaatatttcatgggaggacatcaaagagatcggagtgataatcctttcagccttcgttttgtttgttttaggtgccacaggtgctatatttacgatatttgttacaacagttcctaaaaaatttttttggggcctcatatttgcaggcttctttcctaatatatcagatttacctattgcttatgtacagagcatgggaaacggttctatatttaccgctgacgaagctgacaaaggcgttgcttactcgtgtatctttttatttattcaaagtttcctaatgatgaattttggaatgtggagggtagtcggactagattttagagatggaggaaaacgagatggagaaaatgctcctccagctgcaagtcctgttaccgaagagtacgaacttaccggggcctcgaaaatagagaatattgtacgtcctctaaacacttaccagtcgaaggaaaagatgagtaatagcgatttgtctttgaattcaatagcgacaaatgatatgacatctcaagaatcttacgaaaatccaagcggctacatcaagccttacaaagggatatcccttcggacttccaatgacggatcctttaagtccaaaaataatccgccacacactgaaatatataggacgtcctcagctttttcaagccctggtgccctggagatgtcgagaatacaggagaagtcttcattacacgacctcgcatccattcgcagcagccgcggaagttcgagttatatgaggcaaagaagaccagtcgtgaatgaactcatttcaaaatatagcgctgttgacaagattaaaaagggagagctagatctgtcaagaccactttctttgacggaagaagtcggtagtaaaaatgcaagtattggaaatgcgtccgccgacactaccaatgatgaattcaacaatgaagaaaactacactagtgacaatagaagcgacagtgacaaaaaaagcaatatatccgcgttcatagaaaggcataatcttaaatggttacagtattttattataaattgcctgagaccagcatctctgggagccatactaggcattttatgcgccctaattccctgggtgaaggcatgtttcgtatcaacatatgtccatgttcataaagcacctgacggagagcccgtattaaattttctcatggatttcacagaatacattggaaatgcgtgtgttccattaggacttttattgttgggcggtactttagcaaggttagaaatcaaatcactaccccctgggtttataaaatcggcaatattaatgacatgctttcggttaattgtcattcctattatcggtgttctttgggtaaataaattgtattctattaaatggttagatacgccaattgggaaattcgatatgatcttgacatggtcaatgcctagtgccactgcccaggtttatttcacggccttttatacgcctgcgtgtggagagcatattcaaatgaactgtttatcagtcttatttgtcatacagtacgcagttcttttcatcactgtagcgtttgttgttacgtacactttgaaagtagacctaaaagtttaa

SEQ ID NO: 1754 - DNA, 330 bp, Saccharomyces pastorianus
atgactaaagataccgggagtctagacgcgtacacagtgaacttcatgccttgttacacagaatatcaaggtccaaccacagagttcaaagactacaaattcgacgacaccatatacttccgtgggaaggagctgcaaaaggagaagcccgcctccactgctacacacgatacctcgagtgccgctctaagcaatggcgctatcttgtcgggaaatacagttacgggcaaaatagtcacagttaacaactacgaaagagagggcaccgaccgtaacgaattggggcgtttgcaagaattgatctacatcaccaaagtcatcaaccagtaa

SEQ ID NO: 1755 - DNA, 1389 bp, Saccharomyces pastorianus
atgttttctagagcagtatccaggcttcgcaacacaaaaaggcttctcagtacagtttcgtcacaaatcccaggcacacgaacctcgaagttacccaacgggctaactatagcttcggaatacatcccgaatacatcttcagctacagtcgggatattcgtcgatgctggctccagggctgaaaatatcaagaataacggaacggctcattttttggagcatttggcgttcaagggaactcaaaataggtcacaacagggaatcgaattggaaattgaaaatataggatctcacttaaatgcgtatacctcgagagaaaacacggtatactatgccaagtccttacaggaggatatccccaaggctgttgagatcctgagtgatatattaacaaaatctgttttggatagtaatgccattgaaagggaaagagacgttataattagagaaagtgaggaagtggataagatgtacgacgaagttgtttttgatcatctccatgagatcacttataaagaccaaccattgggaaggaccattctgggacccattaagaatatcaaatctataacaaggtctgatctaaaaaattacataacaaaaaactataaaggtgacagaatggtactggctggtgcaggtgccgttgaccatgaaaaattggtggaacatgcccaaaaatattttggtcatgtacccaaatctgaatcacctgtcccgttaggttcaccaagaggtccactgccagtcttttaccgaggtgagaagcttattgaggaaaagacgctgcccaccacacatgtcgccattgcactagaaggtgtttcgtggtccgctcctgattattttgttgctttggctacgcaagctattgttggtaattgggacagagccattggcacagggacaaattctccctctccattggctgtatcagccagtcaaaatggacctttggccaattcgtatatgtcgttttccacatcatacgcagattcaggcctgtgggggatgtatatcgtcactgattctaatgagcataacgtgaagttaattgtagatgaaattttaaaggaatggaaaaggataaagtcaggaaaaatctcagacacagaagtgaacagagcaaaggctcaactaaaggcagctttgcttctatcgttagacggttcaacagccattgtcgaagatattggtagacaagtggtgacaacaggtaagagattatcacctgaagaagttttcgaacaagtggataaaattactaaggacgatattattatgtgggcaaattatagattacaaaacaagcctgtttcaatggttgctcttggaaatacatctactgtccccaaagtctcttacatcgaagagaaactaaatcaataa

SEQ ID NO: 1756 - DNA, 459 bp, Saccharomyces pastorianus
atgcaaattttcgtcaagactttaaccggtaagactattacccttgaagttgaatcttcagacactattgacaatgtcaagtctaagattcaagacaaggaaggtattccacctgaccaacaaagattgatctttgctggtaagcaattggaagacggcagaactttgtctgactacaacatccaaaaggagtccactttacacttggttttgagattgagaggtggtggtaagaagagaaagaagaaggtctacaccaccccaaagaagatcagacacaagcacaagaaagtcaagttggctgtcttgtcgtactacaaggtcgatgctgaaggtaaggtcaccaagttgagaagagaatgtagcaacccaacctgtggtgctggtgtctttttggctaaccacaaagacagattgtactgtggtaagtgtcactccgtctacaaggttaacgcttaa

SEQ ID NO: 1757 - DNA, 693 bp, Saccharomyces pastorianus
atgaagttattccaaaacagttatagttttgaatatccgtgggaccaagtaactgcagctaactggaagaaatatccaaatgaaatatctacacacgtcatcgctgtggatgttctgagaagggaattgaaagacgaagataaggtcttggttacagaacgtttaattacagtgaaacaaggtgttcccaaatggataatgatgatgctcgggggcactaatacgagtcatgtaagagaagtttcagtggtagatctgaataatcagagcttaaccatgagaagctgcaacttgacgatgtgtaatttattgagagtctatgaaacagtaacatatagcccgcacccagatgactctgctaataaaacacttttccagcaagaggcccagattactgcatacggatctataaggaaactgtgtaacaaggtagaagattggtccgtgcaaagattttgcgagaacgctaaaaagggtaaaatgggattcgatactgttttgcaattattcagcgaaaactgggaaaaacatgttgatgatttgagtaatcaaatcgtcaataaagttaacgaaactgtggaagacgtcaaaatatccgcagggacgcttttcaaaggatctgaaagaggcggtagaaccattttgcagcaaaatattgatctgtttagagaagcatacaaccacgaaaactag

SEQ ID NO: 1758 - DNA, 471 bp, Saccharomyces pastorianus
atgacacaattaaggtatttgatattggtttctagacaaggaaagattagattaaagaaatggtatactgcaatgtctgctagtgaaaaggccaagatagtaaaaaatctgacacctacgattctagcaaggaagcctaaaatgtgcaacatcatcgaatacagcgaccacaaagtggtatataagcgatacgccagtcttttcttcattgtgggagtgacgccggatgtcgacaacgaactgttgactttggaagtcatccatcgatttgtggaaacaatggacacttatttcggcaacgtttgcgaattggatataatcttcaatttcaataaagtctacgatattttgaatgagatggttatgtgcgatggatccatcgcagagagcaacaagaaagaggtgctgcaccatgtgactgtgatggacactatggagagcaacgataacctggaaagagtgctaagttag

SEQ ID NO: 1759 - DNA, 903 bp, Saccharomyces pastorianus
atgctttacttgattgggttgggtttatcgtacaaatcggatatcacagttcgtggcttggaagcgattaagaaatgttctagagtttatttggaacactacacaagtattttaatggctgctagtctagaagaactagaggagtactatggtaaagaggttatcttggctgatagagagttggtcgaaaccggctccaagcaaattctgagcgatgctgataaagaagatgttgcatttttggtcgtcggtgatccattcggtgccactacacacacagatttagtccttagagctaagcgtgaaggaatccctgtagaaattatccataatgcatctgtgatgaacgctgtaggtgcatgtggcttgcagctatacacttttggccaaactgtatctatggttttcttcactgagaattggagacctgactcatggtacgacaagatctgggaaaatagaaaaatcgggcttcacactttggtgttgttggatatcaaggtcaaagaacagagcattgagaatatggcccgtgggagattgatctacgagcccccaagatacatgtccatttctcaatgctgcgaacagttattagaaattgaggagaaaagaggaacaaaggcatatacttcagacactcctgtcgttgccatcagtagattgggttcaagctctcaaagcttcaagtctggcaccataagcgaattggcgaattacgattctggtgaaccattacactcgctggtcatcctgggtagacaatgccatgagttagagctggaatacttgctagaattcgccgatgatagagacaagttcgccaaagatgtgatgaaagaccaagagtatttcaagcctgcagcatgggttccacctacagaagtcaatgacgacgagtaa

SEQ ID NO: 1760 - DNA, 1446 bp, Saccharomyces pastorianus
atgtctaaggaggatttcgttattaagcctgaagctgcaggtgcttccactgatactagtgaatggccattacttttgaagaattttgataaattactagtcagaagtggtcactatacccctatcccagctggtagttcaccattaaagagagacttgaaatcttacatcagttccggtgtcatcaacttggacaaaccttccaacccatcatcccatgaagttgtcgcttggatcaaaagaatcttgcgttgtgaaaagactggtcactcaggtaccttagatccaaaggtcacaggttgtttgatcgtctgtgttgacagagccactagactggttaagtcccaacaaggtgccggtaaggagtatgtgtgtatcgttagattacacgaggctttgaaggatgaaaaggacttgggccgctctttggaaaacttaactggtgctctatttcaaagaccacctttgatctctgctgttaaaagacaattacgtgttcgtaccatttatgagtcaaatttgattgaatttgataacaagagaaacttaggtgtcttttgggcttcctgtgaagctggtacttatatgcgtaccttgtgtgttcatttaggtatgctattaggtgtcggtggtcacatgcaagaattgcgtcgtgttagatccggtgctctatccgaaaacgataacatggttactttacatgatgttatggatgcccaatgggtttacgataatacaagagatgaatcttacttgagatccattattcaacctttagaaactttattggttggctacaagagaatcgtagtaaaggattccgctgttaacgctgtatgttatggtgctaaattaatgattcctggtttattgcgttatgaagaaggtattgaactatatgacgaaatcgttttgatcaccaccaagggtgaagctattgccgttgcaattgctcaaatgtcaaccgttgacttagcttcttgtgaccatggtgttgttgccagtgtcaagagatgtattatggaaagagatttgtacccaagaagatgggggttgggtccagttgcacaaaagaagaagcaaatgaaggctgatggtaaattagacaaatacggtcgtgttaacgaaaacactccagaccaatggaaaaaggaatacgttccattagacaaggctgaacaatcatcctctgttactccagaagctaagaagactgaagaagaagctaagcctttgatcaaggaagttgaaactaaagaggaagaagtaaaggaagaggtaaaggaagagaagaaggaaaagaaggagaagaaggaaaagaaggagaagaaggaaaagaaggagaagaaggagaagaaagataagaaggagaagaaggagaagaagagaaaatctgaagaagacggtgaatccgaagaaaagaaatccaagaaatctaagaaatga

SEQ ID NO: 1761 - DNA, 1875 bp, Saccharomyces pastorianus
atggagctgccttcgatcaacagcaccacgagtatttccgacaatcaggagttgaggaactactacgataagttgctgttcaagaacaacagtggcaactcgctagcggatttgcccggaaagctgacagacttcaacgacaagagtgctgccgctgcccacccacgctcccgagtggacttcattaacgggtacatcggccccagggaggacaagcagtctctgttgggacagaaaaacaccaagagagcgtcctttagcgccttcacgggcgatgacgggaaacagcacgagaggatttctagcaggaatgggcccaacctgtcccttttctcgtttgagttcaacggctccccggcgcaggagacgaatacgtacaagcaggaccacttgaacgtggtaaacgcctcgcccaacaatttggtctctcccttaaacgataacgctcaaaagtactacccgcatcagcagacgcagcagctgcagctgcagcagcagagcattttcgacccgggaagaagatcctcctacattgccgatacattgattcatggtaacgccgccgccgttcagcaaccgcaatatacgcggcccctataccgccacaacaatccgtcattgcaagtgccatacactgctccctccgagtatgcgcagcgccaaccgtattcatcatctttcaatgctcggcgcaacacccagcctgtggtcaatatgcatccgccaccagccaactccaatgacaccgggctgacggtcgttgatggtaagaacttgacgtcgtcgagggaactgcatgacttgtatcttgattgcgggtccaattattttgccagtgaaaaagtctacggattcatcgacgccatcaaggaaaccttgcagagcaatggtgcctccgccgccgattccagaattatagagtttttgaattttttgaaaaattgtaatttaaactacaaccctcagtcggatgcgttcacctccaacgacgcttccaacaattcgtctggggccaaggccagcaacagcacttcaatgcatttacactataaacctttagtgctggtttcattgaaaaacgggaagctcgaactactttccaaaccacaaaccgccacgcttgtcctgaaaagaggcgacttggtcattattgatggagaccgtggtaaagatctggttctagtggtggaaccggtcgtggatgttaacttggctctattcgtcaatttcttgaagaaaaaaatacatttcgattcccttatcacgagcaactcgcaacacttccctaacgaccaattcgtaaagaccctgatcgacacgaccaatggtaaacctgttcctcgcgaactggacccgaaactgtacgacatcatcgaactaacacagttgatcatcccatcaaaacaggttttgagatttgcgaccccgtgggaatcctccacaaatttgcacaacaagttccaagatgagttgaaggcgctccacattgctcagttgaaactgagatcgctgaacaataacaactcaagcggcggattgaatatcaaaatcttaaacgcggagttccaattcgataggaaaaaattaacgttttattatatttgccaggagcggaatgatttcagagacctgatcaaagaattgttcaaattttacaagacaagaatttggctttgtgctataccgaacaacttgtctattgattccaagttttacgactctaacaagttcgagtgggagatgtatcaggatatgatgtcccactactccatggacaacgcggggattgtcgtggcgcctgaattgaaccgcttgaaactagacgatttccaaattggcgtctacatggagttggtaaaggctttgtttggctga

SEQ ID NO: 1762 - DNA, 660 bp, Saccharomyces pastorianus
atgaaccaggcaatcgatttcaccaaagtcagcatcgactctttcaagaagcacggcattctggaagacgtcatccacgacacaagtttcctgccttcagggatactggccatcgagtacacgtctaatgccccagtggccatgggcaatacgctgtctaccgacaagacgcagtcgaagccccaatttcagttcactttcaacaagcagatgcaaaaaaacacgccacaggcggacgtgtacgtcccccaagatgacgacttgttcactatggtaatgaccgacccggacgctccttccaaaacagatcacaaatggtccgagttttgccacctggtcgaaagcgacctgaagctgcagaacaagtccactcacgaaacttccggggccacggatttctttgcatccgaattcaactccgcaggctcgaggaccctgatagaatacatgggtcctgccccacccaagggctcgggcccacacaggtacgttttcctcttgtttaagcagcccaagggcgtggactcgtccaagttctccaagatcaaggatagacccaactgggggtacggcacctctgccactggggtctacaaatgggctcaggaaaacaatttgaagcttgtcgcctccaatttcttctatgccgaaactaagtag

SEQ ID NO: 1763 - DNA, 606 bp, Saccharomyces pastorianus
atgtctagtgccattattgccaagttggacaaagaggacgtcgccaaggacgtcgtcaaggacctggagttcaagctgctaggagagctgtctgtttcgtacgccgctacaaacgatgtccaattgggcaacgccatggcgatggaggccacgcagagcgcccctaccgtcactttcacgcccttcgacagaggtcaattggccgtcggcgataagctggcgctgctgatgaccgacccggatgcgccctctaggacggaccacaagtggtccgaggtctgccactacattgccacggacatccccgtcgagtacgggtccggaggcgagattgccatctctggcaagggtatcgtgagaagcaactacatcgggcccggcccacccaagaactccggataccaccggtacgtgttcttgttgtgcaagcagcccgagggcgtggattctgccaccttcaccaaggtcgacaacatcgtctcgtgggggtacggcactcccggtgcgggcgcgtacgactacatcaagcagagcaatctgcacttgatcggcgccaactacttcatggttgagaacacgaccgtcgacttcaactacgacatgtga

SEQ ID NO: 1764 - DNA, 1149 bp, Saccharomyces pastorianus
atggccggtacatttttattcacttctgaatccgtcggtgaaggtcacccagacaagatctgtgaccaagtctccgacgccatcttggacgcttgtttggccgaggaccctcactccagagttgcgtgtgaaaccgctgctaagaccggtatgatcatggtcttcggtgaaatcaccaccaaggcacaactggactaccagaagatcgtcagagacaccatccaaaagatcggttacgacgactccgccaaggggttcgactacaagacctgtaacgttcttgtcgccatcgaacagcagtctccggacattgcccaaggtgtgcacgaagagaaggacctggaagacatcggtgccggtgaccaaggtatcatgtttggctacgccaccgatgagaccccagaaggtctacccttgaccattctgttggcccacaagctgaacatggtcatggccgacgctagaagagacggctccttgccatggttgagaccagacaccaagacgcaagtcaccgtcgagtacaaggacgaccacggcagatgggtcccacaaagaatcgacaccgtcgtcgtttccgcccaacacgccgacgacatctccaccgaggacctaagagcccaattgaagtccgaggtcatcgaaaaagtcatcccaagcgacatgttggacgaaaacaccaagtacttcatccaaccctccggtagattcgttatcggtggtcctcagggtgatgctggtttgaccggtagaaaaatcatcgtcgatgcctacggtggtgcctcctccgtcggtggtggtgccttttctggtaaggactactccaaggtcgaccgttccgccgcttacgctgctagatgggtcgccaagtctctgcttgccgccggtctgtgtaagagagttcaagtccaattctcctacgccatcggtattgccgagccattgtccttgcacgtcgacacctacggtactgctaccaagtccgacgaggaaatcatcgccatcatcaagaagaacttcgacttgagacctggtgtattggtcaaggaattggacttggccagaccaatctacttgccaaccgcttcttacggtcatttcaccaaccaagaatacccatgggaaaagccaaagaccttgaaattttaa

SEQ ID NO: 1765 - DNA, 1494 bp, Saccharomyces pastorianus
atgagttctcaatttcctttatcgtcaccatataggacagcggattcacatgtaaagaatccatattttccatcttctggtttcaaccagcacactaaactaccatcgccaagtcatgtgcaaactggtaaagctgtaccaaaaatcattgggaatttctccaaagttgattatccaactccatttccttcttctagtataggaagaacttcatcccctgttaggtcaattgatgttgatgctattccttcttctccagccttccgtgcgccgatggaagaggcatcgcccagattatctcccaggctttcttctcctttaagacacgttaaagtcatcaatgctgaattagatcctactaaggccagcaccattactgttgggcgtaatagttcgcagtgtgacgttgcgctttgtaagaacaaatttatatcaaggattcacgccgatatttcttaccttcctcaagccaatgaactgaagattcattgtgtcagtatgaatggtttaattgtgatatatcgtaagaaattcgattgttatctcttaagggacactgaagtatcaaataacaatgagaacgtttatagacttacacccaggttctcaatcgaagagagcgtaaaggaaattcaagacgaagacaaatctgttagttttacgctggaaggtggtgacaccgtttacatgccatataacaaaggcatcatgttagattttagacaggttttgcttcgtgtttcactgaagaagatgtggtcttgtccagagtcgacaggattagaaaagcaagctgaaaacgaaaatgagaggaaacatatgggaggtataaggaagcatccattaatattttctaaagccccatccgagtcccccaagaaaatactaaagaataacaccaacaaacatacagccggtgatgattctggtgtcgctgaaagaatgttaaatcattttttgaactcaaaatcatcttcgatttcctctgtctcttctgctgaaaacaatgagcaagtttttaaacaggattcattaccatatgaaaaaatccctgtggttataaaaaagcaaaagctaaataagagcgttttatcttcaaaaccgaaaaaatcagtaaaagagactttggatgagttatccgggagaaacgtggatgttatgaatttacaacatattttgacaaatcacctggcttttgcgaacgttcaacaaacaccattattccaattacaacaggttaactcgcaaatttctgaattgtcaagagacgaattgcgtacgatcttgagcgacgcgaaatgcgttggtgtcatttatcgtcacggtaaagatgccgctggtaaaccattagacgaagaatatttctatgatttggaaaatgacgatgactacgaaagaagaaacttggtgagttcgttgaaaggcggaagaactggtttaagatcttgtagaaggacgcataaacagtatttttggaaaaaaccagctaaataa

SEQ ID NO: 1766 - DNA, 759 bp, Saccharomyces pastorianus
atggttgaagattccagagttagagatgctcttaaaagcggtgaacaaagggctttaccggcttctttagttccacaaacacctgccgtcttgacatcaaaggacaagatttccaaaagaatgatcgtggtgttagctatggcctctctcgagacacacaaaatatcttctaatgggcctggtggtgacaaatatgttctgttgaattgtgacgaccaccaaggcctgttgaaaaaaatgggtagagacattagtgaagcaagacctgatattacccaccaatgtcttttaactttactggattctccaatcaacaaagctgggaaattgcaagtctacatccagacaagccgaggcattctcgttgaagttaaccctaccgttcgtataccaagaactttcaaaagattttcaggtttaatggtccaattactacataaactatctattagatccgtaaattctgaagaaaaattactaaaagtcatcaaaaaccctattaccgaccatttaccttccaaatgccgtaaagtaacgttatcctttgacgcccccgtcattcgtgtccaagattacattgaaaaactagacgacgatgaaagtatatgtgtctttgtcggtgcaatggcaagaggtaaagacaatttcgcagatgaatacgtcgacgaaaaagtcggtctgtccaactacccattgtccgcttcagttgcatgttctaagttttgtcacggtgcagaagatgcttggaatattttatag

SEQ ID NO: 1767 - DNA, 3573 bp, Saccharomyces pastorianus
atgcctatcactcaaattatatctgcttctgacggcgaagcgggttcaaagccaaccatctcgctcgtacttgataacttatctaaactggaaaaactatctcccaggcatcaccgtctttcaaagtcgctttcaaagatcaagcgttggaggaacaggtcgaatagtggttcatcgatggattccagtgaggaacaagataagctcggtgaggcttataacgataacgataatgcagacgatttggccaaatcgaagtatatgatgaaaagcattgcaggcctattgacgactgcgagtgtgtatgcgggcatgaatactgctcaagaggtgagcgctttggcgcaggatgactttcaagaattagggtccagtggattgagtcaggcaaatttaggtaaaaatgaagtaaaaagcaaaaaggaaaacagtaaaagaaaatccggaccagacgtgccaagagtagacaagagaaaccccacactatttgatttttcagtaactaggggaaaaatatcgaaggacagtatttccaaactaagacaacgttttcacttagacgaacaagaaccgtttttaaatgatttccctgcatggctacttaaggatgtgcttgttcaaggtcatattttcattacgatgaaacatttcctattctttgcatatttacccaagaacccccgctctgttaaaatgtctgggaacttgaacattagaacaaaactgatcagatcaactagatactggtgtgtgttgaaaaatcatttgttttcaatgtatacctcatcgacggaactatacttccccattttaactatagatttaagggaaacccagaaaattgaaatagaaaaacactccttaaacgggaatacgacaaaaaccttcaagctatcaaccaacgaaagcacattcaaattcaatgcagactcagaattctctgctaaatcttgggtgaatgctttgaaaaaagagcaatttgcagctcagaattcagaagacaattcgataagtttaaaaattccactacccaatattatagaaatagatgatcagcctattgtcaataaagctttgacattgagattgagagcattggaaagctcacagacttacgctattgatgacttcatgtttgtttttatggatgggtctggcagtcaagtcgaggacagtctttgccaacagttagctctattgcagaagtctggtgtaagtacactttataatgacacttcggccaaaaatgtaaaatcaggtaatcagaaaggggatttaatgacaactgagcaagaaaatgatgataacaagaattcaaaatatctcaatctcctaagttcaaccgtgccctcttctgaaaatggtaaaaagagcaagtctagatttagagaaagaagtaatagctggtttcgtagggctaaacctctcgaagactcgcaagtcgaagacgtggaggaaatttacaaggacatagctgatgatatagactcttctgtttattctacaattcaggtgcccgatcaaggagacaatcaagatcaaactgtagactggaaaccaagccacctcagaaattttgctgatatgtgggcagctaaaccaatacactaccagaacaaataccttgagtttggaaaagatgatacttatttagtaaaggaaactgaggaactgtctgctaacgaacggttcagatatcattttaaatttaacaaggaaaaatcattgatcagcacttattacacatacttgaatagaaatgtccccgtttatggtaagatttatgtatccagtgatactgtatgtttcagatccttgttaccaggctctagtacgcacatggttttaccattgtccgacgtggagacatgctataaagaaaaaggtttccgatttgggtatttcgtattggtagtagtaatccatggtcatgaggaattattctttgaattcagcacggaagtcgccagagatgatattgaacgcatacttttgaagcttttggatgctgtatatgcgggtagtggagagggatcgaatgcatcaactacttctatcggcgatgtgcaacataacactgattcggcaaagctgaaattatttgaagacaaaatcaatgcagaggggtttgaggtaccattaatgattgatgaaaatccgtactacaagacaagtataacaccgaacaaaagttataagtttgggttattgaccattggttcaagaggtgacgtccagccgtatatagctctcgcaaagggtttaattaaagaaggacaccaagtggtaatcatttctcattctgaatttcgaggctttgttgaaagccatgaactgcaatttgaagagattgccggcaatccagtagaattaatgtccttaatggttgagaatgaatctatgaacgttaaaatgctgagagaagcatcgagcaaatttaggggatggatcgatagtcttttacagacatcttgggaggtttgtaatagaaggaaatttgatattttgatcgagtcgccatcagctatggttggtatccacattactgaagccttacaaattccttacttccgggcattcaccatgccatggacaaggacaagagcatatccacatgcgtttattgtaccggatcaaaaaagaggtggtaattacaattatttaacacatgttctgtttgaaaatgttttttggaagggaattagtggacaggtaaataaatggagagtagaaactctcgggttggggaagacaaatctttttcttttacaacagaataatgttcctttcttgtataacgtatctccaaccatctttccaccatctattgattttagtgagtgggtgagagttactggatattggtttcttgatgataagaatacgtttaaaccacaaccagaattagaaaatttcatttcagaagcaaggtcagaaggaaaaaaactagtttacatcgggtttggctcgattgttgtatctaatgccaaggaaatgacacaagctcttgtcgacgcagttgtagaggccgatgtttactgtattctaaataaaggatggtcagaaagattggatgacgttgcggcaaaaaaaatagaggtaggtcttccaaaaaatatcctaaatgtagaaagcatacctcatgattggttattcccacaggttgacgctgcagttcatcatggtggctcgggcaccacaggcgcttcattgcgtgctggtttacccactataataaaaccgttttttggtgatcagtttttttatgctggcaggatagaagatataggggttggtattgctttaaagaagctaaacagtcaatcattagcagaggctctaaaggttgttacgactaacaaaacaatgaaagatagagcggagttaataaagaagaaaatctccaaagaagacggtattaagactgcaataagcgcaatttataacgaacttgaatatgcgagaagcgttaccttatcaaaagtaaagaaccctcgcaaagatgaagatatagtggatccaaccaaactgccctcagctgaaacaacggatgaagcctggacaatgatttaa

SEQ ID NO: 1768 - DNA, 1485 bp, Saccharomyces pastorianus
atgaattctccaacaatgaagtcagaacagctcactccaaaactttcacctatgtccttttgcttagatgatcaaagaaacgcaaacactttccaaaatatattaaactcacccacgaagcttaaattggacaccgggtcgcttggtaactcattactgtatccaacctcactctccaaattaagcgagttatcgagaaatggccgttccaaacaaagaaggggttccgacactatgaggtcggtatcccctatcaggttccaattttttaacaacactccaaagatgctaaaaccggagtatttatctcaaaaaagtagtggtcttccattgttatcagcccttctgaaaaatagcaaacagacctctaaatcgaactccaatgaggatcagagcgtaaatcctgatccgctaaatatagaacaaaatattgttaagcagagtatcaaggataaactagagcagttgcgccgacaaggttcagagcaagtcgcacaaattcaaaagaaagaacaacaaacaacgttgcccgaaatcaaggactatgtagaagaaccaactgtacagaatgtatccgaaaattctgtttgtttaaacaccattgctcctgaatctcctttggaggaagcgttggaccatgtggtaccagaagttgaagataaagaaaatagatttgtctcaatcagatccactcagtgcttgcagactgaaataagtgacttacccaaggatttgaatttagatagcttgcctacagataaaaacgggttcgttcaatatggttccaaatgcaacaataataacagatatagtttcatctcttccacgtcaacagattatgaaccagagtggtacgatggccagcaacatatctcaatgcacattccatcgatgatcaatacggacgaggcaaccagtcaagacaaatccaatttggacataaagattaaacagttggaacttgagattacagagttgaaattacaaaatgaaaagctagttcattccatgacgacgaatagatacattgaagaaagattcatgcttgaggttatgaaagaccccagcgtacaagcacaaaaatctcaaagagatattgaaagaaaagtcaaacagttggagaaaaaatttttcaactgtaagaaagtcctcagtaaattgactgagtctcccacagtagtggctacctccacttcaaaaactgatgggacctcaacaaggatcccgtgtccaaagacaagactagcaagagtttctgttttagacctgaaaaaaatcgaagaacaaccagactcgtcgtcgggaatctcatccgaggaagaacattctgcgaatgacgaaacaaacatcaacgaagaggtggataccgttatgttcgaagaattaacgtctgcaccttcatcaacaacctctatgcagagcagagaaagtagaagaggatttcaactcaatctgcctgttcaagtcgatagcaagacaaaatag

SEQ ID NO: 1769 - DNA, 798 bp, Saccharomyces pastorianus
atgtcttgggacgacgaagctatcaacggttctatgggtaacgatgacaccgttctaatggactcatgggatgctggactaggagacgatgaacctgttatgcaatcttgggatgctgtagaggaagaaaagcaaccggctccaaagccaaagaaagcgcaaccaaataaagctaagaaaggcaaagaatcctccgtcgataaagtcctattggacatagacaccctagacgaaaagacccgtaaagagttgattaagaaggctgaaatagaatccgatttgaataacgctgctgacttgtttgctggtttaggcgtcgctgaagaacacccaagggcccgtgctttacaaaaggaacaagaggaaatagctctaagaagaccagcttttaccagggatacacctattgaaacgcatccactgtttaccgctgaaacaaagaaggagtatcaagatttaagaaaggccttatctaccgctattgctcccatgaacaacaaatctccactaaactattcttcatcattagccatcgatttgattagagatatagcaaagccaatggccattgagtctataagacagacagtagctactttgaacgtcttgatcaaagaaaaagaaagagaagagagacaagctcgtttggcccgtgtcagaggcggtaccgctactggtggtgcaggtaagaaaaaggccaaaggtaagaccaacttgggtggtgcattcaagaaagatcaagatttcgatatgggtgccaccgatgatttcgatttcgctgatgacgacttcatgtaa

SEQ ID NO: 1770 - DNA, 528 bp, Saccharomyces pastorianus
atggttcttttacacagaagtacgcacatattccctactgactttgcctctgtttcacgcgccttttttaataggtaccccaatccatactctcctcacgtgctctcaatagacacgatatcaaggaaaatagaccaggacgggaatttgcgcacgacgaggctgctaaagaagtcgggcaagctaccaacctgggccaagcccttcttgagaggcatatcagagtcgtggataatcgaggtttccgtagtggatcccgctaactccaccatgaagacgtatacccgaaacctggaccatacaggaattatgaaggtggaagagtacacgacctaccagttcgacagtgctacaagcagcacaatagcagacagccaggtgaaattttctagcggtttcaatatgggcataaaatttaaagtggaggattggtcgcgcaccaaattcgatgaaaacgtgaagaaaagcagaatgggcatggcttttgtcatccagagacttgaagaggcaagaaatgctcgattctag

SEQ ID NO: 1771 - DNA, 1368 bp, Saccharomyces pastorianus
atgtcagaagaagataaatccaaaaaactagagaatttgttaaagttattacaattaaacaatggagacacttccaaatttactcaagagcagaaaaaggctatgaaagaccataagttctggaggacccagccggtcaaagacttcgacgaaaaagtggaggaagagggtcctattgatgaagcaaagacaccggaagacatttctgataagccgttgcctttattatctagctttgaatggtgtcatattgatgtagacaacaagaaggaactggaagatgtttttgttctactaaatgaaaactacgtcgaagatcgcgatgcaggtttcagattcaactacaccaaagagtttttcaactgggcattgaagagccctggctggaaaaaggaatggcacatcggtgttcgtgtcagagaaacacagaagttggttgccttcatttcagccatcccagtgactctgggcgtcagaggtaaagaagtacctagtgtagaaattaatttcttgtgcgtccacaagcaactaaggtctaagagattgacccctgttctaatcaaagaaataaccaggcgggttaacaaatgcaacatctggcatgcattgtatacagcaggtatcgtattaccagcacccgtgagtacttgtcgttacactcatcgtcctctaaactggaaaaaactttatgaagtagatttcacaggtttaccagatggacatacagaggaagatatgattgccgaaaacgcattgccaagcaagacaaaaaccgccgggttgagaaagttaaaggaggaagacattgagcaagtctttgacctgttcaacagataccaatcgagattcgacttgatccaaattttcactaaggaagaattcaaacattatttcattggtgaagcatcgttgcctttggagaaacaagtggtcttttcgtacgtggttgagcagccggatggaaaaattacagatttcttttcgttctactcattgccattcacgatcctaaataacaagagttataaggacctgggtattgggtacttgtattattatgctactgatgcggatttccaattcaaagacaggttcgatccaaaagctacgaaggcgttgaaaaaaaggttgggcgaattgatttatgacgcatgcatcttggccaagaacgccaacatggatgttttcaacgccttgacttcgcaagataatccacttttcctggatgatttgaaattcgggcctggtgacgggttcttaaacttctacctgttcaactacagagcaaacccgataaccggcggtttaaatcgtgataacacgaatgacgttgacaagcgtagtaatatcggtgttgttatgctttga

SEQ ID NO: 1772 - DNA, 1755 bp, Saccharomyces pastorianus
atgatctctgctacaaattgggtcccaagagggttttcttcggaatttcctgaaaaatatgttttagatgatgaagaaatggaaagaatcaaccagttagcacaattgaacttggacgatgccaaggccgacttggaagaagccgggggtgaagtcgaagttgaagatgatgttgaagctgaggctgaagctgaagctgcccctgctggttctgagaacttgaaagatcagctagagatggacgatgatttgaaagagtataatctagaggaatatgacaacaaagagactatcggcaacgagaacggtgaagacatatccatgtttccaggtctaagcaatgacggagatgttaagttccatgaaggggaagaaggtgaagatccatatatttcattgcctaatcaagaggacacccaagaggagaagcaagagttgcaagtctacccatctgataacttggttcttgctacaagaacagaagatgacgtctcgtacttggacgtttacgtttacgacgacggtgccgggttccatagtgatgatattccggttgaaaaaggtgacgaggttgatccggatgttgcccgtgggttagttcgtgatggtgcgttatatgttcaccatgacttaatgctgcctgcgttcccattatgcgtggagtggcttgattacaaagtcggttctaactctgaagaagctgctaattacgccgctatcggtacatttgatccacaaatcgaaatttggaacttggactgtgtcgacaaggccttcccggatatgattttgggtgagccacttgacaattcaatggcttctttgcagagcaaaaagaagaagaagaagtctaagaaccaacacatcaagacccatcatactgatgctgttttgtctatggcacacaacagacacttccgttctgtattagcatccacctccgcagatcataccgtgaaactatgggatttgaattcaggtagcgcagcccgttcgttggattccatccattctaacaagaacgtttcttcatctgaatggcacatgttgaacgggtccgttcttttgaccggtggttacgattctcgtgtggctttaactgatgtaagaatttccgacgagagccaaatgagtaaacactggtccgtcatgtcaggcgaagaaatcgaaaccgttacatttgctgatgaaaatataatattatgtggtactgattctggtaacgtatactcctttgatatcagaaacaatgaaagtcgtaagccagtttggacattaaaggcacatgatgccggtatctccactatatgttcaaataaattcattcctggtatgatgagtactggggccatgggtgaaaaaactgttaaattatggaagttccccttggatgaaactacaaacggcaaaggtccaagtatggttttgtcccgtgactttgatgtcggtaatgtcttgagttcatcatttgcgccagatatcgaaatagcaggcagcatggttatcggtggtgtcaacaagggtttgaaactatgggacgttttcaccaacagatccgtacgtaaaagcttcaatagtgaactacacgacgtgcaaacaagagccagggaagaagccaagcaactgggcaagagttcgagaatcgcaagaaaatacaccaacaatgataatccagacactgttatgaccattgacgatcaaggtgaagacgaagaagaaagagaaggtgaagacgagcatgatgacatggcataa

SEQ ID NO: 1773 - DNA, 1509 bp, Saccharomyces pastorianus
atggctcctattgaatatttactgtttgaagaacctactgggtatgcagtcttcaaagtgaagttgcaacaagacgacattggttcaagattaaaggaagttcaagaacaaatcaatgactttggtgctttcaccaagttgatcgaacttgcctcctttgctccgttcaaaggtgctgctgaagctcttgaaaatgccaatgatatatcagaaggtctagtctctgaaagtttgaaagctatcttggatttgaacttaccaaaggcttcttctaagaagaaaaacatcactttggctatttccgataagaacttaggtccttctatcaaggaacaattcccatacgttgattgtatctctaatgatcttgcccaagatttgattcgtggtgttagattgcatggtgaaaagctattcaaaggtttacaatccggtgatttggaaagggcccaattaggtttgggtcacgcttactccagagctaaagtgaagttttctgttcaaaagaacgataaccatattatccaagccattgctttattagatcaattagacaaagacgtcaacacttttgctatgagagttaaggaatggtatggatggcatttccctgaattggccaaactagtaccagacaactatagttttgccaagttggtccttttcatcaaggacaaggcttcattaaacgaagattccttgcatgatttggctgctctattgaatgacgattcaggtattgcacaaagagtcattgacaatgctcgtatttccatgggtcaagatttatctgaaactgatatggaaaacgtttgtattttcgctcaaagagttgcttccttagctgattacagaagacaattatacgattacttatgtgaaaagatgcacactgtcgctccaaacttatctgaattgattggtgaagtcattggtgctagattaatttctcacgctggttctctaaccaatttatctaaacaagctgcttcaacagttcaaattcttggtgccgaaaaggctctgttcagagctttaaagactaagggtaatactccaaaatacggtttgatttaccacagtggtttcatttctaaggcctctgctaaaaataagggtcgtatctctagatacttggccaacaaatgttctatggcttccagaattgacaactattccgatgaaccatctaacgttttcggttccgtacttaagaagcaagttgaacaaaggttagagttttacaacaccggtaaaccaactttgaagaacgaattagccatccaagaagctatggaactttacaataaagataaaccagctgaaaaggaagaggaaactaaagaaaaagactcctcaaagaagagaaaattggaagacgatcatgaagaagaaaagaaggaaaagaaggaaaagaaaccaaagaaggaaaagaaagacaagaaagagaaaaaggagaagaaagagaaaaaggaaaagaaagataagaagaagaaaagcaaggattga

SEQ ID NO: 1774 - DNA, 666 bp, Saccharomyces pastorianus
atgaatccgttattccctaaaaatctacttaaattaatctctattggcgaaattaagacttcattaatggtaaaggaatcaaatcctgttcaatctacagatacccactcatggaattatgatgaaaattttcccaatgaaatcgaccccgactcaagaacagccacatcaaatgaagaaacactctacaatttctcttttcccatttattcctttggaaagacattattattctccatcgaagagaattttataaatatatcaccgatttttggtaatatgataagtagatctattgtttcacaattggctaaaacctcccctgacataataattattggtacttctgatagaatctctaacatgaaaataatgacggaagacgaatgtacactccaaccaccagaattcgtaacaggatttataggaagtgccctcacacaattgataaccggccctaataagggaataaagttcaaatgtcttgtcgtgcctagcgaaggtcctaacggtttcgaaaaattctcattgtccgatatgggctcgttgattgatgtctgtagtcaatggttcggacttgatcattcaaagtattccgaagagtgccatcgtctttggagatgtgatagtgcagcctttggtgcccaatcaggcctatacatatga

SEQ ID NO: 1775 - DNA, 345 bp, Saccharomyces pastorianus
atgtcagagctgggtacgaaatatcaacatttgcagagtgaattagaagagtttattgtagcaagacaaaaattagaaacacagctacaagaaaacaagattgtaaatgaagaatttgaccaattgaaagaagacacacccgtgtataagctaaccggcaacgttcttttaccggtggaacaaagtgaagcacgtggcaatgtggagaagagactagaattcattgaaacagagattaaaagatgcgaaaagaacataaggggcaaacaagaagaattggaacaggtaagaaacgaactggtcaaactaaataatgccgcaactgccgctggcccagacaggtaa

SEQ ID NO: 1776 - DNA, 1311 bp, Saccharomyces pastorianus
atgaccgcgctatacgctccctcgggtgctgcccagctgtattcccatctgctaaggagatcgccacagaacagactcgtggtatcacaccagacacgccgtcacctcatgggctttgtcagaaacgccctggggttggaccctccaccctctccagacgatccgaccccggagaaccggtttcatccatgggatcagtcgccctcggtggacttgcgtgagagggccgctaagatcagaacccttgcacactgtcctgtcaccggcaaagacatcaactacacttgccctctctcagggatccccacacaccattcgcgggaggcgtgggagatggataaggcatatcacgattccaaaaaatatgaaattttgaaaaaagttaacatttacgagcacgacttgagaagcggtaggcctttccctgagtttgatttccctcagcatcagggctatgacaaggccgtcaacctcaccaactgggacttgttcctttacacaaggtccttctattccatggatacagagttccaattggctgcggtcaccaagatgctgagttacccaatcactatcgggtcgctgttacacaaattctccccatattcgctaaaccccaaggggcccatcactttagaaggcttgaagtctttggccgctctcaggtacactttatacccgctggaaaatagatctgtactggctactacgaggaatcgtgccatgagaattttcattctgggtgcccgtgctgaagctcagttgccgggccacgtttggaaacaactccagtttctcttcccagaacaaaatttcgaaatccacttcatcgggcctgaatgtctatacaagagagataaacaggaatatgtcaaatccgccacaccggtagtgcaaagaatagatgaaactttgaagttcattcaccacaccgatttcttccaagttttccacgaagctcaagattttttcccctatgatccatacatggatgtcttttttacgttccatcctggttacgcatccccagagtctcacggttcgtggatgggcgaaacaatgaaggccctactagaaactaagtgcgccatctttactaccggtttcaacaagaaagatttaatggacgacataagcctggtcaagtccaaatacggcaaagaaatggatatcctgatggacccagtcaagaacgtgtttggaagtaccaagtgggaactgaacgacatggaccctcaagaagtttaccaattcaacatgtacattgccggtttcagaggtaaaaggtaccatacaatcaagagacaatga

SEQ ID NO: 1777 - DNA, 2499 bp, Saccharomyces pastorianus
atgatcacgctcttatcctacttgtgcgcgatatgccacgcagtgctgttaataagggctgattcgatagcggatccttggcctgaagcgcaaaagttactatcaagcataccgaagtccagagaccccatgaaagaagctgccatggaatccaacatcgatgaatttgttgggttttacgtaccgatggattattctccacgtaatgaggaaaaaaactatcaatacgtttggcaaaatgaaattacagatcttcaacatcaaatctacggtttgctagtgcagtctagtgaacaattcaacaactcagaagcaacatacactcttagccaaattcatctttggaaccaatatgatttcccccacaatatgacattggcacacaaatacttggaaaaattcaatggcctgactcacttcaccaatcattcagccattttcgacttagctgtaatgtattccactggtggtattgctggcagtaataatctaagcacgattcctcaggactctgctaaggccttgttgtattaccaaagagctgccgagttaggaaatttgaaagctaaacaggtgttggcatataaatattattcgggattcaacgttcccagaaatttcaataaagctctgatattatatagagacattgcggaatatttaaggggaatgtattcgagggatgaatgggatattgtatttccctcttgggagagctataacgtgagaatatctgatttcgaaaacggattattgggaagaggtttaaattctgttccgttctctacagtgaggaaaagagctacgtcggatattggctcaccctttatcgcccaagttaatggtgcacaaatgactttccaattcgaaacaatgggcaggttcactctcagcggccacgagggtcatattgatgacgacgaagacgacgaagacgccaatgaaagaagaataatcaggatatataacgcagcttggaatgattatagagggacctattcgcaaagtaggaactgtgagcgcgctaaaaatttgctggaattaacctacaaggagttcgaaccccatgtagacaatcttggtcatttgcaagttttatattacgtgagttgcttgcaattattgggacacatgtatttcaccggtgaaggttcctcgaagcctaatatccctatggctgaagagattctgaccaagacgctaaaaataagcgaaagtattagcgcgtctatgggtagagcaaatatagatttaggcttaatcaaccaatacattaccgggaatgtttccaaggcagtttcttattacacgcgtgctattgaaactaacactaacaatgggattgtggaatttcagttatccaaaatagccactttattccctgaaaaaaaaattggtgatccgttcaatttaatggagactgcgtactcgaagggtttcattccagctatatatgagtttgcagtgatgaccgaatctggaacaaaccgcaaatatagtgtagagaataccgcttacctgttcaaaacattcgttgacgaaaacgaacctattatggcaccggagttaaggacagcgttcgctgaattgatcaacgaccgttcagaagtggctttgtgggcgtactcccaattggcagaacaaggttatgaaaccgctcaaatatctgcagcctacctaatgtaccaactgccatacgaattagaggacccgccaaggactacagaaccaagaaagaccttggcaatatcctactatacgagggctttcaggcagggaaacatagacgctggtgttgttgcaggagacatttatttcgaaatgcaaaattatagtaaagccatagcactgtatcagggtgccgctttaaagtattccatacaagccatttggaacctgggctatatgcacgagcacgggctaggtgtgaatagggatttccatctggctaagcgctattacgatcaggtgttggaacacgaccataaattctatttggcttccaaattatgtgtgctcaaattacatttaaagtcgtggttgacttggcttacgagagaaaaagtgaactactgggcacccactatccctcccaacacgagcgaagatacccagcctccaaagacttcgtggtacaagcagttgacgaacattttacaaaggataagacacaaagaggatgacacaagagctacagaagaatctcacaagcatagaaccgtcgtacaaaatggcgccacccacagggaccagaatgtacaggaaacttctgagatcctgggattccaagtagaagacctcatcaccatggggtgcatcttggggatattcctcctaagcattctaatgagcacattggcggctcggaggggttggaacgtccgtttcaacggcgcccagctaaacgcaaatgggaacccacagcagcagcagcaacagcagcaacaagcacaggggcctcctggttgggacttcaacgtacagatatttgccatatga

SEQ ID NO: 1778 - DNA, 894 bp, Saccharomyces pastorianus
atggtcgtcatagctaatgcgcacaacgaactaatccatgatgctgttctagactactatgggaagcgcctcgctacatgctcttctgacaagacaattaagatttttgaggtcgaaggggaaacacacaagctggtagacacattgactgggcacgaaggccctgtttggcgtgttgattgggcgcatcccaaattcggtaccattttagcttcatgctcttatgatggtaaggtattgatttggaaagaagaaaacggtagatggtcccaaattgccgttcacgccgtgcattccgcttccgtcaattccgttcaatgggctcctcatgagtatggccccctgttagtagtcgcttcttccgatggtaaagtctctgtagtggaattcaaggaaaacggtaccacttctccaataatcatcgatgctcacgcgatcggtgtcaactccgcttcttgggccccagctacagtcgaagaagatggcgaacatggtggtgccaaggaatcccgcaagtttgtgactgggggcgccgacaatttggtaaaggtttggaagtacaactcagacgcacaaacttacgtcctagaaagtactttggaaggtcacagtgattgggtgagagacgtggcttggtcgccaaccggcctcctacgttcatacttggctagtgtctcacaagaccgcacctgtatcatctggactcaagataatgagcaaggcccatggaaaaaaactttattaaaagaagaaaaatttccagatgttttgtggagggccagttggtctttgtccggtaacatactagccctttctgggggtgataataaagttaccttatggaaggaaaatttggaaggtaaatgggaacctgctggtgaagtccatcaataa

SEQ ID NO: 1779 - DNA, 936 bp, Saccharomyces pastorianus
atgacggatgttttggacacaaatcaacagtgtgaagcgattacaaaggccgctacttatctttcgggtattttggaaccacatttccaaagtactccaaactttaaacctccaagaactttgatcatatgtggttctgggttaggtgggatatccaccaaattatccatagataatcctcccccagtgacaattccatacgaggatataccaggatttaagaaaagtacggtcccaggtcattctggtacactaatgtttggatctatgaatggctcgccagtagtgctaatgaatggacgtcttcacggatatgaaggcaatacactgctcgagactacgtttccaataagagtggttaaccacatgggccacgtccataacttaattgtcaccaatgctgctggtggtataaatgcgaaataccaagcttgtgatttaatgtgcattaacgaccatttgaatattcctggcttggctgggcaacacccattgagaggtcctaacttggacgaagtcggacctcgtttcttggctttaagcgatgcatatgatctaggattgaggaaacttttattcaagaaatggaaagaattaaagatccaaagaccgctacacgaaggtacttataccttcgtctctggtcctacatttgaaacaagggctgagtctagaatgatcagaatgcttggaggtgatgctgtcggaatgagtactgttcccgaggtcatagtggcaagacactgcggctggaaggttttggccttaagtttgattactaacacttgtgtcgtggatagtcctgccagtgcattggatgaatctcctgtgcctttagaagaaggtaaagcgacacatgctgaagtgctggagaatggtaaaatcgcctctaatgacgtgcagaatttgattgctgccgtgatggaggaactataa

SEQ ID NO: 1780 - DNA, 2067 bp, Saccharomyces pastorianus
atgatccggacccgtgtgttattctgtctacttatatcttttgttgctacagttcaatcgagtgctataattgtaagctcttcatgcatttctcaagcctcgttatatcagtatggatgtattaataataaaacatctataggttgttactgtaaaaacatcaactggctcggctccgtcactgcatgcgcctatgaaaactccaagtccaacaagacgtttgacagtgccttgaagaaaatcgctgctcaatgttcaagtcacagatcttacactttggacgacatgaagaaaatttatttaaacgcctccatgtatttgagagcccctgcgaaaacagatatgaaggttctcgttaatcagccgctaacggcgaatgagacagccttccattattattaccaaaacaattatggcaatcaccttgccctaatacggtctcaatggtgcgcctggggtctcgtcttcttttgggcagtcgtgcttactatcgctactattctcaatgttatgaaaaaggtatttggcaaaagcattatgccaaactctgtcaaaaaatcactaatttatccctccgtttacaaagattatcatgaaagaaccttttatttatggaagtacttaccatttgatttcccgactagaggaaagagtcttgttgtcctaatctttgtccttttggtcatcttttccgttagttttggtcacggtgtcaaattccctcacccatatttaaaaccaagatggataaagagcatggattttgtaagtcgcagagcagatttgatggctcttgcccttttccccatagtatatttatttgggataaggaacaatcctttcattcctataaccggcatttcattttccactttcaattactatcacaaatggtccgcttacgcttgcgtaactttggcagttattcactcgattgttataactgctatggcagtgaaaagaggtagctatacttattatgtaaccgtgttctatttccaatggggtatggtagcaactgtattcatgtgtgcaattgtctttcaaagtgaaaaaatctttagaaataaagggtacgagatcttcctttttattcataagattatgaatattttgttcattattgccatgtactaccactgccataagctgggctggatgggttggatttggtcaatggcaggtattctgtgctttgacagattcgcgagaattgtcaggattgttttaaatggtggtttgaaaaccgccaccttgagtactaccgctgattccaacgttataaaaatctcagtcaaaaaacctaggtttttcaaataccaagtgggagccttcgcatatatgtattttttgtcaccaaaaagtgcatggttctacagtttccaatctcatccatttacggtgctgtcagaacgtcaccgtgatccaaacaacccagaccaattaaccatgtatgtcaaggcaaataagggtatcactagagttctattatcaaaagttctgaatgctccggggcacactgtcgattgtaagatattcttggagggtccttatggtgtaacgataccacagatggttagaatgaagagaaatctggtaggtgtggccgctggtttgggggtggctgcagtttatccacatttcgtagaatgcttgcgcttgccaactactgatcaattccagcataaattttactggatcgttaacgacttatcgtacatgaaatggttcgagaatgaactgcaatggttaagggagaggaactgtgaggtatctgtcatattcaccggttccagtgttgaagacacgaactctgatgaaagtacaaaagggtctgacgataaagaggacaatgaaatcacggtcaaatgccttaacaaaaggcctgatttgaaagaattagtccgttctgagattgcgctgtcagagtctgacaataacaacatcaccttttattcgtgtggaccatcgacgttcaatgatgatttcaggcacgcagtcgttcaaggaatacacccttctttgaagattgatgttgagctagaggaggaaagctttacatggtaa

SEQ ID NO: 1781 - DNA, 2247 bp, Saccharomyces pastorianus
atggtatttggatttgcaaagagggataggagggtgcctgacctatccaggtatgactactattaccagaaccaagaagattacaacaagagtcctcaattatctgctgctgctgcttctgctgcttctgccgcgtcaccggatcaagccagttattcaaggtcgcattcgttggctgctcatgctccaccgatatcgaaacagaggaactcggtgaaaggtccagggaggcggctctcaacatcttctgctgtcccacaatcagccaaggggacggctaagcctcatccgcaaaagacgtactctctaagatcacagaggagtggggactatcatttgcagcggcccaataatgccaacaatgggagccgcataaactcgatgacgtcgggtgccaatgtcagaagaaaccttggcagcaagaacaagtctacaggcagcaaaagcgattctagagccaattccatcactgtgaaaacaacccaggtcacagacccctcaggaaggactcaatcaatcacgaaaaagacaattaagaaaatcaatggttacgagtatgtcgaaactacaactacgactaagaatctagttccattgggcgattcacaacgccatttcgatgaatttagtgggaattacatgttgcaagatgacgacatcggagaggaacaaaatgccgataatattcacgacataatggaggaaaacgaaacagaaaatgagaattcatactctccggcagacaaaaaccatttgcaaggtgactctgagctaaacttggaaaaatctgattttccgcctgggtcttatttccaccataagtattcaacagacgttatgcctctagaagaagaaagcagtttgtctaatttcagtgacgcactagattatattccccccacaggccaacccaataataaatatattcataaaaaaagaaaaccaacgtcgacagcaagaaaacagaaacatcctgctgtgaccaatacggagccaaaggttaagaaaccattaaccgaagcagaaatgtacgtaaaggccctcgaagtcgctaaaagaaacgtctatcacacggatgtaccttcaaataatgtttcaattccaattgggggtaccaaacaaaggaaaagcagaatgggcgaaaaaatgactttaagaggcggcagtgatgctccaaccactgctgcaaagtctaataccgaggctcaatctaaaaaatttaccagtactttgcttcatagaagcgataaaaatgaaccgaatgaagggcgcaaccactcactgatgtcgtattccaaatcggaacaaccatcagagcctttatcagagtctaagtacgcaaacacagggctgactgatgaagaaatgtacgctcaagctttgaagattgcacaagctagatattacaattctcatggcattcaacctgacactatcagcactaccgataacagcaatgctgcagtcaagcccatccagaacagtgttgattattctgtacatcctgaaaacgttgtgtctaacaaacaaacttatacaggggagccacaacttccagtacacagcgaagtgcatgaatacgagacggttcccctgcaaaaaacgaaaacaggcggttctcccaaaaacaagttcaagagcatgtttggtaaggtgctccagttttcacaagaaaattatggttaccaaaacaagaaggaccaaggacaacgtgtcccggcggacgataccaccgaagaaagcttccaggctgcctcacccatggacggtgtcctcgccgccggatcctattcaaataacggtatgacaacaagttcaaccaccgatggttccctcgcacctcatcaacaacaaaccgagtccgctctttcgtcctcaaatgggctaagccagagcaacatacaccctccggtagcgtctgccaccacgagaacaaagactactgaacaacaagaaaccgtgaggtcttcctcctcgcttttacaggaccaaaccccacagcgtcaagaaaacgctaccgatccgacaacagctacaaccaccacaaccaccacgataacgaacgaaatgtccatcgctgaaccacccacatcactcgccatacccgctgaaacacccgttgtctcccaaccaacaatagtcaccgcaacaaataccactaagacggtacaagctcaagcccctcccacaaagcacaaaaagtccagttttttcactaaactgtttaagaaaaagagcagacgttaa

SEQ ID NO: 1782 - DNA, 969 bp, Saccharomyces pastorianus
atgtccatagtagcactgaagaacgcagtggtgaccctcatacagaaatcaaaaggtggcgccgaaaactcggactccaggggatctgaatcgactcccttgctagcaggcagcaataacaatagtacaagacttgataattcttcctcgtccagttcggatattatctatggtagaaatgcgacacaggatctggaaaactcgcccggttcgatagggaaagataacaggaatgaagatgatagctcggataacgaaaaggcgaacctggggttcttccagtcggtagaccctcgtgttattagtgatttgattattgggctgagcgatggtttgaccgtcccctttgccctgactgctggtttatcttcccttggtgatgcaaaattggttatcactggtgggtttgccgagttgatctcgggtgctatttctatgggtcttggtggttacctaggtgctaaaagtgaatctgattattatcatgcagaagtaaaaaaggagaaaaggaaattttatgataactccaacctgattaacagagaaatcgaagacatcctactggaaatcaaccctaatttttcagatgaaacaatcgtctcattcatcaaagacttacaaaggacgccggaattaatggtggacttcattatcagatacggaagaggtttagacgaacctgctgaaaatagagaacttatcagtgccgtcacgattggtggtggttacctaattggtgggctagtaccactactaccatatttctttgtgtcagacgtaggcacgggtctgatttactcaattatagtgatggttataacgttattctgctttggttatctgaagacaaaattatccatgggtagtagtagttcgacatccaagaaagtcacagaaggtgtcgaaatggtcgctgtcggtggtgtagcagcaggtgccgcgtggttcttcgttaaattacttggttga

SEQ ID NO: 1783 - DNA, 2457 bp, Saccharomyces pastorianus
atggatttgaaaagctcatataaaggcgtttcattgaaccccatttatgcagggagtagtgcagttgccacaatttcagaagatggtaaaatactggctacgccaattttagacgaaataaacataatcgatttgaccgcagattctaggaagattctacacaagatttctaatgaagatgagcaagaaattactgcattgcaacttacaccagatgggcaatatcttacatacgtatcgcaagctcaacttttgaaaatatttcaactaaagactgggaaagttgtcagatctatgaaaatatcttccccatcatatatcctagacactgattccacctcaacacttttggcagtcggtgggactgacggtagtattattgttgtggacattgaaaatggatacatcactcattcattaaaaggtcatggtggtactatctctagcttaaaattttatgggcagttggatagcaaagtatggttattagcatctggtgatactaatggtatggttaaagtttgggatctcgttaaaagaaagtgcctacacacactacaagaacatacttctgcagtgagagggttggatattactgaggtagaaaatagcgatggacctagccatctgaaattaatttctggtggtagagacgatattatcaatttttgggattttgatatgaaaaagaaatgtaaattaatcaaaactcttccagtaaatcaacaagtagaatcatgtggattcttgagcactcgtaacggcaaacacattatctatacagctggtggtgacgccatctttcagctaattgacctcgaatctggtgctatgcttaaaagaactaataaacctatagaagagctttttattataggcgtacttccaataatgagtgattcaaagatgtttttggtaatgtctgaccaaacattacaactaataaacgttgaagaagctttagagagtaaagaagaaataattcaggctgagtcaagcattgctggtaaccacggtattattgctgatatgaggtttgttgggccagagctaaacaaattggcattggctaccaattctccttcattaagaataataccaattccagatttgacaagcaccgatacctcattacctttggatgttgaaatttatgaaggtcatgaagatctactaaactcactagatgccactgaagatgggctatggattgccactgcatctaaggataattcagctattgtttggaaatataataaagacaccagcaaatttgacatctatgctaagtatattggccattcctccgctgttacggcagtcggattaccgaacgtaatgccaaagggataccctgagtttttattgacagcatccaatgacttaactatcaagaagtggaaaattccaaaaccaacccctattactgacgtacagattgtcaaggtatcagagtatacccgtcatgcccatgaaaaggacataaacgcattatcagtctctcccaatgattctatttttgcaacggcctcatatgataagacttgtaaaatttggaatctagaaaatggtgagttggaagccacactagccaaccacaaacgtgggctatgggatgtttcgttttgccaatatgacaagttactagcaacgtgctctggtgacaaaactgtcaagatatggtcattggatacttttagtgttatgaagaccttagaaggtcatactaatgccgttcaaaggtgctcctttattaataaacaaaagcaactagtaagttgtggggctgacggcttaatcaaaatatgggattgctacagtggggaatgtctaaagactttggatgggcacaacaacagattatgggctttgaatactatggatgatggtgatatgatcgtgagtgccgacgccgatggtattttccaattctggaaagattgtagtgaacaagaaaaagaagaagagctagaaaagagcaaaatacaagtcgaacaagaacagtcgctgcaaaattatatgagtcaaggtgactggacaaatgcatttctgttggcaatgtctttggatcacccaatgaggctgttcaacgttttaaagaaatcacttggcgaagcaagatccaagcaaggtggtaaagaaattgacccaaaggtgattttcaatgaagagttagaccatgcaatttctactttaagcgacgagcagttaatgttgctaatgaaaagatgtagagattggaatacgaatgctaggacccatgctatagcacaaagaactataaggtgcgttttgatgtatcataatatagcaaaattaagcgaaataccaggtatggtgaaaatagttgatgccatagttccatacacacaaagacatttcacaagagtggataatttagtcgaacagagttatatattagattatgcattggtggaaatggacaagcttttttga

SEQ ID NO: 1784 - DNA, 1110 bp, Saccharomyces pastorianus
atgaatcagagcgatcacagcctgatggatttaccattagaaatccatttatcattactagaatacgtgccgattgagctccgagcagttaacaaatatttttacgttttgcataactatagctataaagagaagagtttggcgtggatacctgaagaaaacgacctatgggcccttatcaagccctcgttgtgtcaatacatcaatagtttggacccgctaaggcagtacgctagacagattatcagaaatacggtagaaccaagtcctagtgtgccgctttccgtgaccacgttcatcgcagattcgtggtatatagtgtataacacgttgcgatatcctggaaagataatcaacaacggatgggacaaatttggcaaaaatcaagactcagctgcggtagaaaccaacagcagctttaataatcggcccaaggagagaaccctcatgcagtcattgactgcgttacctgtcgacttttggtccagaagaaaagatgaaccaacaccagtaaacgtttggttttatgtgaaaaacgcgcatgttgccagatacataccaaaagtcgttactgaaatagggatatgcaactacgggccgaagcaaatcgtggctagtgcaggttacatcaacgagctgatcacatcggagggaatatattgtattaatctggggcatctgcctagactatacaacgaacaaatttttgagggtacgggtacaacgcatcttcccctggagttgagaaccattgatagaacggattcagatgtttgtgttaatggcgatttagtactgttaggttatgactttattccgtacgaaatgactaaaccgtggttgctctttagaattgagcagataaatggtgctgaatccatattcaactataacgagtgctctttgtcatatgagtttgcatggggtttagcgtgtttacaatctgacgaaaacatcaaatttcccaaggacagaataagccggcgcaatttctcttataagcccttcaagttaataagaacctttgtatacaagcatccggaacaaaagcaagatctcgatcgagaaatagcattacccaattggaatacaccttatcttcgaagatga

SEQ ID NO: 1785 - DNA, 1227 bp, Saccharomyces pastorianus
atggccgttgcagttaaaaaggaaaagacaaagtttgctcccgtcagggaagttttatctaaagaagatcatggcaattacactaaatttcaggacacttcaaaactggaatggttctgtaggacatcaaaccacaagaaatttaagtcgcacagtttgttgaaagcggtaagaaaccctacagagacaagaatagagacacaaactctgtattttacggatctcaccaacgacaaatgcgggtttatccagttattatattctagtgttatggggggtatatataaagggtttcaattaaatttcaaagtctttaaagctagtagtggcgatgagtctgaagaaaacatagatatatgggaaagtttcaaaattgaaaacataaaagatttcgatacgctgagggtagaatcggacaatgttattttccacttcgtgccgctaaaggacccttcatctgacgggtttgctcaattatcgattaaaatagatattcctaaggggagcgcctctaattgtccattaaaagatctaaaagtcgacttagttgtcaatctacaagagggatttgtaataaatccggacggttctaattattatctggataagagcataagcttggaggatttggctaaacgaggctcttctgcgacttctaaaaggatgataagacatgtatttgttcctagagggttttgtaatggtaccatatcatacaagaaaaacggtcagccggtacatctaaatttgaaggacacacctatgttgtatcttgatgctgtccaggggctaatacctaacaaggcggccagtaaatggaatttcctttgtttcaacggtaagaagctttcaacaatgtgtattgaattcaccacaacaaaggagtatggtagtaccacagtaactatatgggctgtgagcgacaaggataaaatcttggaaatcggatccagtgtaaacgatcatgctgtaaagttcccaaccacacaagaggatgagcaaaatggttggaaataccctacatccgtcactttccctcgcgggtttgaagaagcaaatttaaggttagttaacaggtacgatataatgggtgaactacccgctatcatcaaatccattgctgagaatttagcaaacatgaaacctttcatctaccagttctgtcaaagatcaaaatacgaagatgatgaagggatttctattatcgaaagcacgttcatcagctag

SEQ ID NO: 1786 - DNA, 1188 bp, Saccharomyces pastorianus
atgtctgcttcatctccaaggggtggcgtggccacgacccccagtttgccaaggccaacgaataatgcatcgccaccgccagcatcgaatggattcaatgcaagaactctgtggccggatctgatagaaactccagaaaaccagtgggtttttgagtgcaaagaaattattgaaaaaatcggcaccgatgaaccgatcgcactggaaatgaaaagaaatatggaaaaatgcttgatgtatttttacacacttaagaagaaattgaatctgtttgatcatacatacaccgcatcgtgcattctgttttacagatattggtttgtatacggaataccaaccaccatcacggaatgcatccatatatcgcaaggaatcctggtcacggcatgtaaaacgatggagaataataggcctatcgaggcctatgtcaaggccacttgtgactttttgatgcagaatataccatccttgaagagtcgaacaaatatcgataaacttaaatgggaatttagagataaactagtaactaatgaaaaaaaaatactttgttcattcggattcgatttgaatattggtaatccaaaggaactaatcgaagagatatttagtggctattacagatttaacagagatcacaacctgccggatactttcaaaaaagccttcccaaaaattcttcaagaatcaagaaacttcatggtgcaagctgtcacccagcctgtttctttgttatgcgacggttacacattcattgcgttatctctcatatattgcggtctggagtataaaaagctggttgacaaagatttcaagtacccgaagaatttttttagggatagattccctattgaagtgacgtctgctaacttcgccaacatctttacggactataagttactggaggagaatttctttactttgaaaagtaacaaaggcgccaaattgcaaattgattcaggtatggtcgattcagtgattgacgaaagtaacggtgaagaaagtggagctttgaaactttcggatcccttcaattacgaattgatcagatccggcgaagtaaaagaagagtttttatctcatattgaaacgagggttaatgacctagtagaaaaggctaagcaggaaagtacgaagagaaaggccaacgagcctataacggcttcagatgctaagaaacagaaaatatga

SEQ ID NO: 1787 - DNA, 576 bp, Saccharomyces pastorianus
atgcagactctaaaatgtgttgtcgtcggtgatggtgccgttggtaaaacatgtctattaatttcctatacaacgaatcaatttccagccgactatgttccaacagtgtttgataactatgcggtaaccgtgatgatcggtgatgagccgtacacgctaggtttgttcgatactgccggtcaggaggattacgatcgattgagacctttgtcgtacccttccactgatgtctttttggtttgtttcagtgtaatttccccaccttcctttgaaaatgttaaagaaaaatggttccctgaagtacatcaccattgtcctggtgtgccatgcctagtcgttggtacgcaaatcgatttaagagatgacaaagtgatcatcgagaaactacaaagacaaagattacgtccaattacaccagaacaaggttccagattagcaagagaattaaaggctgtaaaatacgtcgaatgttcggcactaacacaacgtggtttgaagaacgtgtttgatgaggctatcgtggctgcgttagagcctcctgttatcaagaaaagtaaaaagtgtaccattttatag

SEQ ID NO: 1788 - DNA, 1362 bp, Saccharomyces pastorianus
atggaagaagcattgaaattggataaaaaatatccagaaactcttaaggatgaatttaacatacctacgtttaaatccatgggaatatcgtccgacaattcgccagtgacgtacttatgcgggaattcgttggggttaatgcccagatcaaccagagattcaatcattgcggaattggatgcatggagtaactgtgctgtggagtcgcatttttgtcatcctaaagaatccgagggcaagactccctgggtaaacattgacttacctattctgcctttgttggctcccattgtgggagcacaggaaaatgaggtcgcagcaatgaacagtcttactacaaatttgaattctttgttggtaactttttacaaacctaccgagaaaagatttaaaattctttttgaaaagggttcatttccatctgattattatgcgttttataatcaatgtaaaatacatggaatttcggaacctgagaatgttcttattcaggtcgaaccacgcaagggagagacttatattaaaacacaagatattttgcacattatagaagagaaccaggataaattagctttagtttgtttaccgggtgtacaatattatacagggcaatattttgacattggccgaataacttcttttgcacaccaattcttaggtattttggtcggatgggatttggcacatgctgtaggaaacgttccattacagctacacgattggggtgttgactttgcttgttggtgttcgtataaatacttaaattctggacccggcgctattggtggcttatttgttcattcgaagcacactacacctgaccctactaaagaacatttgccaaggttagctggctggtggggtaacgatgcttctaagagatttcaaatgttggagaatttcgaaccaattccaggagcattgggatttagacaatccaacccgagcgtcattgatacggtcgcattgaagagttcattggaaatttttgctaagtttgatggtatcagtgaagtccgcaaaagatccttgctattgacaaattatatggtggagttattggaagcatccaagtactacaagcatcctttgaagatggagaaattaccacacttctttacattactaactccaacggccaaagatgaagaccatggtgcccaattatctctttactttgattcagatactggtgaagagggcatcatgtctaaggtattccagtatttgcacgatcatggtgttattggcgatgcaagaagacccaatgtgatcaggttggcacccgcacctttgtataatacatttgcagatgtatacaatgcggtgaacgcactaaatcaggcaatgaataaattgtag

SEQ ID NO: 1789 - DNA, 1965 bp, Saccharomyces pastorianus
atgaaagtactatgcgtagccgagaagaactccatagcgaaggcggtttcacagatcttaggaggtggcagatctacatcaagggattctggctatatgtatgtgaagaactatgatttcatgttcagtgggttcccgtttgcaagaaacgggggcgactgtcaagtgaccatgactagtgttgcgggccacctgacagggatcgatttcagccatgattcgcacgggtgggggaaatgcgcaatccaagagttattcgatgcgccactgaacgagaccatgaataacaaccagaagaagatcgcaagcaacatcaagcgagaagccagggacgcagactacttgatgatatggacggattgcgaccgtgaaggggagtacatcggctgggagatatggcaagaggccaagagaggcaataggcgcatagaagacgaccaggtataccgggcggttttctcgcatctggaaagacaacacatactgaacgcagcaagaaacccaaataggttggacatgaagagtgtgaatgccgtggggacgcggatcgagatcgatcttcgagcaggtgttacgtttaccaggctgttgacagaaacgctgcggaataaactaagaagccaacccgtcacaagcaatgatggcggtagaacccgcagtggcaagaacgactcacaggtcgtgtcgtatggtacgtgccagtttccgacgctgggatttgtcgtcgacaggttcgagagaatacggaatttcgtaccggaggagttctggtacatccagctggtggtagaaaacaaggacagcggcggggtgacgaccttccagtgggacagaggccacctattcgaccgactaagcgtgctgacgttctacgagacatgcatcgagatcgctggtaacgtggcaaaagtggtcgacttgcggtctaagcccacatcgaagtacagaccgctgcccttgaccaccgtggagttgcagaaaaactgtgcccggtatctgcgactcaatgccaaacagtcgctggacgcggcggaaaagctgtaccaaaaagggttcatatcgtatcccagaacggaaaccgatagcttcccgcaggcaatggacctgaagactctggtggagaagcaggcgcaactagatcagcccaacgcgggcggcaaaaccgcatgggcagcatatgcggcatcgctgcttttgcctgaaaacactagcggcaaccgtttcaagcctccacgaagtggcacccatgacgacaaggcgcatcctccaatccaccccatcgtcagtctgggaccagacgctaacgtgtcccccaccgaaagaagaatatacgagtatgtcgcaagacacttcctggcatgctgctcagaggacgccaggggccagtccacaaccctggtgctggactgggccggcgagcggttcaccgccgccggcctcgtggtcctcgagaggaacttcctcgacgtctacccatgggcacgctgggaaaccaccaagcaactgccgcgcctggaactgcacgcgcctgtggacatcgcgaaggccgagatgaaggcaggcgccacggctccacccaagcccatgaccgaaagtgagctcatcatcctcatggacgccaacggcatcggcacagatgccaccatcgcagagcacatcgacaagattcaggtacgtaactacgtccgcagcgagaaggcaggcaaggaaacctacctgcagcccaccaccctaggcgtttccctcgtgcacggcttcgaggccatcggcctcgaagactccttcgcaaagcccttccagcgccgtgagatggagcaagacctgaaaaaaatctgcgatgggcacgcctccagggcagaagtcgtatctgacatagtcgaaaagtacaggaagtactggatcaagacgaatggctgtaagaataccctgctgcaagtttatgaccgcgctaagacatccatgtag

SEQ ID NO: 1790 - DNA, 1440 bp, Saccharomyces pastorianus
atgactgattcgggaccagagttcagtaaggaggaacactccaattctccgagcaagcaacacacaagaaataacagcatacccaaaaatacgaagttgagtaacatattgaatagctcacctaagagactagcagacaaatatgacaaaagaaaaagtgatttctcaaagggcttccttccgcataacatttcaaggacaccaaggagaaaatatacctacattctagttctcacttcactaaatggaacctttgaaaggaagcacgtaatggtaccattcaaaccggacgggctgaagttggggagacctgttgctaacagcaacaataactccaactcatcgctcaggggcggcaagaaactagattcacacgccttttcccaggttaggtccgataatggtaatttcgattcaagagtactttccagaaatcatgcattgttgagttgtgatccccttacggggaagatatatatacgagacttgaaatctagtaacggcacattcattaatgggcacagaattggttcaaatgacgtagaaatcaaagttggcgacgtgatagacctgggaaccgatatagatacgaagattgagcatcgtaagataagtgccacagtggaagagctcttcatacagcctttgctagaagcaccaatccctcaagaagaccttgatgttcatgactgtggtacgatttcaaaaagagaagaggctgctgctataacaagttatatatatggtgattccaacaacctggagttggaagaagttattttaggttccgagacagaaatactcagtggaattttcatcaataattgtattggtacaagcagcacgttatccaacgtaataaagacattagcaactgaaatctcgttttccaaatacgacaattctaagctacagtccatggaaaactttttaattagttatacaactcacctggaatacacaaataaacttttggtggaaaaaaatgaccagcaattagtaaagttacaaaacggattacgaaggaagctatcagaaaaatatgaaaaaatcatagaacaaaacagaaaccaaataaaacagttagaaagagatcatatgttctccaagaaatcattcgaagtcaaaaaaagaagaagcaatgaaaaacagaggaatatcgaacgggaaatagaagacttgaagaccaggttagaagtcgaacgatataagaactcacaaatactgaaaaagaacaaactaaaagggcaagaacccttaactgcatccaagaaaaataaagacgcacatgatacaaaaagtgttccaggcgtgaatcccaacgatgttggtagatttagcatcaaaaaatcattaagtgatcacttgacgttattgacatttggaacaatttccattgggatcatagctatcgtgttcaaattcttcactccaagctag

SEQ ID NO: 1791 - DNA, 966 bp, Saccharomyces pastorianus
atgatatgcataacgtgtatgcagcctgtagattccctctatacggtgtactcaaatgaccacatacagttgacagactgtccattctgccaagagatagtggataaatatgtggagattgacaatgtcctgttattcattgatcttttattgttgaaaccaggtgcatataggcatttggtattcaactctttggaattgcatctagcaaaatatccaaagggaaaaacgttaaaaaattgccaatctttgtatgatcgtatgcaagttctaatgtttaatttcaagaactggttttgtaaatttgatagattgaaccgcctctggcttttgctattatcatttgagatttatttaacgtgggtcaccgaggagagtaaatacatttactatatgaaccgtaacaataatgacggtaaacttattatgctttcaaagaacttaccagaaaccttcaaatgggactcgaccataatgcgtaacaccatcacaagtaaagtgtttacctggagcccatcattacagtacctttacttcgcaagttattgtatccttgatgtttcattatttcacacacttactcggcgcttcatactaaaaaagctgcactggggccagaactttgcttattcgaaggacatcatatcctatacgatcctgttatcatatggggccaaaattttccccattttaatgttaatttggccttatgataccctcatttcaatgagcattataaagtgggtggccaacttttacatcatcgaatcactaaaaattgttactaaactctcctactggagcatcataaaagtctttataactgtttcgttcgtacggtactgtttagttaagccagtacttatattatttgtggccaaattcaacttttccattataaaaaatttaatatgccaagagtttatgttactactacagaaatcaggaacttatttacttttatga

SEQ ID NO: 1792 - DNA, 1164 bp, Saccharomyces pastorianus
atgaacaccgcaaccacgactgaaactgcctccgagcaagcctctcaccctgccacgatatattgtgccggtttgcaatgtggtaaggagacctcctcccagatgaaatgtcctatttgtttaaaacaaggtattgtttccgttttttgtgacacagagtgttatgaaaacaactataaggctcacaaggccttgcacaatggtaaggacgattcgaagagcgcttacgatcctttccccaaattcaagtattctggtaaattaaaggcatcctatcctttgactccaaagagatatgtccctgaagatatccctaaaccggattgggctgccaatggattaccgctcattgaacaaaggaatgacagattgaataatatccctgtttataaaaaggagcaactaaaaaaaatcagaaaagcatgtattctcggtagagaggtccttgacgccgcagctgctgaagtcagaccaggtatcaccactgatgaattagacgaaattgtccacaacgaaaccatcaagagaggtgcttacccatctccattgaactactacaatttccctaaatctctttgtacctctgttaatgaagttatctgccacggtgtgcccgacaaaactgtattgaaagaaggtgacattgttaacttggacgtttctctatactatcaaggttatcatgccgacttgaacgaaacctattatgttggcgacaacatttctaaagaagctttaaataccactgaaacatcaagagaatgtttgaaattagccatcaaaatgtgtaagccaggcaccactttccaagaattgggtgactacattgagaaacatgccactgaaaacaaatgttctgtagtgagaacttactgtgggcatggtgttggtgagtttttccattgttccccaaatattccacattacgctaagaacagaacacccggtgttatgaaacctggtatggttttcacgatcgaaccaatgattaacgaaggtacctggaaggacatgacctggcctgatgactggacttctaccactcaagatggtaaattgagtgcacaattcgaacatactctgttagtcaccgaacatggtgttgaaatcctaactgccagaaacaagaaatctccaggtggtccaagacaaagaattaaatag

SEQ ID NO: 1793 - DNA, 1830 bp, Saccharomyces pastorianus
atgctaaaaataaaggctcttttctcaaaaaagaagccggatcaggctgatttgtctcaagaatccaaaaaatcattcaagggtaagactagatcgaacggtgcaaacagcaatgttttcgaaaatgcctcttccaccaaaaaaaggcagcaagaaggaaacataacgcaatactcgaacgccattgctgatgaccgtcatatgaagtctttaactgatgagcttgtaaacacattagattcagactcctctccgagtgataacattatcacagaaaatatagaaaccgttccttctgttccaatcatcgatgtttacaaaagcagtgacgaccaactgagttacgagccatcaatgtctgatgaatcccttccaatacaggatgggattatcagtgacagccaagatgacgatactgacgatgaagagctggaagatgaaactcccgaaaagtcatttcttgagcaaaaggagttaataggttacaggctaatcaataaaattggtgaaggtgcattctccaaagtctttagagccatccctgctaagaatagttctaatgaatttttaactaaaaactacaaagctgttgccattaaagttatcaaaaaggctgatttatcgtcgatcaacggtgaccaccggaaaaaagataaaggcaaagatggtaccaagacatcatctagagatcaagttttaaaggaagtcgcactacacaagacggtctcaactggttgttcgaaaattgtctcgttcatagatttccaagaaagcgacagttactattatatcattcaagaattgctaactggtggagaaatctttggagaaattgtcagattgacctatttcagtgaagatttatcaagacatgtaatcaaacaattagcactggctgttaaacatatgcattcactgggcgtggtgcatcgtgacatcaaacctgaaaatcttctattcgaaccaatcgagttcactccctctttaaaaccaaagtttaggaaatctgatgatcagcacacaaaggcagacgaaggcatattcacaccagaaatcgggggtggtggaatcggtatagtgaaactagctgatttcggtctgtccaagcaaattttttccaagaacaccaagaccccttgtggtacggttggttatactgcgcccgaagtggtcaaagatgaacattattccatgaaagtagacatgtgggggattggctgcgttttatacacaatgttatgcgggttcccgccattctacgatgagaaaattgacactttgactgaaaagatatcaaggggcgagtatactttcttaaaaccttggtgggatgaaatcagtcccggtgccaagaacgcagtgggcaaactactagagctcgagccatccaggagatacgacatcgaccagttcttggacgatccatggttgaactcatacgattgtttaccaaaggaaggtaactctttacaaaagaaagcaggtacttctgagagacgccatccacacaaaaaacaatatcaactatttcaaagagactcttccatactgttttcgccggccgctgtagctatgcgcgacgcctttgatatcggtaacgcggtgaagcgtacagaagaagatcgcataggaactcatggagtattaggctcgcttgctgaagacgaggaggcggatgacaactacaacgccggtctgacaaatgaaaaacttgaacaaagtatgttccaactaactttgaacacctcgactattctacaaagaagaaagaaagtccaggagaacgatgtaggtgccaatattcccatcggcgccactatccaagaatag

SEQ ID NO: 1794 - DNA, 3135 bp, Saccharomyces pastorianus
atgtctgattcccagcaatccattaaggttctagaagaactcttccagaagttatctgttgccactgctgataacagagatgaagttgcttctgaagtatcttcttttttaaatggtaacatcatcgaacatgatgtcccagaacacttcttcagtgaattggccaagggtatcaaggctaagaagactgctgctaactccatgcaagctgttgctcacattgccagtcaatctaacttgtccccatctgtcgaaccatacatcgtccaattggttccagctatttgtgaaaactccggtcacaaggacaaagaaatccaaaccattgccagtgaaactttggttgccatcgtcaacgctgtcaacccagttgccatcaaggctttgttgccacatctaactaaggccattattgaaaccaacaaatggcaagaaaagatctctatcttgagtgccttctccgccatggtcgatgctgccaaggatcaagtcgctttgagaatgcctgaattgatcccagttttgtctgaaaccatgtgggacactaagaaggaagtcaagtctgctgctactgccaccatgactaaggccaccgaaaccgtcgacaacaaggatattgactgtttcattccaagtttgatccaatgtattgctgacccaactgaagttccagaaaccgttcacttgttaggtgctaccactttcgttgctgaagtcaccccagctactttgtccatcatggtcccattgttgtctagaggtttgaacgaaagagaaaccggtatcaagcgtaaagctgctgtcattattgataacatgtgtaagttggtcgaagacccacaagttattgctcctttcttgggtaagttgttgccaggtttgaagagtaactacgctaccattgctgacccagaagccagagatgttactttgagagctttgaagacattgaagagagttggtaacgttggtgaagacgacgttatcccagaagcttcccacgctggtgacgtttctactactttgcaagttttccacgacttgttgaaggaagaaactgttgctccaagatttaagattgtcgtcgaatacattgccgctatggctgctgatttgattgatgaaagaatcattgatcaacaagcttggttcactcacatcactccatacatgaccatcttcttgcacgaaaagaaggccaaggacatcttggatgaatacagaaagagagctgttgacaacattccagtcggtccaaactttgatgatgaagaagacgaaggtgaagatttatgtaactgtgaattctctttggcttacggtgctaagatcttgttgaacaagacccaattgagattgaagagagctagaagatatggtatctgtggtccaaacggttgtggtaagtccactttgatgagagctattgctaatggtcaagttgatggtttcccaacccaagaagaatgtagaaccgtctacgttgagcatgatattgatggtactcactctgacacttctgtcttagacttcgttttcgaatctagtgtcggtaccaaagaagctatcaatgacaaattgattgaattcggtttctccgatgaaatgatctctatgccaatctctgctttgtctggtggttggaaaatgaagttggctctagcaagagctgtgttgaagaacgctgatatcttgttgttagatgaaccaactaaccatttggataccgtcaacgttgcttggttagtcaactacttgaagacttgtggtattacatccattaccatttcccatgactcctctttcttggataacgtttgtgaatatgttatcaactacgaaggtttgaagttgagaaaatacaagggtaacttctccgagttcgttaagaagtgtccagctgctaaggcttacgaagaattggctgccaccgaattggaattcaaattcccagaaccaggttacttggaaggtgttaagactaagcaaaaagctattgtgaaggtttccaacatggaattccaatacccaggtacctctaaaccacaaatcactgacattaacttccaatgttctttgtcctcaagaattgctgttattggtccaaatggtgctggtaagtctactttaattaacgttttgaccggtgaactattgccaacaaccggtgaagtttacactcacgaaaattgtcgtatcgcttacattaagcaacatgctttcgctcatatcgaatcccatttggacaagactccatctgaatatattcaatggagattccaaactggtgaagatagagaaaccatggacagagctaacagacaaattaatgaagacgatgctcaagctatgaacaagatcttcaagatcgaaggtactccaagaagaatcgctggtatccactccagaagaaagttcaagaacacttacgaatatgaatgttctttcatgttgggtgaaaacattggtatgaaatctgaaagatgggttccaatgatgtccgtcgacaacgcttggttgccaagaggtgaattggtcgaatctcactccaagatggtcgctgaagttgatatgaaggaagctttggcttctggtcaattccgtccattaaccagaaaggaaattgaagaacattgtgctatgttgggtttggacccagaaattgtttctcactccagaattagaggtttgtctggtggtcaaaaggttaagttggtcttagctgccggtacatggcaaagacctcatttaatcgtcttagatgaacctactaactatttggacagagactctttaggtgctttgtctcaagctttgaaggatttcgaaggtggtgttattatcattactcactctgctgaattcacaaaggacttgactgaagaagtttgggctgtcaaggacggtagaatgactccatctggtcataactgggtcagtggtcaaggtgctggtccaagaatcgaaaagaaggaagatgaagaagataaattcgatggtatgggtaacaagattgccggtggtaagaagaagaagaagttgtcttccgcggaattaagaaagaagaagaaggaaagaatgaagaagaagaaggaactgggtgatgcttacgtttcttctgacgaagaattctaa

SEQ ID NO: 1795 - DNA, 705 bp, Saccharomyces pastorianus
atgaggtttttaaagggagttgtgctttctctggctttttctttgtataaggtacgtgctacggcagaagtaggatcagatgttaatgtggaaaatgaaaagccacctgaaggactatcgtgggaagaatggcatatggaccatgagcatcagttgaaggactacacgccggaaactttctttgcactacatgatgttaagaagaagggatacttagatgaaagtgatattctgtctctctacgggctgaaccgtgatgaaatcgtggggtccggtgatggtatgggccagcatgatgaatctgaaaaagtggacaatgctatggccaagcgtgtcgttaactttatcatgaagctattggatgttgacgatgatacaaaaattgcaaaggaggagtatttaaaatatgctaagaaaggaaacaagttccctgatcttggcgttggtgtaggacaccattccggttttgaactagagtatgaaatacatcactggaacaagttccacaaggacgaagatccggacgtcaaggtcgttcacaaagaagatattgaacacgagttacttcatcacgaacatgaaatagagcacgaagaagaaatccaaagaggcgcctctagagctacagtgataactgatgacgagctagaatccaggatagaattgaaaaacatacccgagaaattcaagaacgggattttttaa

SEQ ID NO: 1796 - DNA, 594 bp, Saccharomyces pastorianus
atgaggttactgcaattgtacgaagtcagcttgaaaagaaggcccaagacgactaacgcgattatgacgggtgcattatttggagttggcgatgtttctgctcaatttttgttccccagttccaagatagacaagggttatgactacaaaaggacagctagagccgtcgtctatggttctttgattttttcctttataggcgataaatggtacaagatcctgaataataagatatatatgcgcaataagccacaatatcactggtctaatatggtcttgcgagttgcagtggaccaattagcgtttgcgcccttggggctgccattctattttacatgcatgtctatcatggaaggtagatcgtttgatgtggccaaaatgaaaataagggagcaatggtggcccacacttttgaccaactgggcagtttggccagttttccaagcaatcaacttttctgttgttcctttacaacatagattattggccgttaaccttgttgctatattttggaatacctacttatcttataaaaattcaaaggtcacggaaagtaaatgggtacctgtgcattatcctcccgtggtcgaataa

SEQ ID NO: 1797 - DNA, 1710 bp, Saccharomyces pastorianus
atgattaataaagcgtttttcaacagattaccgtttgaggtattccgtcggtatgtaaggacgagtaagagtatccctcaaagaaaccgtaagacaaagaaggcactcctgatgggaggttcgatcacatcagccgtagcactgtataattttaacgacacattccacgactccgttaaacatacagcactgacaagtaaaagggttgccgttgtcacacaggctaccactcgttgtttttatcattataagagggctctgaataagacttatgagagtaagaaggagcgagaagtggccttgaacgactgtcataagatgtgtgctttgatcacgttgcaagcgctacgatcaaatggtgggatttacattaaattgggtcagcacattggtgccatgacgtatctgttgcctaaagaatggacggataccatgataccattacaagatcactgtcctgaatcaacttttgaagaaattaatcaattatttgaagaagatttggggaccagtattgaaaatatgttttgggaattcgacaagactccgataggtgtagcatcgttggcacaggttcatgtagccaagctgaaaagtagcgatggtaagggtgcgagtgtagctgtcaagtgccaacacccgtcgttgaaggagtttataccattggacgttgtgttgacgagaacagtgtttgaaatgttggatgttttcttcccagattacccactcacatggcttggtgatgagcttcaatcatcgatatacgtggagttgaatttcgacaaggaagccgaaaatgcagaaatgacacgtaaatattttagtaagttcaagagacaaactgcgttgaaaatacccaaagtcatcgaaagccataagagaattttgattatggaatacgttggaggtaaaaggctggacgacttgcaatacatcgacgggcacggaatatcccgaagcgaagtatcgagctgtctttcgcacattttcaataacatgatctttactccgaatgtgggaattcattgcgaccctcatggggggaatttagcaatacgatctgtaaaacccggtaaggataatggataccataattttgagattatattatttgatcacggactgtataggtaccctagcaccaggacaaggagactgtatgctaagttctggctatcgctattattcgacaaggaccaagcaaagatgaagaaatatgccaagggatttgccaacatcacagatgagcagttcccactcttggcggccgctataacggggcgtagtgtagacgcagcactgaactatgacatttccacgagtcgaacacaagaagagatggacgtcatggcggacgggctcttggagggaacattgctgagcgacttgatgagcattttatccagaatccccagcgtggtgttgctgattttgaagactaacgacctgaccagacatcttgacgagtgtttgcaaaacccgctggggccggaaagaacgtttttgatcatgacgcagtattgcgccaagacggtttatgacgaaaaagtcgaaaggatcgactcggagtatggcaaatggtccatcagttggatgtgggcgaatttcacgaactggatagtttacgagaggcgtatcaaccagttgtatttttacgattttgttttatggtggaaaaatattattccgaaggcatggttatcatcttga

SEQ ID NO: 1798 - DNA, 567 bp, Saccharomyces pastorianus
atggtgccgaatttggacttggaaactgcgatacagataatatcctcactggagagccagctcaatgagattgagactgccaccagggagtacgaaaacgatttggagcaggtcatctcaaacctgaaaaaggagctcttggaaagccacacgcaacaaaagtccagtaaaaagcaaataaccggcttggagatacaggtggacgagttggaaaatgaaaatattcaactgagaaacaggatagaaacactgcagctggagagtgaccgacgactagaacgcaacgttctcctggaacacgagttgctcgacaccaaggacgctttgcaaagactgaaagtgaacaaggaagaaagcaccgccggcgaggccaaaagaaacaccggcccattgcccacccaaaataaaaaaatgaaactgttcaaagacaccattaaagtctccaccacctgctccacgctgtatttacaaaacatgacgaaaagcaacgccgtcatgaaccactgtaacatcccgaatacccagataacgcaatccactgtaatagcaacaacatcgtccgtttaa

SEQ ID NO: 1799 - DNA, 648 bp, Saccharomyces pastorianus
atgagcagatctggaaagtcgttgacaaagtacaagattgtttttttgggagaacaaggtgttggaaaaacatctctgattactaggttcatgtacgatacattcgatgatcattatcaggccacgatcggtatagacttcctttccaagaccatgtatttggatgacaagacaatcagactacagttatgggatacggcaggtcaagaaagatttagatcgttaataccttcatacattagggattcaagagttgctattattgtttacgacatcaccaagagaaaatcttttgaatatatcgataaatggatagaagacgttaaaaatgaaagaggggaagaaaacgtaatattgtgtattgttggtaataaaagtgatttatcagatgagagacaaatctccaccgaagaaggagaaaaaaaagctaaactactaggtgctaaaatcttcatggagacctctacaaaggcaggttacaacgttaaaaacctattcaagaagattgctaaatctctccctgaatttcaaaacagcgaatcaacgcccttggatggggaaaatgtcaacagtggaaatcaaaacaaaccaggcgttattgatatttccacaaccgacgaacaagaaaatagtggctgccagtgttag

SEQ ID NO: 1800 - DNA, 195 bp, Saccharomyces pastorianus
atgtctggtcgtcaaggtggtaagatgaagcctctaaagcaaaagaagaagcaacaacaggatatggatcctgaagaagttgctttcaaagaaaagcaaaaggccgacgctgctgctaagaaagctttgatggctaatatgaagagcggtaagcctttagtcggtggtggtattaagaagtctggtaagaaataa

SEQ ID NO: 1801 - DNA, 204 bp, Saccharomyces pastorianus
atggattccaagaccccagtcaccttagctaaagtcatcaaagttctaggccgtaccggttctcgtggtggtgttactcaagttcgtgttgaattcttggaagacactacccgtaccatcgtcagaaacgttaagggcccagtcagagaaaacgacattttggtcttgatggaatctgaacgtgaagctcgtcgtttgcgttaa

SEQ ID NO: 1802 - DNA, 645 bp, Saccharomyces pastorianus
atgattaagtcaacgctaatttatagacaagacgggctgcctctttgtacgtccgtggacaacgaaaacgatccctcactgtctgaacaaaagcaaaaagtgaagatcgtggtctccagaatgacaccacagtccgccaccgaggccactttagaaagtggctcttttgaaatccactacttgaagaaatccatggtcttctattttgtcatatgtgagtccggatacccaagaaacttagcattttcataccttaacgacatagcccaggagttcgaacactcctttgccaacgaataccccaagaccaccgtgaggccctaccagttcgtcaacttcgacaacttcctacaaatgaccaagaaaagttacagcgacaagaaagtccaggacaacttggaccagctaaaccaagagctggtgggagtcaaacaaatcatgtccaaaaacatcgaagatctgctttacagaggcgattccctcgacaaaatgagcgacatgagttcctccctgaaggaaacctccaagagatacagaaagtccgcgcgaaagatcaacttcgatctcttgattagtcaatatgcccccattgtcatagtcgccttcttctttgtcttcctcttctggtgggtcttccttagatag

SEQ ID NO: 1803 - DNA, 1053 bp, Saccharomyces pastorianus
atgtcccagctcccaaccgattttgcctcattgatcaaaagatttcagtttgttagcgtcctagactctaacccgcaaaccaaagtcatgtccttattggggactatcgacaataaggacgcaatcatcaccgccgaaaagacgcactttctgttcgacgaaacggtaagaagaccctcccaagacggtcgttctaccccggtcttgtacaactgcgaaaacgaatattcctgtattagcgggatccaggaactgaaggaaatcacctctaatgacatatactactgggggctgtctgtgataaagcaggacatgcaatccaaccccaccgccaagctgaacttgatttggcccgcaacgccaattcatattaagaaatatgaacagcagaacttccacttggtcagagaaactcctgaaatgtataagagaatcgtccagccttacatcgaagagatgtgtaacaacggtagacttaaatgggtcaacaacattctttatgaaggtgccgaggcagaaagagtcgtttacaaagatttttccgaagagaataaagacgatggattcctaattttgcctgatatgaaatgggacggtatgaacctggactctttgtacttggttgccatcgtttatagaactgacatcaagacaataagagatttgagacactgtgacaaggaatggttaatcaacctaaataacaagatcagatccattgttcctggttgttataactacgcagtccatcctgatgagttgagaatattgattcactaccaaccctcttattatcatttccacattcacattgttaacataaagcatccaggtctaggtaacagcattgctgccggcaaagctattttgttggaggatatcatcgaaatgttgaattatttaggacccgaaggttacatgaacaagacaatcacctatgctattggtgagaaccacgatttatggaaaagaggtttggaggaagaacttaccaaacaattggaaagagacggtatcccaaaaatacctaagattatgaacggttttaagtaa

SEQ ID NO: 1804 - DNA, 3549 bp, Saccharomyces pastorianus
atgtcaggcttcaacttatctgagtatctgaccaagtttcaaacaaccgatcgggccacataccctcgtttggaagatccatcgagagaattaaatgtcattatagaccagttggcggtttcccccgaacaaatagatgccaaccaagagacgcttgaagcattaatagacctctgccatgactttccacatttatcgccgaaattgcaaactcagttaagttatttggtgggttcatctctgtcgaatctgtccaaggaaatcaacgctaatttgtcgtccaatattaatttcaatgagatcagcgaactgataccgcaatggaaaaggcatttggaagaatacggctaccttattcaagtgcttttgacgtttttacaagatgagttacataaagtctcatcacagtctactaacttaaatcgttctactaaaaatggtaaaaacgatagtgcaaatgttgaagtatttagaagagattgcaatcaattggaaagtttgcttgaatctataataaagctcctggaaattaatttatctaaaatttttcaaacgacacctgaaaaggatctgttcctcggtttgtttacacggccattgtttgtagtattggagatcgaatcagtgacaaaactatcatctatgaaaatgtttattcaaaaaattttggcaatatctgtcaaaaatcacggtcaaagttcaagcatacaaggttctttaatgacaaatttaacttactttcttcatttgtcgacttttaatgcagaattactaaaattattgaatgatgaatacaactacccacagctaacagagaatattttgaaagaaatcagtacaagggtgtttaacgccaaggatacgactgggccaaaggcaatatcaaactttttgatcaaactatcagagttatcaccaggaatcatgcttcgacaaatgagccttgtaatcactctgctcaacaacagctctataacattgagatgttccgtcgtagaagcctgtgggaacattgtatctgaactggctgaaaatgctcaaagcttagagcaatataagcaacaaatatccgtattgattgaattactggaagaaagatttcaggattcaaacccttacgttagaacgaaggcaatacaagggtgctcgaaaatctgtgacttgagttcaaaattcaacaagagtaaagcaaagtttactgccctggcagtaagatcattacaggaccggtcctctttggttcgtagaaattcagtaaaactactatccaagttactgctgaagcatccattcaaagcaatacacggtagtcagttaaagttgagtgagtgggaaaaatatctcaatgtatctgagacacaattaaaagtttctttagagaaacttgaatcacaagaaactttggatgaagcaattgaaaggtccatgattgaggatgaagtggaggagggtgaagaagaacataggacgggactaaaggaatctttcaacaaaggaccagatctttctagaatagaaatggaggtagagaatataaatgcaacaacaaatgcggatgtaatcatgaaactaaaactaatggttgtttactacaaagatgccatttcctttattaaagaaatacacaaaagtatcgaactaatatctaatctactgttctccaaaaatagaaatgaggtattggaatcaatggactttttggtcctagcagacgcgtatgatgttgagttaagcgagtttggtataaaaaaaatgctgcatttggtttggatgaaaggcacaaatgacgaaggaacaagtatatcagcgcacttgatagaatgttacaagcagttgtttttaaccgcaccagatggttgtgatatgcgagagaagaccgcacatattgccaaaaatttgatcaacttgaccgtcggcgcatcgatcgcagacttggcttctttggaacaattattgggaatgatgtacgaacaaaaaatgatagaccagaatgtcattaatatcctttgggctatttacaattcagcatcaaagactaatacagaattggaaaaaaccgtgaacaacagtgagccagataacaccaatgctgaaaggaggttttctaatgagcggatccatggttctattattattttaggaatgctatcgctggcagataacgaaatcgcgttaaaggggttagagtcattactgaacattgggctcggcagtgttggtatcaaagatttgacactctgtcggtattcttgtttaacattggagaggatggtcccaaagaaaagtactattatcaccaaggcaataaaccaagagcatgaagatgttgcggtcaaaaagctgtatgctatgattatcaattatactagagataatgaatattatcctatgtgtgaacaagcgcttagcgcattgtttacaatctcctccaagcccgacatattagctacggatctgataagggaaaagactatgatgacgtttggtaagcctgaaggagatgattctattctgtcatttgaacaatcctctagagtggtatccctcagtcaattgctgttcgttgttggacaagtagcgatcaaaacgcttgtttatttggaaaagtgtgaagcagaattcaagaaaagaaagattgaagcagaaactcggaaaggtaagggcaaaaatcaagatggtgatatgaccaatactacgcaagataatggtgacgacaaagaactagaaatgattggaggtactaatgaagacgatttcacagatgcaattcaatttgtaaaggagaatgaactattatttggagacaaatctatcctgggaaaattttgccccattgtggaagagattgtttctaattcaagtaggtttggtgatccgatgttacaaagaacggcaaccttatgtttagaaaaactaatgtgcttgtcttcgcagtattgtgaaaaaaggctaccgctattaattactgtaatggaaaaatcgcctgatcctactattcgctcaaacgctgtcttggggctaggtgatatggcagtatgcttcaacaatctggtagatgagaatacggattatttgtaccgtcgtttacatgatgaaaatttgatggtgcaaaggacatgtttaatgaccgttacatttttgattttagctggtcaagttaaagtgaagggacaattaggagaaatggccaaatgtttagacaacccagatcaaggtataagcgatatgtgtagattatttttcaccgaattagcttctaaggacaacgccatctataacgggttcattgatatttttagtagtttatcgtccgataatttattggggaaagaaagctttaagaagatcgtgaagtttttgataacattcattgataaagaaagacaccaaaagcaacttaatgagaagctagttggaaggttgaagaaatgtgaaacgcaaaagcaatgggatgacattgcattcgtgttaaataatctaccatataaaaacgaaactgtcactgcagtattggaggaaggtttcaaagtggtttctgcaagggaataa

SEQ ID NO: 1805 - DNA, 2328 bp, Saccharomyces pastorianus
atgtcatttgatagaccagaaatatacagtgctcccgttttacagggagaatcgcctaacgacgatgacaacacggaaatcattaagtccttcaagaatttcatcttggagttcagactggattctcagtttatttacagagatcaactgagaaataacatcctcgtcaaaaactattcattgaccgtcaacatggaacatttgattgggtacaatgaagacatttacaagaaactgtctgatgaaccttcagatataattccattgtttgaaactgcgatcacacaagtggccaaaaggataagtattctaaacaaagcgcagtccggtaatacgaataatcaggacggggagggcacaattgcggatacagactcgctcctgctgagctctttaccaacatttcaattagttttaaattccaatgcaaaccaaatacctttgagggatttagattccgaacacgtctccaagattgtccgtctttcaggaataataatctcgacttcagttttatcttcccgtgccacctacctttctataatgtgtagaaattgcagacatacatcatccataacgatcaacaatttcaattctatcacagggaatacagtcagtttacctcggtcatgtttgtctactgctgagagcgaatcctctatggccaatgaatcaaatattggtgatgaatcaacaaggaaaaattgtggtcctgatccttatattattatccacgaatcttcaaaatttattgatcagcaatttttgaagctacaggagattccagaattggttccagtaggtgagatgcctagaaacctgacaatgacttgtgatcgttacctaaccaacaaagttattcccggcacaagggtcactatagttggtatatactctatctacagttccaagaatggtgctggatcagggagaagcggtggtggaaatggtggaagtggtgttgctatcagaactccttatattaaaatcctaggtattcaatcagatgtggagacttcctccatttggaattctataaccatgttttccgaagaagaagaagaagaattcatgcaactgagtagaaaccccaagctttatgaaattttgactaactccattgcaccctctatctttggtaatgaagatatcaagaaagccatcgtttgcttattgatgggaggttccaagaaaatattgcccgatggcatgagattaagaggtgatattaatgttctactattaggtgatccggggactgcaaagtctcaattgctaaaatttgtggaaaaggtttcacccattgcggtctacacgtcaggtaaaggttcttctgcagcgggtttaactgcgagtgtccaaagagatccaatgacaagagaattctatctagaaggtggtgcaatggttcttgctgatggtggtgttgtttgtattgatgaattcgacaaaatgagagatgaagacagagttgccattcatgaagctatggaacaacagacaatctccattgccaaggcaggtataaccacggtgttaaactccagaactagtgttctagcagcagcaaatcctatttatggtcgttatgatgatttgaagtctcctggtgacaatattgattttcagaccactattttatcccgtttcgatatgatttttattgtcaaggatgaccataatgaagaacgtgatatttctatcgccaatcacgttattaatattcataccggaaatgcaaatgccatccaaaatcaacaagaggaaaatggtatggaaattagtatcgaaaaaatgaaacgttatatcacgtattgtagattgaaatgtgcaccaagactttcaccgcaggccgctgaaaaactatcttcgaattttgtcactattagaaagcaactattgattaatgaattagaatccaccgaaagatcgtctatccctattaccattcgtcaattggaagccattattagaataacagaatcactggctaaactagaactaagtccaatcgcacaggaaagacacgtcgatgaagcaattagattatttcaggcatctacaatggacgctgcctctcaggatccaatcggtggtttaaaccaagcaaatggcacgtcattatcagagatccgtcgttttgaacaagaattgaaaagaagactacctattggttggtctacttcttaccaaactttaagaagagaatttgtcgacacacatagattttctcaattagctttggataaagccttgtatgcgttggagaagcatgaaacaattcaattaaggcatcaaggtcaaaatatatacagaagtggagtatga

SEQ ID NO: 1806 - DNA, 1785 bp, Saccharomyces pastorianus
atgagtagcgaggataagtctgtacaaggcgcttatatcgatgactctacatctttcgaatcatttcaccttgactctcgtttattacaagctattaagaacacaggattccaaaatccaacactaatccaatcacattccatttctttggctttacaggagaagagggacattattgcaaaggcagctaccggttctggtaagactttagcttacttgatccctgttatccaaactattctagagtacaagaaaacaattggtaacgaagaagaaaatggcactctaggtattatacttgttccaacaagagaacttgctcaacaggtgtataacgttttagaaaaactagtcctatactgttcaaaagatataagaactctgaatatatcatctgacatgtctggttccgttttgaatactttactaatggaccagccagaaatcatagttggcacacctggtaagttgttggacctactccaaactaagattaattccgtttctttgaatgaattaaaatttctagttattgatgaagtggatttagtattaacatttggttaccaagacgacttgaacaaaattggtgaatacttacccttgaagaaaaaattgcagactttcctaatgagtgcaaccttaaacgatgatatacaagctttaaagcagaaattttgtcgttctccagctattcttaaattcaatgacgaagaaataaataagaatcaaaacaaactgcttcaatactatgttaaagttagcgaatttgacaagttcctattatgttacgttattttcaaacttggcttgatcaaaggtaagacactaatttttgttaataatattgacagaggatatagactcaagctagtcatggagcaatttggtatcaaatcttgtatactaaacagtgagctacccgttaattcgaggcaacatattgttgatcaatttaacaaaaacgtctaccaactactaattgctacagatgacaccgagtatatgaaagaggaggatgaagacatagaagaaggacataatagcgagaatgaacaggagaggccttcgaaagtcgaaccagaaaatggtgaaaagccaagtaagaaaaggaaggtccaagtgaagaaagacaaggaatatggtgtttctcgtggtgttgattttaagaatgtagcatgtgtcctaaattttgatttgccaacaacagccaagtcgtatgtgcatagagtaggtagaactgctcgtggtggtaaaaccggtacagcaatttcatttgtggtcccattgaaagaatttggtaagcataagccgtcaatgttgcaaacggctaaaagagatgaaaagattctttcgcgtatcatcaagcaacaaagtaaactagggttagaattgcaaccttacacatttgaccaaaaacaagttgaagggttccgttacagaatggaagacggtttccgtgccgtgactcaagtcgccatcagggaagccagagtgaaagagttgaaacaggaattactggcaagtgaaaaattgaaaagacatttcgaagaaaatccaaaagaactacaaagtttgaggcatgataaagagttacatccagcaagggtgcaacaacatttaaagcgtgttccggattatttgcttcctgaatcagccagaggaaatggggctaaagtcaagtttgttccgttccacaatccaaagaagcgtcatccacatagaaagggtaaagttggtaaacccaaaaatggtaaagttgatccattaaaaaacttcaaatga

SEQ ID NO: 1807 - DNA, 2340 bp, Saccharomyces pastorianus
atggaacaatcaaatacgacaaaattcaaattcttatcattgggaggaagtaacgaagtcgggcgatcatgccacgtattacaatacaagggcaagacagtgatgcttgatgcagggattcatcctgcttatcaagggctagcttcactgccgttttatgatgaatttgatctttccaaaatcgacatcttattaatttcgcatttccatttggatcatgctgcttcacttccttatgtgatgcaaaggacaaattttcaagggagagtttttatgacacatccaaccaaagccatttatagatggttgctacgagattttgttagagttactagtataggttcttcatcctcttcaatgggaggcaaagacgaaggcttattttcagatgaggacttagtagagtccttcgataaaatcgaaacagtggattaccattcgactgtggacgtcaacggcatgaaattcacggcattccatgcaggtcatgttttaggtgcagcaatgtttcaaatagaaattgctggtttgagggtgctatttacgggggactattcgagagaggttgatcgtcatttaaattctgctgaggttcctccactttcgtccaacgtattaattgtagagtctacctttggcactgcgacccatgagcctcgtttgaatagagagaagaaactgacgcaattgattcattccacagttatgcgcggtggtcgtgttcttctgccggttttcgcattagggagagctcaggaaatcatgcttatattggatgaatattggtcccaacatgccgatgaacttggtagcgggcaagttccaatattttatgcatccaacttagccaaaaaatgtatgagtgtctttcaaacctatgtaaatatgatgaacgacgacattcgaaaaaaattcagagattctcaaactaatccattcatattcaagaatatatcctatttgaggaacttggaagatttccaagattttggtcccagcgtgatgttggcatctccaggtatgcttcagagtggtttgtcaagagacttgcttgaaaggtggtgcccggaagacaagaatttggtactgatcaccggttattccattgaaggaacgatggcaaaattcataatgcttgaaccagatacaatcccttcaataaacaatcctgaaatcaccattccaaggcgttgccaggtcgaagaaatctcctttgctgcacatgttgatttccaggaaaatttggaatttattgaaaagattagtgccccgaatattattcttgttcatggcgaggctaatcctatgggtcgtttgaaatcagcattattgtccaatttcgtttccctaaagggcacagaaaatgaagttcacgttttcaatccaagaaattgtgttgaagtggatcttgaattccaaggcgtcaaagttgcaaaagctgtgggaaatattgtaaacgaaatatacaaagaaaaatcatcgggggacgaacctacggttaaaatagaacctgtaaaagaagaaactaagaatgcattggatctacaagctgaagatgatactgaaacagatgagcataaggatataatcgtttccgggattttggtctcagatgataaaaacttcgagttggactttctgtcattatccgacttaagagaacatcaccctgatctatctacaacaatattaagagagcgtcaatcagtccgtgtaaattgtaaaaaagagcttatttactggcatattttacaaatgtttggtgaggctgatgttcttcaagacgatgataaggtgacaaatcaagaaccaaagcttaagtcagaagaaggtgacggtacaaccaaatctggtaaactaattttgcagataatgggggatatcaaattaactgttgtcgacactatagctactttagaatggacacaagatttaatgactgacaccgtagctgattctgtcattgcaatacttatgaacgtagattctgctccggctagtgtgaagttatccagtcgctcttgtgacgatcatgaacatgaccatgacggcgaggtgcaatcttttgcacaattcaagatggatgaagtgtcgaaagcaaaacaaatctcaagattgttcaaagaacaattcggtgagtgttttactttgttactcgataaagatgaatacattaatagcaagcaaaatacaattaatggagttgtcactatcggtaagaacactgctaaaatcgatttcaataacatgaaaatactagagtgtaattcgaatccactaaaaggtagggtggaaagccttttgaatattggtggcaacttagtcacaccgctttgttaa

SEQ ID NO: 1808 - DNA, 786 bp, Saccharomyces pastorianus
atgtcagatatagaatcattaggcggggccgcaggtctattcgaagagccagaggactttcttcctcccccaccaaaacctcattttgcggaataccaaaggtcgcacagcactaaagagtccaaatccgatgtaacagacatcaagcttcgtctcgtcggtacgtccccgctttggggtcatcttttgtggaatgcgggggtatatacatcgaaccatttggatgctcatccagaactgataaaggggaaaactgttttagaattgggtgctgcagcagctctaccttctgtcatttgtgctttgaacggtgctaaaatggttgtttctactgattatcctgatcctgatctaatggaaaatattcgttataatataaaaactaacgttccagaaggactcggcaacatcagtgcagagggatatatttggggtaatgattatactccattattggccaacatcaacaagtctaacagtagcaatgagaagtttgatttgatcatcttgagtgatttggttttcaatcatacagagcatcataaattacttagaacaacaaaggacttattggctgaaaatggtaaggcgttagtagtgttttcaccacatagaccaaaattgttggcaaatgacttggaatttttccaattggctaacgatgagttcagtttggttcctgagttgatcgaaatggttaattggaaaccaatgttcgatgaagatgaagaaacagtcgaaatcagatctcgcgtttacgcatattatctaacccataaaaagtaa

SEQ ID NO: 1809 - DNA, 1602 bp, Saccharomyces pastorianus
atgtcattcttttataccatccttctatttacacaatttttagtgtcttcaactaatgcttttgatggctccgttaatactaatgttgctgtttactggggccaaaattcagcaggcacacaagaatccttagctacttactgtcaatcttctgatgctgatattttcctattgtccttcttaaaccagtttccaacacttggtttgaactttgccaacgcatgctctgatacattttccgatggcttgcttcactgtactcaaattgccaaagatatcgaaacctgtcaatcccttggcaagaaagttcttttatcattaggtggtgcgtctggtagttatttattttcggatgattcccaagcagaagatttcgctcagactttatgggatacttttggcgaaggtactggtgctagtgaacgtccatttgactctgccgttgttgacggttttgattttgacattgaaaacaacaacaatgttggatacagtgctttagctaccaaattaagaactttatttgccaaaggtactaagcagtactacctttctgctgctcctcaatgtccatatccagatgcttcagttggtgacctgctagagaatgccgacattgatttcgcgttcattcaattctataataactactgtaatgtcaacggtcagtttaattgggacacctggttaacctatgctcaaactgtatccccaaataagaacataaagctgttcttgagcttacctggttcttcttcagcagcaggatctggatatatctctgatacctccttattggaatccaccattgccgaaatctcatcttcaagtgcattcggtggtattgcattatgggatgcatctcaagcttttacaaatcaactaaatggtgagccatatgtccaagttctcaaggaactgttggcagatgctgactcaaccccgacctcttctactaccactaccttaaaatccacaactacttcaaaatccacgactactttaagttcaacaacttctacctctcaaaaaaagaccacccaaattaccactaccacacaaagtaagactaaagtaacgctatctccaaccactactagtactatagaaactccaactaccagcagtacagagataacatcatccaccatgacagagactacttccacgaccactacgtcaaagaatactcccgctatcaccacaacaaagagtcctttcactactgctaccaccactagcgtaaaaactactctgtctactccaacgactaccacaagcacactttctccaactacaagtacactttctccaactacaagtacactctctccaacaaccacaggctcaagctcagacagtgcggctcgtacaaccgctaaacagttaaatgctcaatatgccgccggtcaattgaatggtaaatctacgtgtactgagggcgagatcgcatgctctgctgatggagagtacgctgtttgtgaccacagcgcctgggtttatatggaatgtgcttcaggaactacgtgttatgcttttgactcaggtgactcagtgtacacgcaatgtaatttctcctatttggaaagtaactacttctaa

SEQ ID NO: 1810 - DNA, 1422 bp, Saccharomyces pastorianus
atgaagttgaagttaatagtgaatggttgcgaagcaccagatgactataaattattgagaactactatcaatacggtagcctcgttgagaaagacagctattttaagattcaatagcgaaaggttgaccataatatccactcccaaatcgtcactgaatagtagtagcaatggtacaatactacgcggagacactggacaactatggtgtactattcctcaggatgtgtttagactgtatacagtcatatccgctcgcgaactaaatacaataacaatggagtgcaattgtgactctttattgagtgttttcaaaagatacgaccgcgtaatgaatcaaggatcctcttctaatatgactataaagctgcagtcaatgcctgaatggaatacaaataacggaacactttcaggaggaacagccggaggtgtggatacaacatcaaaaccaaaccctatttgtgcattgggtgtaacttttgaagaaattgttcatactggcggtcccaatgatgctgtggtcatgaatgggggaatagatgatcaaaatggcttgccgacgacagtagctacaggaaatttacttgcaagtaacaaggttattatgcactcgtttaaggtgccagtaaaattattgtttcgtgctcaggacacgcgaatacaggagcccatgatcaactatattcagttaatgatgtacaaactgccgccgatttctggtgagttcggttctgcctttcatgggtttataagacgtgtcgaacggtatactaacgttaatcacattcatttaactggaatcaagaagaaaaagcagggcgacgagggagatgatgtggagttgaaaataattgtgaatgagttagattggcaattggaaatatgttggaatggacccttagactcagtgatacaacaacaagagagtagttctgccaatccttcccaaaatcataatatggacatccatcctgagcatgaacaagaatctcttcccatgattgatattgacaaaccgatgtcttcgctatataccaatactagagatggagagatagaggagaatgctcgttatgatgaagacctgttgaggattgaagacagtgaaattgctgatacgcgaaataattacactactgacaacagcgacgatacaagattcaatgatgtgtctgtaatggtagaaaaggcggaacaagagagttcgttcactcatgaagtaattatccgctgcaaagattggaaagtctgttccaaactatacgcagcgttcgaggaagttgttttggcaatttctcacgacgaatcttgtgtattccattgttcgctggaccgtggtagtttggaggacagcgaggacgtggaaaagccaagggaaagagggcagatcatatattacatggcgagatcaaaaggtttgtga

SEQ ID NO: 1811 - DNA, 1938 bp, Saccharomyces pastorianus
atgctaaaacttaaggtcaaaacgttaaagcaactatggtctcatcaacggcatacatacattctacgatataatcatacggtgacgcccgcacaggtcttgcaaacacggattgaacaaattccaatcgaaaattacagaaacttttctattgttgctcatgtcgatcatggaaagtcgacattaagtgacagactgctagaaataacacacgtcattgatccaaatgcgaaaaataagcaggttctagataaacttgaagtcgaaagagaaagaggaatcactataaaagcacaaacatgttcgatgttctataatgacaaaagaactggagaagattaccttttacacctaattgacactccaggacatgtagattttagaggggaagtttcaaggtcttacgcatcatgcgggggggctattcttttggtcgatgcctcgcaaggtattcaagctcagacagtggctaatttctatttggcctttagcctggggttgaagttaatcccggtaataaataaagtcgatctcaaccttacagacgtaaaacaggttaaagaccaaatagtgaataattttgagcttccggaagaagacataatcggcgtcagtgccaaaacaggtctaaacgtggaagacctgctattgccagctataattgaccgcataccaccaccaactgggagactcggcaaaccctttagagcactattagtagattcgtggtacgatgcatacttaggagcagttcttttagtcaatatagttgacgggtctgtacgcaagaatgacagggttgtttgtgcccagacaaaggaaaaatacgaagttaaagataccggaatcatgtatcctgacaggacttccacaggtactttgaaggcggggcaagttggctatatagtactgggaatgaaggactctaaggaggctaaagtaggagatactattatgcatttgggtaaggagcatgaaaccgaagtacttcctggctttgaagaacaaaaacctatggtgtttgtgggcgcatttccggcagatggggttgaatttaaagcgatggatgatgatatgagtagacttgttctcaatgacagatccgttaccttggagcgtgagacttctaatgccttaggacaaggttggaggttgggctttttaggatctttacatgcatctgttttccgtgaaaggctagaaaaagaatatggttccaaattgattattacccaacccactgtgccttatttagttgagttcactgatggttcaaaaaagctaataaccaatcctgatgaatttccagacgctgctacgaaaagagtaaacgttgcagcttatcacgaaccatttatagaggcagttatgacgttgccccaggaatatttaggcaatgttatacgtttatgcgacagcaatcgaggagaacagattgatatcacttaccttaacactaacggacaagtaatgctaaaatattaccttccgttatcacatttggttgatgacttttttggcaaattaaaatctgtctccagagggtttgcttctttggattatgaagaggctggatatagaaattctgatgtcgtgaaactacaactattagttaatgggaatgctatcgacgccttatccagggtattgcacaggtctgaagttgaacgagttggtagggaatgggtaaagaaattcaaagagttcgttaaatcgcaattatatgaggtcgttatccaagctagggctaataacaagataatagctagggagaccataaaggcgagaagaaaagatgttcttcagaagttacatgcttctgatctctctcgtagaaagaaactattggccaagcaaaaagagggtaaaaagcatatgaaaactataggtaatatccaaattaaccaagaagcatatcaagcatttttacgtcgttga

SEQ ID NO: 1812 - DNA, 582 bp, Saccharomyces pastorianus
atggttacccttgaatacaacacaaacagcaaacagataagtgcaagtggcgccgatgtcacacaatccaccgaaaccaatatcgatcaaataaatgtcctcactacatcattaataggtgaaacaaacccaaatcttactccacaaccaaatgaagctctaagtaaaatgatcaaaggcttgtttgaaagcggtatgaaaaatctacaacagaaaaaactgaacgaggctttgaaaaatgtttccttagcaatcgaaatggcacaaaggaaaagagcgccttgggaagcctttgctattcagctaccagagttgcacttcatgcttcgtagcaaaatagatttgtctttggtgcttggaaagtatttagaggcattgcaagatctagactttttactcggtacggggctcatccaaccagacgtctttgtgaggaaagcggactgtctgttgaaattaggacagtgggaagaagctagagccactttagaaagaggcttggcatttgttcccgacgatatgaaacttagagcccttctaatagaaacagcaagaaatttagccgaatataacggcgagtaa

SEQ ID NO: 1813 - DNA, 660 bp, Saccharomyces pastorianus
atgtctgccccagctgctaacggtgaagtcccaacctttaaactagtccttgtcggtgatggtggtactggtaagaccactttcgtcaagagacatttgactggtgaattcgaaaagaagtacattgccaccatcggtgttgaagtgcatcctttgtccttctacaccaatttcggtgaaattaaattcgacgtctgggacactgctggccaagaaaagttcggtggtctaagagacggttactacatcaatgctcaatgtgccatcattatgttcgatgtcacctccagaattacttacaagaatgttcctaactggcacagagatttggtccgtgtctgtgaaaacattccaatcgtcttgtgtggtaacaaggtcgatgtcaaagaaagaaaggtcaaggctaagaccatcactttccacagaaagaagaacttgcaatactacgacatttccgccaaatctaactacaactttgaaaagcctttcttatggttggccagaaaattggctggtaacccacaattagagtttgttgcttctccagctttggccccaccagaggtccaagtcgacgaacaattgatgcaacaataccaacaagaaatggaacaagccaccgccttgccattgcctgatgaagatgatgctgatttataa

SEQ ID NO: 1814 - DNA, 375 bp, Saccharomyces pastorianus
atgttccccgccgcttccagaagaatagtgctcaatgcttcgagattaccattgagattgtgtaatagaactttgacgaccacaagagtatcctacaacgtcatacaggacttgtacttgagggaactgaaggaaactaagctggcacccagctctttgcaagatgccgagggtaacgtcaagccttggagcccaccaaagaagccaaccttaccagaattggaacttcaaggcccagacgccctaaaggcatacgccgatcaaaacgtagaaaccgccaacgacaccaagagctctgtggagggcgaagccgaaccaattgaagaggactggttggtcttggacgacgtcgaggaaacaaaagaaagccattga

SEQ ID NO: 1815 - DNA, 696 bp, Saccharomyces pastorianus
atgacaaggtactattgtgagtattgtcattcatatctgactcacgatacgctaagtgttcgtaaatcgcacctggtgggtaaaaatcatcttcgagtaacagcggactattatagaaacaaggcaagagacatttctggcaagcatgatcataaaaggcgccacaaagggaaaaggggtagcaaagaaagggaagaatcaagtgcaagggaaaaactaaaggttacgtgcttgcccaataaggagaaaaggcgaaatatgcacgggaagaagatgaaccaaaaggaactggcacaaacctcgatcaacacactgcagtcgttatacgacggttctccgggctcttccaaggtgttcatagacgccaaccgctttgatataggagatttagtcaaggccagcaaattacctcaaagagccaacgaaagatctgcgcaacacaccgtcaagcaaacttcgagatctagggacgaaacatgcgagagcaatccgttccctagactaaccggtcaagcgaaattagagcctccgaagatattgtcacagtggaacaacaccattccaaagacttctattttttacagtacggacatcctacaaaccacgattaaggaatcgaagaaacggatccacccagatggcctacggaaaccggcgagttccaacgggtttaaaaggaggcgttatggaaattag

SEQ ID NO: 1816 - DNA, 1347 bp, Saccharomyces pastorianus
atgctttcgctaaaaacattactatacacactattgactgtgtcatcagtcattgccaatccagtccctgcaagagacccttcttccatccagttcgttcatgaagaaaataaaaaaagattttacgattatgacaacggtgcgctcggagagcctatccgtggtgtcaatatcggtggttggttagtcctcgagccttacatcacaccatccttgttcgaagccttccgtactaatgataacaacgacgacggcattcctgtcgatgagtaccattactgtcaatccttaggaaaggacttggctaagagccgtttagagagccattggtctactttctaccaagaacaagattttgctaacatcgcctctcaaggtttcaacctcgtcagaattcctatcgggtactgggcgttcgaaactttggacaacgacccttacgtcactggcattcaagaatcctacttggaccaagccatcggctgggctagaaacaatagtttgaaagtctgggttgatttgcatggtgctgctggttctcaaaacgggttcgataattccggtttgagagattcatatgagtttttggaagacagcaatttggctgtcaccacaagcgtcttgaactacatcttggaaaaatactctgctgaagaatacttggacaccgttatcggtatcgaattgatcaatgaaccattgggtcctgtcttggatatggacaaaatgaagaataactatttggcacctgcttacgattacttaagaaaccacatcaaaagtgatcaaattattatcattcatgacgcattccaacaattaaactattgggatgactttatgactgcaaacgatggctactggggtgtcactattgaccaccaccattatcaagttttcgcttctgaacaattagaaagatctatggaagaacgtattcaagtagcttgtgaatggggaactggtgtgttggacgaagcccactggaccgtttgcggtgaattcgccgctgctatgacagattgtaccaaatggttgaacagtgttggattcggtgccagatacgatggttcttgggtcaatggtgaccaaacatcttcctacattggttcttgtgccaacaacgacgatattacttcgtggtccgatgaaagaaaagaaaacacaagacgttatgtagaagctcaattagacgcctttgaaatgagaggtggttggattatctggtgttacaagacggaatcaagtctggaatgggatgtccaaagactgatgtacaatggtttattccctcaaccattgaccgccagacaatatccaaaccagtgtaacaccacttctaactaa

SEQ ID NO: 1817 - DNA, 1335 bp, Saccharomyces pastorianus
atgccatctcatttcgatactgttcaattacacgctggtcaagaggaccctagtgacaatgctcacagaacaagagctgtcccaatctacgccactagttcttacgtctttgaaaactctaagcatggttctcaattgtttggcctagaagtgccaggttacgtttattctcgtttccaaaatcctaccagtaacgttttggaggaaagaatcgctgctttagaaggtggtgctgctgctttagccgtttcctctggtcaggctgcccaaactcttgccattcaaggtttggctcacactggtgacaacattgtctccacttcttacttatatggtggtacttacaaccaattcaaaatctcattcaaaagattcggtatcgaagccagatttgtcgaaggtgacaatccagaagacttcgaaaaggtcttcgatgaaagaaccaaggctgtttacttggaaactattggtaatccaagttataatgttccagatttcgaaaagattgttgccattgctcacaaacatggtattccagttgttgttgataacacattcggtgctggtggtttcttctgtcaacctattaagtgcggtgctgatattgtaacacactctgctaccaagtggattggtggtcacggtaccaccatcggtggtattattgttgactctggtaagttcccatggaaggactacccagaaaagttcccacaattctctcaaccggccgaaggctaccacggtactatatacaacgaagcctacggtaacttggcttacattgttcatgttagaactgaactgttaagagatttgggtccattgatgaacccatttgcctctttcctactactacaaggtgtcgaaacattatctttgagagctgaaagacacggtgaaaatgccttgaagttggccaaatggttggagcagtctccttacgtatcctgggtatcctaccctggtttagcatctcattctcatcatgaaaacgctaaaaagtatctatcaaacggtttcggtggtgtcttatccttcggtgttaaggacttgccaaacgctgacaaggaaactgatccattcaaactttccggtgcccaagttgttgacggtttgaagcttgcttccaacttggccaacgttggtgatgccaaaactttagtcattgctccatactttaccacccacaagcaattaaatgacaaggaaaagttggcttctggtgtcaccaaggacttgattcgtgtatctgttggtatcgaattcattgatgatattattgcagacttccaacaatctcttgaaactgttttcgctggtcaaaaaccataa

SEQ ID NO: 1818 - DNA, 5703 bp, Saccharomyces pastorianus
atgagatttactagaggattaacagcctcatcgtctttaagggcgaaagctattggaaagttgaccaaattttccactgatactttagatgagcaacgtgacgatggaacaacgctagatttaataactcgtactctgcctatcttctactctacgaacacatcgaaaatatacaccatgccactcacactgagtgaatgggaagtgttaacttcactttgtactgccatccctacttcatttgatttggtggaaaagatgattaaagaaatcattgagccctactttctggaatctccaagacaaagaatttcggacgttctgtcctcaaggttcaaattgaaagagctaagaaatccgatcgagctactgactttccaattgacaaagtttatgattcacgcgtgtgaaaaatatcctattctttatgaaactataagcggtatcatatcagtctattttgagcgcgtattagaagtctttactgtaaagcaatcaggattactatcgttgattggtttcattaacgcgttcattcgctttcccgattctgcggaactaactaaatttgcttggagaaagttagcaaagcttgtatttcatggaccatttttaagtgaagttgaggcaatcttgaattcctcaacagcatttacgaatgattcaatcgtccagtactatgatgccggaaatgagctatccggcgcgtatatattagaattggtatctcgcttacaaatttccttaatatctcacctgctacatactccagatatcaatggtaatctagatgaattcctgttaaagcagcaacatcaattttataagtttgatcaggaagctgctgatattggcaccgacaccaagagtatcgatgagtttttctttaacatcagatgtaacaaggaattttttgtagatgtgtgcaacctatccttaaagttttgctctgagtctcatattctcgatttatctactgataatcgagcaaagttctcctttgatacgcgggcccactacttacaaaccctgtgtctaatcccatttatcgaagatacagaaagcgagatgtttgaaagtttcacaaaaattgtttcggaatccgttgataaattcttcctgtctgatgttgttacaccattattgacaaaagcgattgtaacttctgcctcactactgaatttttttacggaaaaattatcgctaactctaattcgtatgtttccgttactagttgcatcccctcacatcaccaccagtacggttaaagatgttgcaaaaatatttactacagggttataccctctaaatgaagatgcgattgtgagtacaatctattctatgaacaacttattagccgtttctgaagatggatctccagctccagtgcttcgcgagcgtcagttaacaataacatcaggcaaaaacattgagagagactacttacctttgagaaattcgttccctagtttgaatggcgccagtgccccccttgggaatgcaactgtaggtcaaatatcctcacacgatgccaacagcggaaccactatgacgtaccacgcctctttaatctctaattgcgtggctgcaacgacaacaattgcgtcgtattataacactcaaagcataacagcattgactatttccattctcactcagaaagttaatgctatgtttaaggagtttgatagtgttatcctagattctttggcaagattggctcccaatacatcagtgactgaattttcccttcttctaaaatttttcaaatcgagaactgtttttgccgccaaaaataacgatagtgcgttattggaaaatattatcaatgcaaagtctgcaatatccaaggaattattggctaatcatttttcaagtgacctatatttcatatatcttcacgatctattggattcaattatttctagtggggaagtagaacgattggaacatcacaggccgcaaacagaaatttctcgtgtggctgaccaaatagctacttatctaaagccacttgctgcgctcttacctgatccaggtaacaatcctatagacatcagcaaagatgaagccagtacaaataaatttaggaatgcatggttcaattttgttattcatggataccacttgaacgcacccattgtcaaagaaaatttttctgcgttattaaccattgcctccaattcaccgcctttagcttctgaattccctgccaataacaaagaactttctttggaaatgaacacaatcttgcgtcgtggttcctccaatgaaaacatcaaacaacaaaagcaacagataactgagtatttcaatacaaatatcgttcagtacaggaccacctcgtcgtccaaaatcatgtttttggcagccgcagctcttttagagacaataaggtgtgaagcaggtgattgctcaaaaacattactgtatttttccgatgcttctatcctttccggttcaatcgaaaaatgtatagcagttttatcggtttctatgatcagaaaatatgccaagttaattcaaaggggaaatgatgccatattcaactccaaaatgattgctcaacaacttaataacttgttactttgcctttcccatagggagccaactttgcaagatgctgcttttcacgcttgtgaaatatttatcagatccatcccatcatcgttatgtcatcacctatctctttacactttgctggatatgttgaccgccttatttgatagtatcttagattcggagtccaataaattcgagccacgttatgagtttaaactaaaacattctcgaacaaaaatcttgatcccgagttcagcgtcatggcgtactgcaacgttatcgagattgcataagtctgctaaagaatgggtaagaatagtattgaatagaagcaaccaggatgctaaaattttgctacaatcatacatctctgacttgggcgaatacagcagattaaattctgttgaatttggtgtctcgtttgcgatggacatggccggtttgattttacctgcggataaggaattatcgaggctgacctactatggtccggagaaaccaaacacaatatcagggtttatatctttgcactcttggagatctaaatatctttttgatactgctataacttcatcaccagaggatatcaagaggcaaatcactatttcaaaaaaaaacattagaaaaaatctaagcttaggaaacaaagttgttactaaagacgtcacagactttctcgacatgtctaccgctttgttaattcttggtaatggctcacctgcatctttggtatacgatatcgtgcacatcccctttgaagtctttacttctgcctctcttaagattgctacaaatgtctggttaacaatcataaccgaaaagcccgaagttgcacacctccttttagtagatgtgtgctattgttggatgcgctccattgatgacaacattggcctctattctcgtgatcatgacataaagggagaagagtaccaaaaaatggaatattctccctatgacaaggctggtatcaacagagacgcaaaaaatgcatctcaagctatgcaaccacatctccacgttattaaattctttgcttcccatttcgaaggaacattatttcagagtgactttttgttgaaaatattcacaaagtgtgtgttatatggtattaaaaacttgtataaggcttcactccatccgtttgccagaatgatccgccatgaattgttactctttgcaacgcttgtgctgaatgcgagctataaacaaggatccaaatacattggtcgcttatcgcaagagatcacaaatggtgctttgagttggttcaaaaagcccgtcgcttggccgtttggttctaatgaacttaaaattaaagctgacttatctattactagagatctttttgttcagcttaacaagctaagctcattaatgacgcgccactgtggaaaggattacaagattttaaactactttttggcaagtgaaatccaacaaattcagacatggttgaccccaatggagaagattgaaggggccaacagtaacgagctctcggacgatatcgttgaatctacgttcgcaaacgatccaattttagcaataaatcttttgcagagatgctacagtaagaaggcggaggaggcgctagtaaggttagtcgaaaagcaccccttaatgtgtgtgggatccccaagcgctcttgacctattcataaaaggaagtggtttaagcagtaagaaggacttgcacgcagctttgtattggataccagtcagtccattgaaatccatcaatcttttccttcctgagtggcaaggtaaccctttcatcttacaatttagcatctattccctggaatcgcaagacgtgaatttagtatttttctacgttcctcaaattgtccaatgcctaaggtatgacaaaactggatacgtagaaagattaattttagacactgcaaagataagtgtgttattctcacatcaaattatatggaacatgctagccaactgttataaagatgacgagggtatacaagaagatgaaatcaaaccgactctagatcgcattcgggagcgtatggtttctaccttcagccaaacccatcgcgaattttacgaacgtgaatttgaatttttcgatgaagttactggtatatctggtaagttgaagccttacttaaagaaaagtaaagctgaaaagaagcataagatcgatgaagagatgagcaccattgaagtaaaacccgatgtttatttgccctccaaccccgacggtgttgttattgacattgatcggaaaagtggtaagccacttcaatcacacgcaaaggcacctttcatggcaacctttaaaatcaagaaagaagtgcaggatcctttgaccaagaaaagcatggaaattgaaaaatggcaaggagcaattttcaaagttggtgatgactgtagacaggatgttctggcgttgcaattggtttctttgtttagaaccatatggtccagcattggattggatgtctatgttttcccttatagagtcaccgcgacagcgccaggttgtggtgtaatcgacgtgctacccaattcagtgtcccgagacatgttaggacgtgaagccgttaatggattatacgaatatttcacaagcaaattcggtaacgaatctaccatagaatttcaaaatgcacgcaacaactttgtcaaatcattagcgggatacagtgtaatttcgtatctgttgcaattcaaggacagacacaacggtaacattatgtacgacgatcaaggccactgtctacacattgatttcgggtttatctttgatattgtcccgggtggcatcaagttcgaggcagtcccattcaaactgaccaaggagatggtcaaggtcatgggcggctcgccccaaacaccggcctacttagacttcgaagagctgtgtattaaagcatatctggcggcacgtccacacgtggaagccatcatcgagtgcgttaaccccatgctaggaagcggtcttccatgcttcaagggtcacaagacgatcaagaatctaagagcaaggttccagcctcaaaaaaccgaccacgaagcggcgctatgcatgaagacgctaattcgcaaaagttatgagagcatcttcaccaagggttacgatgagttccaaagactcacaaacggcattccgtattga

SEQ ID NO: 1819 - DNA, 906 bp, Saccharomyces pastorianus
atgataatataccgtgcagtacaaactgcgctattggcaggtttttttttgaaatctggggagtgtttagcttccaatgggagcactgcattaattggggacgaagatatgcaaactccctttccagaatggctaaaagaatttaccaatattactcaatggcctgggcttgacccaccttatattccactagattacatagatctcactaaagtcccagagtttgaacggtatcaatctggtaggtgtccaaacatttccagagaacagtgctcattcgactgttacaactgtgttgatgttgatgatgttacttcgtgtttcaagctttctcaaacattcgacgatggtccgaccccagcaacagagacattgcttgaaaatttgagacacaggaccacttttttcgttttaggaattaacactgttagtttccctcatatatacgagagtgtcgtagagagaggtcatttagtcggtacacatacttggtcacatgcatttttaccaagcctatcaaatgaagaaatcgtagcccaaatcgagtggtcaatttgggcaatgaatgctaccggtaaacactttcctaaatattttagacctccttacggggccattgataacagggtgagagctattgttaaacagtttgggttaactgtggtcttatgggatcacgatacttttgattggaaattaattacgaatgataaattaagaacggaggagcaaatattcaaggatatagagacttggaagagtcaacgaaaaggcttaattttggaacatgatggtgcacgaaggactgtcgatcttgcgattaaaatcaataaattagttggtaatgatcaattgactgttgcagaatgtattggtgatacagattatatagagcgatatgactga

SEQ ID NO: 1820 - DNA, 264 bp, Saccharomyces pastorianus
atgtcactaagaaatatatcaacggtcacaaaaaacctaagattaacagcaaaatgctttaccccaaagagctcacctacatcaacaaccatcccagttataaaagatgctagtgctactcattatcgtagaatgtctaccataaacaactttacaagcttaaacggatattcttcagtttctaaaactgtccatgataagcccattgttatctgcacagataacgaagaggtggagactgtatcggagcacgtgaaagtttaa

SEQ ID NO: 1821 - DNA, 4761 bp, Saccharomyces pastorianus
atgtccgatactaatccgtctatgtccagtgcaaactctaaaagagaggacagtaacgcttctcaatcaagccaaacactattcagttcttcctcaaatacgtctacttctaccaattcggaagctttgtcagcatctccttcttcctccccctcggcgactgagttgaccagtattcgcccaattagtatagttgttgctgcttatgatttcaatcaccccataaagaaagatggctcttcccaacttttatctgtgcaacagggagatactatatatatactgaataaaaattcgtctggatggtgggatggattagtcattgacgacaatagtgggaaagttgatagaggctggtttcctcaaaactttggaagaccgttaagggacagtcattttcggaagcatagtcatccgatgaaaaagtatagctcaagtaaaagttcaagacgcagtagcttgaatagtttgggtaatggtgcgtatttgcatgtgcccagaaattcaagtaaaagtagaaggggaagctctactttatcagcgtcactggcaaccgctcacaatgcagagtcaagtaccggcaacaataatgctacatctgtgaataattctagtaccttttcgacttcgaatgatgattcccaagtgacccctgagtcgtcaaactttaactccaataccagccttacgcaagatttaacaaagagtgctgaacgattatccaaaacaaatacaaatacaacgatgaatgacagaaataccgatattcaatcttatagcgagaaggcaagccccgtaccaattccagaggatactatcaaaatattaccgttagaagagatagaaatgataataaatgggatacactccaacattgcatccacttggtcccctatacctctgatatcaaaaacatcagattataaattggtatactacaacaaagaactggatatttattgctcagaattacctttgatttcgaactcagtcatggattgcgatgacatttgtgatagagaaccaaaattcccctctaatgatcatttgatcaaattatacacaagagatttaaggaaaaatgcaaatatagaagacaattcgacaaggtcgaaacaaatgggaaatgaacaggacaggccgactcattcaatagaacaacaagacccagcgcaaattgatcatgttgatgacgatgataacgaaaataataaaaacgaatttgatggggctggtccttcatcattaaattctttgtctgcccccgacttggcacaaaatcagtcaagaacatccccatctcgttcttctctattagcgaaaagcgatatattttatcattactcaggagatataaaaatgtggatagagttacaagatttgactgtttactatacaaaaacagctcacaagatgtttctcaagaagagtcgtcaaaattttacaaagtacttcgatctgatatcagattcgatagtatttacgcaattagcctgtaggttaatgcaacacgaaatcaaagcaaaaaactgcagcaaagaaattaaaaagatttttaaaggtctgatctcctcattatcaaggataagtattaattctcatttatattttgattctgcttttcacaagagaaaaatggacacgatcaatggtaaaggcaacgatgaccaggggaataatggtattataggagaggcagatgaaaataggaacgaaggagagaatgcgcacgaccttgtttcggcgcctttatctggtaaacgtaacgtcagtactagtacaacggatactttaacgccaacaagatcatcttttagtactgtcaatgaaactgatatggaaaactttcagcttttagatccgagaaatagtatcaattccatggtaaccccgagaacttcaatacaatactctactttagaggacatttctctatcgccatctaataaaaatctaaagtcaatcaagacagtttatgaaatggttgatttggaactcagtaaattttcaagacatgttcagctactttattttgtgttacaaaactcggtttttttagatgataataccttgccacaattactaccaagattttttaaaggcacatttagcggtggttcttggacaaatcctttttcaacgtttattacagacgaatatggaaattcctcaaaaaataaagctgttccatcaaatgaggtaactgttttatcttccaagaactcttcgattacaaggatttcgccaaagatgacagataccattgcctccacaccaggctatagtggaaattcagaaacaaattcccaagctgactcgaaagcaggcacagccgtatatagttcggttgttacacctttcaacaggccttctcataacagaacattttcaagagcaagggtttcaaaaagaaagaaaaaatatccattaactgtagacactttgaatacaatgaaaaaaaaatctactcaaatttttgagaagctaaataacgctacaggtgaccacttaaaaatcataagcaaacccaaaagcagagttagaaacttagaaatcaattcaagcacttatgaacagataaatcaaaatgttttattattagagatattggagaatttagatttaacaatttttattaatttgaaaaatttaatcaaaactccaagtattttattggatttggaaagtgaggaattcttagttcacgccatgtcgtcagtctcttcagtattaacagaattctttgacataaagcaagcattccatgacattgtgattagactaataatgactacacaacaaacaactttagacgacccttacttgttttcctccatgagatccaatttccctgttggacaccatgaacctttcaaaaatattgctaatacatccttagttaagggtcctttgcataagaaaaacgagcaactagcgttgtctttgttccatgtattagtaagccaagacgtggaatttaataaccttgagtttttgaacaattccgatgattttaaggatgcttgtgaaaagtacgtcgagatttctaatcttgcatgcattatcgttgatcagttgattgaagaaagagagaacctgctgaactatgcggccagaatgatgaagaacaatttaactgctgaattgctaaaaaatgagcaagagaagtggttcgatatttattcagaagattacagtgatgaagattccgagaatgatgaagctattattgatgatgagttaggatccgatgaatatacggaacgcaaaacggccaatatagagaaaaaccttccatggtttctaacttcggattatgaaagcagtctagtgtttgactcaaggggaaagattcgcggtggaacgaaagaggcactgatcgaacatttgaccagtcatgaacttgtggatgcaggtttcaacgtgacaatgctaataacttttaggagcatattaaccgcaagggagtttttctatgccctcatttacagatataatctatatcctcctgaaggattgagttatgatgattacaacatttggatagagaaaaaatcgaatcccattaagtgccgtgtggtcaacatcatgagaacattcttgacacagtattggactagaaactattatgaaccaggcatacctttaattttaaactttgccaaaatggttgtttctgaaaaaattccgggggcagaagatcttctacaaaagataaatgaaaaactgataaatgaaaacgagaaagagataatgcatatgatgcaacaggattcggtgcaagtaattagttctacgcagaaacgggaaaataaatcgccgacacatatttcttcatcttctttgccatcctccgcttcttcagcatttttcagattgaaaaaattgaaacttttggacattgatccttacacgtatgccacacaactaaccgtactcgaacacgacttgtacctcagaatcacgatgttcgaatgtttggatagggcgtggggtaccaagtattgtaacatgggtggttctccaaacataacaagattcatagcgaatgcaaacacacttaccaactttgtttctcatacgattgtcaagcagtcagatgtcaagacccgttgcaaattaacgcagtattttgttacagtcgcacagcattgtaaggaattgaataacttttcttcgatgaccgctatcgtttctgctctatattcttctccaatttatagattgaagaggacatggaatctagtttctatagaatccaaagatattttgaagaatttaaacaatcttatggattccaagagaaacttcgtaaagtatagagagttactgcgatcagtgacagacatcgcatgtgtcccgtttttcggtgtgtacctatctgatttgacatttacatttgttgggaacgcagactttctccataattcgacgaacataataaatttcaacaagaggaccaagattgcgaatatcgtagaggaaatcataagctttaaaagatttcattacaaattgaaacgattagatgacattcagactgtcatagaagcctctttggaaaatgtcccgcacatcgagaagcagtatcaactctcattgcaagtagaacctagatccggaaatactaaaggtaactcacactctgctaccactagtgggacgaaaactgcaaagtttctaagtgagtttaccgatgataaaaacggaaactttttgaaactaggcaaaaagaaacctccttctagattgtttagataa

SEQ ID NO: 1822 - DNA, 1551 bp, Saccharomyces pastorianus
atggatttcaaggaagagcaagtgtccatcaagcaggacccggaacaacaagaacgccaacaagatcacttcaatgatgtccagatcaagcaagagccccatgaccatgacggcgaggactcacagttcaccaacggcacgcaggaccacgacgatgatgatacatttgatgccggtgagcctgtggtgaaggcagaatccggtgccggtattggcattaccacctcccataacgaaacaggccaggtcctgcctgatcaatcagaggtaaagtttattcgccgtcaaatcaatggatacgtagggtttgctaacttgccgaaacagtggcacagaaagtctatcaagaacggattcaatttcaacctattatgcgtgggatccaacggtattggtaaaacaactttaatgaaaaccttgtttaataatgatgatattgaggctaacttggttaacgatcatgaagaagaactcacgactgaccaagaagaggaagggcacgaggaccaagcacaaaaccaaactcacaaggtcaaaatcaagtcatacgaaactgttcttgaagaaaacggtgttaaattgaatttgaatgttgttgatactgaaggatttggtgattttttgaataacgaccaagactcctggaacccaatcattaaggagatcaactctcgcttcgaccagtacttggatgcagaaaacaaaatcaacagacgctcgataaacgataaaagaattcatgcttgtctctatttcattgaaccgaccggtcattatttgaagcctttggacttgacgttcatgcagatggttcacgaaaaatgtaatttgattcctgtcattgccaaatccgacatcttaaccgatgaagagattttaggtttcaagaaatctattatgggccaattagctcaatcaaatatcgaattgtttaaacccccaatttattctaacgatgatgctgaaaatagcagcttatccgaaagattattcacaaacttaccttatgctgtcgttgggtccaacgacctagtagaaaattataacggcagccaagtaagaggccgttcttatccatggggcgtgatcgaagtggataatgacagccattccgatttcaaccttttgaaaaatcttttaattaagcaattcatggaggagttgaaggaaagaacaaatagtacactgtacgaaaactacagatcatccaaattggccaatttaggtatcaagcaagacaactcagtttttaaagagttcgacccgatatccaaacaacaagaagagaaaactttacatgaagccaaattggccaaattggaagtcgaaatgaaaactgttttccaacaaaaggtgtctgaaaaggagaaaaaactacaaaaatctgaaactgagctatttgcaagacataaagaaatgaaggaaaaattaaccaaacaactgaaggctttggaagacaagaaaaaacaactagagctttccataaataatgcttctccaaacgttaatcattcccctatccccacaaagaagaaggggtttctgcgttag

SEQ ID NO: 1823 - DNA, 1278 bp, Saccharomyces pastorianus
atgtcacaccaaaaccagcttatcccacaggcctatatctccaattttcacaacagattgaccaacgaggatgataacatccccatttttacaatggcccagcaaacaaggcagcataaaagagctaaagtcgtcaattatgctgaatacgacaacgatcttttcgatgaattcaacatgaacggtaccaactttgccaatactgacacacactataaggataatgtcgtttctcatgaaaatacacccgcacttacaaatggtgcgaccatggacggttccgaatacaatgccctggagaatataaacaacaccgaaaatattctatcgaaccacaaatatgatatcgggtcaaacatggttgtagaatctttatccggtctaaataacgccaacaataccagcaacggcccaaataatgccaaagcacaagatattggaaacgccattttgccagatatccaggaccaacaccataacccattcaatatcttgaggtaccctaagataagagacacttttattaatgggagagtggtgtcaccatacagattgaacacagacgataaaacgaaggcaaatgcgaactctgaagaagcaatcatgataccaattactttggaagtagagcatatgggccatactataaaggaccaatttctctggaactacaacgatgactccataactccggaagaatttgcctccatatattgtaaagatcttgatatgacctctgctactttgcaaactcaaattgctaatataataaaagatcaattaaaagattcagaaaatattgcagccacagagataatgtctgacctacatgtaataatcaatttgacttgcaatctacaggacagattttttgaagataatttccagtggaacttgaacgataaatcgctaaccccagaaacctttgccgcttccattgtacaggaccttggtttaacaagagagttcattcccttagtatctcaatcgcttcatgaaacaatcttgaagataaaaaaggactgggtcgatggccatttaatccaggaccatgtaccaaacgatgccgcattcggttatctatctggtataaggttggatattgatgagttgggttctaattggtgcccaagagtagaaatattaacaaaagaggaaatccaaaagagagaaatcgaaaaagaaagaaacttgagaagattaaagagagaaaccgatagattatctagaagaggcagaagaagattggatgatttagaaaccacgatgagaatgtag

SEQ ID NO: 1824 - DNA, 723 bp, Saccharomyces pastorianus
atgtcaggattccttcagagcacgctgcttggtctaggtaaagactatttgcaagacgagtaccaagaacttgcaggacagcatttccagccgaccagggacccattctatgaaacgaacaaagacggtaagaagcatcgtctcaggcttccatattattgcactaaagacgaaagtaaggcgtggaagaatgttcaaaacaaggcgtggatgcatgacaaatcagtgtgtggatgctgttgctggacgtccgttataggatgggcgccattacttgcgcttttaccggtgataggacccttattgatgtattgggtgcatgagcagttaatcgaactggcagacaaaaaatacggattacctgtggaaaccaaggtgaaaatgcacggaaacattgttcttgatctactcatcagtttggtgccggttttaggcagtgttttcgcatggttgcatgcgtgttccacgagaaacgcagccattgtctataattttgttggacaaagagcgctagaaagaaagcaggcagaaatgatgcgtgagaaacaggaaagcgagaagtatgctaatactaataccaacggaccagcagtaaatgggaacgggaacgggaacgggaatgggaacgggaacagaaacaacggcaaagcttacaacaggccaccggcggtggccactccgcccaccgcagcatacacccgtactcagagaggctacaggtaa

SEQ ID NO: 1825 - DNA, 261 bp, Saccharomyces pastorianus
atgaccagaactaacaaatggacagtccacgaagctaagtctaacccaaaatacttttctcataacgggaactttggcgaatctccaaaccacatcaagagaggaggatgcgggaagggcaattggggcaaggcaggcgacgaaatcaacgacttgatcgactctggcgagatcaagaccgttttcaacaaggatagaagaggttctaattctcaaagcaatgagagaaagctttgcgacctgcaacaattccacatttga

SEQ ID NO: 1826 - DNA, 603 bp, Saccharomyces pastorianus
atgaacaacgaatcaatcacagctgagccagaactgcttacacggttgaaagatatagtatgttcaagtacccatttttgggaggagcaactattttataaagttcaagatgttgctacagaggaaaattgcatcactctcagtttaaagtgtacgatatggacggatgctcaaataagcacgttcttagacaggcctagagaacttcattcgcatgttaaagggtatcccgaaatctactatatctccgaattgtccacaactatcaatttcttttccaaagcgggaagttccatagaaatggaccagattattcctcacctaaacgaatatttctcttctttgatagtgtcccaactggaatttgagtaccctatggttttttctacgaccgcaagacttcgtttgaaatggcaacaaggctccctaggcccgatatcatacgctctaaccaattcttctgcattgcttccaataatgctcaaaatgattgcagaagacaagacctcaacaacagtgtatcaaattttatgtcaaaaaagaagcccgccaattcaaaacttccaaattttctgcttaccggcaatcaaacatgataagtaa

SEQ ID NO: 1827 - DNA, 1851 bp, Saccharomyces pastorianus
atgtcttccgtcgatgtgctgttaacagtaggtaaattggacgcctcattggcgttactgaccacccaagatcatcacgttatcgagtttcccaccgttttattgccagaaaatgttaaagccggatctatcatcaaaatgcaagtatctcagaatttagaggaagaacgaaaacaaagaaagcactttaagagcatccaagctaaaattctggagaaatacggtacccataaacctgaaaatccagttttgaaaatcatgaacgttactcaaacaagttgtgttttgacatgggaacagttaaaacttggatcggcaaaattgaaatcgttgattctttatagaaaaggaatacgctcaatggtcattccaaatccattcaaagtaaccacgaccaaaatatctggtctttccgttgatacgccttacgaatttcaattgaagctgataacaacatcaggtacattatggtccgaaaaaataatattgcgtacccataaaatgaccgatatgtctggtattaccgtatgtttggggccattggacccattgaaagagatttcaaacacgcaggtgtcccagtgtctatctcacattggtgcaagaccattacaacgtcacgttgccatagatactacacattttgtctgtaacgatttggacaatgaagaaaccaatgaggagctgatgaaggcaaagcacaacaacataccgattgttagaccggagtgggtgagagcgtgcgaagtagagaaaagaattgtcggagttagaggattttacttagatgcagaccaaagtatattggcaagttacactttcccaccagtaaatgaagaagagctatcaaattcaagggacaatgaaattgaatctagaccagctgttgaaaataaggatccagaaggcactgaaaatgttgaacaggctgaaccgccgtatagtgatgaggacaaattttcagagaataaggaacaaaatgaacagaaagaagatgaggttgctcaagatacacctgtggaagacacacctgtggaagacaccctgaatgcttcgccaattttggagaacgaaaacactactgaaactgttaatacttccgtaagaagtttgaaaagtgaacccgttggcactccgattatcgaggaaactgaaccaatctcttccgttcaaaacacagaacacgtacaaaacgaagaacaaagtgcggtcgaaactgatccaaatgaagaaaccacagaacatgccccagaagatgtcaaggatgccaagacaactgttagtgatcgtgttaccaatggattggcagaaactgaaggagaaggtgtggatatacagaacaatgaaagtaacataaatacggaactggtggaggagaacaacaaaaccgtggaagacacggtcgcaaatccagataatgcagaagctgaacttgaaattccggaagtaaacagctccgcacaagaagctgacaaggccatcaatgaaagtactgccccacaaaagcaagaagaagatatagatcctaaaatcgcacttgagaccgtaacggaaaaagcttcagaagagccatccaatgaaggtgccccagaaagtttagaaggcgaagttgcggagactcaagagaatgtcaacagtgctaccgaaccaaatgcagatgttcttgacgaggaaccagaaagcactgtcaatattgaagccagtgaagaaacagaagaacaggagacgacggaaaccgatgtagccgccaatgtaaccgccgatgatgttccgccctctgagcaatctaaaaaaagtaacaataacaagaagaaaaataagaagaacaagaagaaaaataagaagaaatga

SEQ ID NO: 1828 - DNA, 1134 bp, Saccharomyces pastorianus
atgttttctttaccaagcaagaacggcctccagatattacttttgacactttcatgcatatcaacgatagaggcccagttcttcggacaatcgtcgtcctctaattcatcggccgtctccagttcacactcgtcgtcgataagcacgttggaatcgtcaagcaccctatcttcatcaagtttgatttcctcttcaagtgctgtatcatcttctctttcttcgtcatcatccaagaagtcttcttcctctcagtcgtctttatccactagcgttgcctccgtgtcgttcacgtcatttagtttcacatctacctcaggtagtgacagcttttcatcagaggcttcgtctacatcggattcttcgagctcttccgtttcttcaacctcaacgtcttcagcatcatcgtctacgtccgagtcgtcatcaacatctttttcttcctcctcttcatctacaccatcgtccacttcttcgtccccctcgacaatcacctctacagcttcaactacttctgccccaaccgtttcttccgatagtcgcggcagcaccatcaccagtatcattaatggtaaaacgatcctttctaaccactataccactgttacgtattccccatcagcgactgccgatcctaataacaaaacaaaaagctctggtctttcgaaaaaaaatagaaacattgttattggttgtgtcgttggtattggtgttccattaatcttgataattctggtcttaatttacatgttttgtatccaatcatcaagaacagatttcattgattcagatggaaaagtcgttacagcctacagagctaacaaattcaccaaatggtggtatatgcttttgggtaagaaagtcagcgacgagtaccaatctaattcgccattaggtggtagcacatcttccgcaggtggtttggatctcgacgaagcagatgacgtaatggatcaaagttctctcttcgatatgagggtaagagacagcgacagcataccacgtactaccaataacgccaatcataatactaatagcggcggagaaaatgtgaatagtagtgccgcatcaaatgatattatagaagaaaagttttatgatgaacatggtaacgaattatcgccacgaaattactaa

SEQ ID NO: 1829 - DNA, 327 bp, Saccharomyces pastorianus
atgcctccaaagcaacaattgtccaaagctgccaaagccgctgccgctcttgctggtggtaagaagtctaagaagaagtggtccaagaagtccatgaaagacagagctcaacatgctgtcatcttagaccaagaaaaatacgacagaattttgaaggaagtcccaacctacagatacgtctctgtctccgttttagttgatagattaaagatcggtggttctttagctagaattgctttgagacacttggaaaaggaaggtatcatcaagccaatctccaaacactccaagcaggctatctacaccagagctgttgcttctgaataa

SEQ ID NO: 1830 - DNA, 939 bp, Saccharomyces pastorianus
atgggaggcgttcgtgaaaagaaagctgaatactttgctaagttgagagaatacttggaagaatacaagtccatgttcgttgtcggtgtcgacaatgtttcttctcaacaaatgcacgaagtcagaaaggaattgagaggtagagctgtcgttttgatgggtaagaacaccatggtcagaagagctatcagaggtttccttactgatttgccagactacgaaaagttgttgccttttgtgaagggtaacgtgggtttcattttcactaacgaatccttgaacgaaatcaaggacgttatggtttccaagagagttgctgccccagctagagctggtgccgttgctccagaagatatctgggtcactgctgttaacaccggtatggaaccaggtaaaacttctttcttccaagctttgggtgtcccaaccaagattgccagaggtaccattgaaattgtttccgatgttaaggttgttgatgccggtaacagagtcggtccatctgaagcctctttgttgaacttgttggaaatttctccattcacttatggtttgactgttgttcaagtctatgacaacggccaagttttcccatcctctatcttggatatcactgacgaagaattggtttctcacttcgtttctgctgttagcaccattgcttccgtctctttggctattggttacccaaccttgccatctgtcggtcacactttgatcaacaactacaagaacttgttagctgttgccattgctgcttcttaccactacccagaaatcgaagatttggttgacagaatcgaaaatccagacaagtacgcttccgctgctccagctgctgcctctgctgcctctggtgaatccgctccagctgaagaagctgctgctgaagacgaagaagaatccgatgatgacatgggtttcggtttattcgattaa

SEQ ID NO: 1831 - DNA, 306 bp, Saccharomyces pastorianus
atgcaatcagttggcaacggctctatcgctctagtttcgaaaaatgcaatgaattcaacgaccacatttacgggttggatggcatgcccatggaaatatatcaacggtgtgggttcgggtcgatatgttagcagcaagccagatagaattaccagatatgatcttctcaaagctgcgcatgagacagaaatgaaggaactgcttacgggaagtggtttgaaggccaagaataaaacaaaaaaaagcaccaaagtaacattggagactataagcgaagaaaactcttcgaatgaaagctttttctaa

SEQ ID NO: 1832 - DNA, 2586 bp, Saccharomyces pastorianus
atgtccactactgaatttgctcaactattagaaaacagtattttgagtcccgaccaaaacgtccggttgaccagtgaaactcaattaaagaaactgtccaatgaaaacttcttacagtttgctgggctttcctcgcaagtacttatcgatgaaaatacaaagttagaaggtcgtattttagcggcgttaactctgaagaacgaactggtttccaaagattccatcaagactcagcaatttgcccagcgttggatcgcacaagtcagccctgatgccaaggctcaaattaaagccaacgccctcactgcgttggtctccatagaaccccgtatagcaaacgctgcagctcaattgatcgctgctatagcagacatcgagttgccccatggcgcatggccagatttgatgaaaatcatggtcgacaatacgggcgctgaacaatcagaaaatgttaagagagcttccttactggctctaggttatatatgtgaaagcgcagaccctcagagccaagccttggtttcttcatcaaacaatatcttaattgctatagtccaaggtgcccagtccacagaaacttccaaatcagttagactgacagctttgaatgctcttgcagattctttgattttcatcaagaacaatatggaacgtgaaggtgaaagaaactacctcatgcaagtcgtctgcgaggccactcaagctgaagacatagaagttcaagccgccgcctttggttgtctgtgtaaaatcatgtcattatactatacgttcatgaaaccttatatggaacaagccctatatgccctaaccatagccaccatgaagtctccaaacgataaagtagcttccatgactgtggagttctggtccactatttgtgaagaagaaatcgatattgcttacgaactggcccaattccctcaatctcccctacaaagttataacttcgccttgtcgtccatcaaagatgttgttccaaacctcttgaatcttttaacgagacaaaatgaagacccagaagatgatgactggaacgtttccatgtctgcgggtgcgtgcttacaactattcgctcaaaattgtggtaaccacatcttggaacctgtgttggaatttgtcgaacaaaacattaccgctgataactggagacatcgtgaggctgccgtaatggcttttggttccatcatggatggtcctgacaaagttcaaagaacttattacgtccatcaagctttaccatccatcttaaacttgatgaacgatcaatccttacaagtcaaagaaactacgggttggtgtatcggtagaattgccgattccgtcgccgaatccattgaccctcaacaacatctaccaggtgttgttcaggcttgtttgattggtctacaagatcatcctaaagtggccacaaactgttcttggaccatcatcaatttggtggagcaattagcagaagccgttccatctccaatatacaacttctatcctgctctcgtggccggcttaatcagtgcagccaatagagcagacaacgagttcaatgctcgtgcctctgctttttccgctttaaccacgatggtagaatacgccactgacactgtagctgaaacatctgcttccatttccacctttgtcatggacaaactgggacaaacaatgagcattgacgaaactcaaatatcattagaagacgcgcaaagtttacaagaattacaatccaacgttttgactgttctagctgccgtcatcagaaagagcccaagcagtgttgaacctgttgctgacatgctcatgggcctgttttttaagttattggaaaagaaagactctgcattcattgaagacgatgtgttttatgctatttcagctttagctgcttctttgggtaggggatttgaaaaatacttagaaacattttctccctatttattaaaggcattaaaccaagtggactcgcctgtgtcaactactgctgtgggttttattgcggatatctcaaactcattagaagaggactttagaacgtattcagatgcaatgatgaacgtcttggctcaaatgatttccaatccaaatgctagaagagaactgaaaccagccgtcttgagtgtctttggtgatatcgcttccaatataggtgctgatttcatcccatacttgaatgatatcatggcattatgcgttgctgcacagaataccaagcctgaaaacggtacattagaagctttggacaaccaaataaaagtactagaagcagtgctagatgcttatgtaggtatagtcgcaggtctccatgataagccggaggctttgttcccatacgtcggtaccatcttccaattcattgcccaagtcgcagaagatcctcagttatatagcgaggataccacctcaagagctgcagttgggatgataggtgatatagctgctatgttcccagacggttcaatcaaacagttttatggacaagactgggttattgattacatcaaaagaacaagaagtagccagttgtttagtcaatctacaaaagacactgcaagatgggccagagagcaacaaaaacgtcaattgtctttatag

SEQ ID NO: 1833 - DNA, 876 bp, Saccharomyces pastorianus
atgagtgccactaagattctttcgcaaaaaatcaaagtcgccttggtccaattggcaggctctagccctgataagatggccaaccttcaaagagcggcaacgtttattgaaagggccatgaaggaacagccagatacaaagctcgtcgtgttgcccgaatgcttcaactctccatactccactgaccaattcagaaagtattctgagattattagtgccagtgaaccttcgacatcggttaagttcttatcgaacttggctagtaagttcaaaatcgtcttagttggaggaacgattccagaattggatccaaagacagacaaaatctacaatacatcgataatattcaacgaagatggagagctgatcggccaacatcggaaagtgcaccttttcgatgtggacattcccaacggcatatcgttccatgaaagtgagaccctgagccctggggagaagtccaccacgattgacacgaagtatggcaagttcggcgtgggtatatgttatgacatgaggttcccggaactggccatgctgagtgcacgtaaaggggcctttgctatggtctatccgagcgcgttcaacacggtcacgggtccattgcattggcatttactggcaagaagccgggcggtagacaaccaaatatacgtaatgctatgttccccggcaaggaatatgcagagctcgtaccatgcgtatggccactccatcgtggtggaccccaagggcaatatcgtatctgaagcgggcgaaggtgaagagattatctatgctgagttggacccagaagtcattgcggcgtttagacaagccgtgcccttgaccaagcaaagaagatttgatgtgtactctgatgtaaatgcgcattag

SEQ ID NO: 1834 - DNA, 2415 bp, Saccharomyces pastorianus
atgacagatataaagtctaaagctttaacaggccagtcgatgggtgctattccacctgagattgtgtaccaaatacttacataccaatttagggacttgctaagaaatgaccatcctgggaccgcggaaaaattcaatgaaaatttggctacgtttgtcaagagcaacttgaccgtcaataagacattctctcatatttgtcaagttctcatctatagatattgtaatttgactacggcaaaaagatttcatggtcttttgcaaactttaaaagcaaatagggtgctctgtaacaaagtcgaggtagctgatttccaagaactaacatccattggacttggcaggtctagtgagatgaataaaatgatcaaaaatttaaccaatgaaacccttctcgaatttttggtgctaacaaaagcaaacttaagggaatttttagcatgtgaaaatattcaagacgacttagacgataatatcataaaatacattttatccccaggaaaggtcttgactgttgtggatttctgtggctgctcaggcaccagtttcacggaaagttttattaaggctctggacagattataccatctcaataaatctactgatcagcatctgctcgaacccatccaacaaaattaccagattacatgtctgggcctaaacgactgtatcgatctgccatctcatgtgctttggaagattttcaagatgctgcctgagctacaaaaactcgatctgtctcatacttccattgacgataacactttgtataatggcattccacattggaaaaatttaacccatctttcgctagccacttgtcttcaagtaactccgagggcagttttagaattcttcagtcatcatccaacaatcactgattctgataatacatctacattggaatggctaaacgttagtgttatagcccattcgtcatcttggaacgaagtacatacgatgctttttttgaaaaagctttgccagcatggtcacagtaagactttacaatacttaaatattggtggtctgcccttacatatggcatcatcgtttagcgaggatcctatcacagaatccacttattactatcaatgccgtgatagcctacagtttataaagtggaattttcctaaattaaaaagtttaagtattaaaggcaataatgtcccaatatctactctggtggaatttttgacaccaattgaacaagactatcctaactgtattcaaaaattaaaggtcttgaatatatctggcaactcatacatcaataaatggaccattcaggattcgttactttatacatgttctccaagtttagtggcattagaagtaaactttgaatcctggcaacaaattgaaaaactaaacgaaagacatgaaatcattgcgtacaaatataaaaatacgagctctattatcaaagatacctcgaccgctgaacaagtgaaatggaaatgttatatcgattcttcttatggtagaagatattggttatacaagacggatccatttctaaaccgtgatgatttggaatcaaagtcaaatataaccaggtacgatgctgaaggccacaagatcatagagattattaatcagccagatttcttaaaatttgcccaaaataaaattatgcttggctgcggactagttcctcaaagtggtatcaggcgtaaattatgctacagagatttgaagccaccagtttcccagtttttgaataggaaaggtgccatcagtcttggtaacacgccattacctataattattccaacactaccccgaggtggatggagaattattcataacgaggacgaaagtaacagtgataatgataatcatatggctactattccaagaagaactccgctgctgagcagaccggttttgaggagcaacaatggtcctgttcgtcctgacccgattgctggtagtgcttccgcggcagctcaaattagagatgggttgtactgggataggtctgtacatgacttgcgtgaattatcattacaagaacaaagaattcaagatttagctgacgagcaacaggaattaaggacaatggctaattatgaagagactgacgatgaatatttgcatgatccggacttagagcggagaaggtctcaactgcgtctgtttgaaagttcacggtcacgttccggaaataaagcaagaccaagcctgaatagggaaaactcttcttccggttcatttttgtcattttctcacttaaatcaccatcgcaagcataagaactactacttcgcacaccctgatgagttcatctatgacccaagcgatccttggactactcaaagatatagactgcattttgaagtagttaacgaataccaagtttttgggtgcattgaacgcgggatgtatagatactacagtttaaaagcataa

SEQ ID NO: 1835 - DNA, 1800 bp, Saccharomyces pastorianus
atggtacaatcagaagaggacaatttagactcttcggaaacaacagcatccatatcatatattagtacttcatctgcatcatcaagagcacatccaaggacatcattatttttggagaatcttcatgacgcaaatgacgattttaatgcagaacaaatggcgatggctactgtttcttatgaaaatacaagtagaggtgaaggctttactgtatacattaacaatgaaagatactcgcgaatcatgagtgcatctacaagctctagctccagcattaaatcatctccaattgcacaattccgcagtatccaagatcataatgtaccaacgaacacagtggatccagtttggcttcgacgagttaatgaggagtcttcacccacaagaaatgcaacaccctcacaaactgtgacagtacgaccggaaagggccctgaattcaccttcttcacaaaggttaagttgcgcattgacaatatcaacttcagtactaatgggagaagatattgaggagagtcccttagagcgagaatctaacagggccgtatcttcaatatattcttctttggtaattcgcgggaacgatgagccaaagagtggaacgccccggcgccctactccaacttttcaacctaatgaaacaatggaaaattcatttctttcttaccaatacgacgaaactttggaacctagtgttgcagaagcagtaaaactaacgaaaaataggaatcccgatgtcaattacattagttcacgcagtggagaaggccaaaatgaaaaccaaagtcaatacgaactcacagacgaatcaaagttcataccgcataaattcaaaattccagagaagacggcatctatagtgtcatcagcaagtgatgagtttaattcgccaggtgctccgaacacagcaacaagagcgatgaaaattcctcagagtccatcactaataggaaatttactgattccgttacataacagtgacagcagtaacgggagttcccccagtgattgtagaggccccagtcgtgaaaatatattccgttccaagtcaacgtacaacacttcttcatccttagaggaagaaggccctcccattggagtaccatcaattcctgtcttaagaagtgtgtcgggaccaagcagatgggggaagacgcctctacgtgtagattccggaagatcgacgaaatctgaaccgttttcaccgtatggaggacctaagacgccatcaccattaagcaaagtaaacaacaaacgtaaaggagcctcggaacacgaacattttattgtattagctcctattaaatcgcaaagcacacagcaattagttgatgagaaaccgataatagaaataccaggccgaagtgtacgacgagaaatccaagagaaaactgacactacaaagcgagatggcggcggtgttgaggatatggatctggaagcaagaatgccgatccagcatatcgacaccgcatctatacattcttttgattcagggcagagtggattcaaagacgtttatagcgttgggagcatcgttatggtcatcatatgttgcatcgtggtaccgcccttgtttttcattattggatgtggccccagaagcaaaatggtttcagattataggttgatgagactgatcatgaataaggaacaccgagtggcgttgctacaaggattcatttgggacgttgatttgcgatggttccgaacactatgcctaatcctaggggctgctgaaaccatgatggtgatggcaggtattgccattggcttcggtgtaggtatcacacaagaatga

SEQ ID NO: 1836 - DNA, 1008 bp, Saccharomyces pastorianus
atgtctgaaccagcccaaaagaaacaaaaggtcgccaacaactctctagagcaactaaaggccgccggtaccgtcgtcgtcgccgacactggtgatttcagttccatcgccaagttccagcctcaagactccaccaccaacccatctttgatcttggccgctgccaaacaaccagctcacgccaagttgatcgatgtcgctgtcgcatacggtaagaagcacggtaagaccaccgcagaacaagtagagagcgccgtagatagattgttggtagagttcggtaaggaaatcttgaagattgtcccaggtagagtttctaccgaagtggacgccagattatctttcgacactcaagctaccgttgaaaaggctagacacatcatcaagttgtacgaacaagaaggtgtctctagagaaagagtccttatcaagatcgcttctacttgggaaggtattcaagccgccaaagaattggaagaaaaagacggaatccactgtaacttgactctattattctcctttggccaagccgtcgcttgtgccgaagctcaagttactttgatctctccattcgtcggtagaattctagactggtacagggccagcaccggtaaggaatacgccggtgaaaccgacccaggtgtcgtttccgtcaagagtatttacaactactacaagaagtacggctacaagaccattgttatgggtgcctctttcagaagtactgacgaaatcaaaaacttggctggtgttgactatctaacaatctctcctcaactattggacacattgatgaacagtactgagcctttcccaagagtcttggaccccgccaccgccaagaaggaagccggcgacaaaatctcgtacattaacgacgaagctaagttcagattcgacttgaacgaagacgccatggccaccgaaaaattgtccgagggtatcagaaagttctctgctgatattgtcactttgttcgatttgatcgaaaagaaagtcactgcttaa

SEQ ID NO: 1837 - DNA, 591 bp, Saccharomyces pastorianus
atgtctgtttgtttagccatcacaaagggtgtcgcggtttcgtcaataggtctctactctgggatcttggcttctgctacgttggtctcatccaccactccactagaggtcctgacaggctcgttatcacccgttctatccaatttgaggaatgcggccacctgcttaggggccatcgcctcgactttcttttgtgtgagtttcttcggcgcccctccttccctgagacacccttacttgttgtacggtatgcttgctgctccactgtcttcgttcgtccttggttgtgcgtcttattacaaatccagaaagctcactaaaatttcaaagcaatctgcattacaacctgatgagacgaagcctgtcgtttccgaactaagcgattccatcatcgatttaggtgagattgttcatgctgcaaaggactcaactcaagacaagagacctattactaccccgcccaagccggcagaggccctacaaaccggtcctccaatccataccaataatctagtcgtggctacagctattgctatccttggcttcgtacaagccgttgttggtatttacggcgaaggccaatttgtttag

SEQ ID NO: 1838 - DNA, 2673 bp, Saccharomyces pastorianus
atgatgcctgatgaaaattcaaactcgtccactctaagttcaagcgcgctgtacagggacctaaggaaagaatatgaatctcttttcacgttaaaggaaggttccggtctggaaatctcaccaatattcaacgttcttcctccaaagaaggactatccagactattacgcagtgatcaaaaatccggtgtctttcaacactttaaagaaacgtatcccgcactatacagatgctcaacattttctgaacgatgttgtccaaattccctggaatgctaagacctacaatacaagagattcaggaatttacaaatacgcgttagtcctcgaaaagtacttaaaagatacaatttatgcaaacctgaaagaaaaatatccaaagttggagtatcctgatttgggtcctttgcctgatgaaccaggctatgaagagtttcagcagaaattaagagaaaaagctgaagaagctgcgagggcaaatgctgccaaagctgaatctatctctttaataaactccaccgaagcagccaggaagttgaggaagacccgtaccgcttccgtcaaaagagaatctgaaccggggacggatacaaacaacgatgaagattacgaagccacagatatggatattgataactccaaagatgctgatttccctgatttgattcggaaacccctgataaacattaatccctacaatcgcaaaccattaagagataatagatccactacttcatctcattcgggcactccccaaccattgggcccaaggcatagacaagtatcaagaactcaagtgaaacgtgggagaccaccaataatcgacttaccttatattcaaagaatgaagaatgtaatgaagattttaaaaaaggaagtactcgacagtggaattggtctaacggacctttttgaaagattaccagatagacacagagatgcgaactactacactatgatcactaatccaatgagtcttcaagatatcaataagaaagtgaagactcgtcgttacaaagcattccaagaatttcaaaacgatttcaatctcatgttaaccaatttcagaatttcacacagaggcgatcctgagagtataaaaatctcgaatatcttggaaaagacattcaccagtttagcaagatttgaattatccaaacctgacagaagtttcattccggaaggtgagttaagatacccacttgatgaagttactgtaaataatatgtcatatcacgtgggggattgggcgcttctccgaaaccaaaatgaccctcaaaaacctatagtgggccaaattttcagattatggaaaactccagatgggagacaatggttgaatgcctgctggtattacagacctgaacaaaccgtgcatagagtggacagactgttttacaaaaatgaagttatgaaaacaggtcagtatcgtgaccatttggtatcaaacttggttggaaaatgctatgtgattcattttaccagatatcaacgtggtaaccccgatatgaaattggagggccctttattcgtttgcgaatttcgttacaatgaatcggataagatctttaacaaaattagaacttggaaagcttgtttgccagaagagattcgtgatctagatgaagccactattccagtaaatggtaggaagtttttcaaatatccttcccccatcagacatttactaccgacaaatgcatctccacatgatcgtgttcctgaaccaacgataggatcccctgacgcacctccattggtcggtgccgtttatgtgagacccaagatgcaacgggatgatttaggagaatatgccacatctgatgactgtccgagatatatcatcaggcccaacgattctccagaagaaggccaagtggacattgaaaccggtaccatcactacaagcacttcaacggcaaatgctcttccgagaacaggctattcaagtagtaaattgtctaatctaaggtacagcaggtcttctatgtcattagacaaccagcccccagttggtcaacaacagataccactatcaagagttggttctccaggtgcaggcaaccaccttactgttcagggtttaaagcaacatcaattacagagattacagcaacagcaacagcagtaccagcaacagaaaaaatcgcaagcctcgcgctacaatataccaaccattattgacgatttaacatcacaagcgtcaagaggtaatttaggaaatataatggtcgatgctgcttcatcattcgtcttacctatttccataacaaaaaacgtagatgttttacagcgtactgatccacatagtcaaaccaagagatctggaagagaagagatgttaccatggaaaaagacgaaaggtgaaatattatggtttaggggtcccagtgtaatagtaaatgaaagaataataaactcaggtgacccacgtttagaacagtcgttgaacagatggtccggcaccaacaagaaaagaaaactagaatacgaggaagtggaggaaaccatcgaaaacataactgaaaaagacgaaaaagatgatgcgatggaaccggatgtggaaaatgaaagagacaatttaccaggcccattcgtccttgggttgagaccttctgcaaagttcactgcgcatagactctccttgttgcggcctccttcatcgtcttcataa

SEQ ID NO: 1839 - DNA, 1449 bp, Saccharomyces pastorianus
atgtccgactacgacagttatgctactccattgtcttctagatatgcttctaaagaaatgtcaacaactttctctttgagaaacagattttccacatggagaaagctgtggctaaatttagccattgctgaaaaggaattaggcctaaacgttgtcactgatgaagccattgaacaaatgcgtcaacacattgaaatcactgatgatgagatcgcagaagcctctgctcaagaagctattgtgagacacgacgttatggcccatgtccatactttcggtcaaacttgcccagctgctgcaggtatcatccatttaggtgctacttcctgtttcgttacagacaatgctgatttgattttcctcagagacgcttacgacatcattatcccaaaacttgttaatgttattaacagattggctaagtttgctatggaatacaaggacttgccagttttaggttggactcatttccaaccagcacaattgaccactttgggtaaaagaaccaccctatggatacaagagttattgtgggatttaagaaattttgaaagagccagaaacgatattggattacgtggtgttaaaggtactaccggtactcaagcatctttcttagcgttatttcacggtaaccacgacaaggttgaagccctagacgaaagagtcactgaattattgggattcgacaaggtgtatccagtcactggtcaaacctactcaagaaagatcgacatcgacgtcttggctcctttatcttcctttgctgctaccgcacacaaaatggctactggtataagattattggccaatttgaaagaggttgaagaacctttcgaaaaatcacaaattggttcctctgctatggcctacaagagaaatccaatgcgttgcgaaagagtttgctctttagctagacatctaggttctttattcaatgatacagttcaaactgcatctgttcaatggttcgaaagaaccctagatgattctgctattagaagaatttctttaccaagtgcatttttaactgccgatattctattatctactctattgaatatttcatctggtttagtcgtgtatccaaaggttattgaaagaagaatcaaaggtgaactacctttcatggctactgaaaatattatcatggctatggtggaaaagaaagcttcgagacaagaagtacacgagcgtattagagtgctttcccatcaagcagctgcagtggtaaaggaagaaggtggtgaaaatgacttgattgaacgtgtaaagaatgataaatttttccaacccatctgggaagaattggattctttactggaaccatctactttcgttggaagagctccacaacaagtcgaaaaatttgttcaaaaagatgttaccaacgccttgaaacctttccaaaagtatttaaacgatgaacaagttaagttgaacgtttaa

SEQ ID NO: 1840 - DNA, 1305 bp, Saccharomyces pastorianus
atgaagtcatatttattaagtcgaagacaaagacacattcgtgcgatatgctttcataacattggtctctgtaagaccaatggaaataatatgtacataacggatcacgttgctgggtttgtgccatgcttctttattttagaatctataaggggggaactgctctatatcagtgaggtgcaatctgattctttacagaaacttcatttccaggaattaccgaaattgaatggcgcatctgctatgattgtattgaagttagttggaaaggtcccaaaggcagttttgcacagcattgtatcgaataagaatgccattaataatgataagtggtgcattttgtctacttatacgatcgatctcaacaagctgcaacctatttgtgacgacgtagcgttgattacaagtattaacatgccagttcttgaattggtagacgggtcttacacattatctaaggaaaacgttaaactattaaaggaaccaaccagcttacacaaaaggaatataagcgaaatcaaaatcaaaaattcactggcgtatagctccttactaaaactaaacaaattactcgagtattcttcgcaagttcatgaagaaatgagcgaactttccaccagaatagaagacagttttccattacataaaaaccaacatcaatggtacatagaaactgtacagaaatccattgctgcactacaaactaaaacaaataaaaaaaatatagaaaagtcacaatgtgaggataatggcaccatacaccattccaaaacagagatatccttggtttcacaagatgagtctataaacgatgattacgggagtatatattccagatttgtgcaaattaaagatagactagaccaactaaggataaagaaactataccagttgatagggatttttcgttcaacaaatttattcgatataggaaaaggttacatacgctttgagaggtcttctagctcggacaacattattgaaggtctcaaactaaaaactttacatatagagagtttattaaaagaggccgaagagtcttcaaagcaaagagagtatatgaacagccaactgggttattatcttttatttctccatttgacggcaactcaaatctttaaacttcctctaccttacaagttgatgtactatggaagtacttccgtaattgagagtcagtatcctctttactttactgattcaatgatcccaaagcatcaaacgaaactactgagagcaatgcattactttaacgccgacattttacaaattaaacagtttttggagaattattgttcaacatag

SEQ ID NO: 1841 - DNA, 1746 bp, Saccharomyces pastorianus
atgattcgtttaccgaaattatatcaaagattcctggtatacttatcaatttttggcttaatcgtattcctgtattatgatcataaccaaacatcaagagtacaagattataggatttctgaaggtcttaaaaaagagtttgacgcagatgccgaagagtggctccaggataacggtttagaatatctttctcctagtgacaatttgcttataaatattggcaatgagcaatgtttccatataggtcgtttttatgaaagatgcttcagtttttatgaactaagaccacaaccaaagagcgtacatttattggttgcaagaagaaaaatacataaagatttaaaaggttcatttgggcggaagtggttggggagatcagagtacctttattacgatatcttacgccttagctccttacattctctcggatctgattttggagagctgaatgtagatgctatcactggaatatctagtggtagtaaggataattctgtgtcatttaaggatttttctgttacgtttgaacccatcagcatagaactactacaaaagcgtggtataataagtgaaatcaatattctctttggcactgattgtgtggatccgcgagaaacttggagtttacaaaaggatgtttctttcacacactatgcaggtagtgaacctgcttacttgacttacagatttgcgggtttttaccctgcgaattcaaaagcccaacgtctacaggaaacagacgaaggcagattcaagatcgttcaattagcagaccttcacttgggtgtaggagagtctgaatgtgtcgacgaattcccaaaacatgagacttgcaaagctgatccaaagacagaggccttcgtccaacaagttctagacatcgaagcacctcagttggttgttttcactggtgatcaaatcatgggcgacagatctatccaagactctgaaacggcattactaaaagcagtcgcgcctgtcatttcgcgagggattccatgggcaatggtatggggcaaccatgatgacgaaggaagcttgacgcgttggcagttgtccgaattagcttcaaccctgccatattcgctttttcaatttagtacttacgatacaaaagataacacatttggtgtcggtaattacgttcatcaggttttttcatataataatacagaagtaccggtgagtacgctttattttttggattctcataaatattctactgttggtaagatttatcctggttatgactggatcaaagaatctcaatgggaatatatgaacaaatactatgatgaaaccttggaactgaaaactgagctttcaatggcgtttttccacattccattaccagaatatttgaatattcaatcgagtacacaccccggggaggaaaacgccctcgtgggtacttataaagaaggcgtcactgcacctaaatataactctgaagggatggctactttgcacaagttgggtgtggatgtcgtcagttgtgggcatgatcactgtaatgattattgcctacaagacgattccacaccaagtcaaatttggttatgttatggtggtggaggtggggaaggcggttatgctggttatggaggtacagagagacgtatccgtatttatgagattaatataagtgagaacaatatttatacatggaaaagactaaatggtagccccaaagaaattttcgattaccagtctatgttgaacaataattctccaaaaactgtttaa

SEQ ID NO: 1842 - DNA, 288 bp, Saccharomyces pastorianus
atggcagttggtgacaaaagtgatagtgataacagtcatactaaaaatacaacagagttggagcggagtttgggcgataatccaaagatcgttttaaaaggaggaggaaaaacaaagctgatgaaccttgaacaactacgcaagccccattgcataaaacccaatccaagagtttcagcaggagatgctggtggcctattaagaagcggcggtcacagacctggattaagtgaagaagaagtttctaaaagagactatgagcatttgcatgagcaagagaagcactaa

SEQ ID NO: 1843 - DNA, 657 bp, Saccharomyces pastorianus
atgacacagtataatttcattattgatgcctcggcttttgaaaagggtttaggtaacattaaaaggtggtgttctgactgcacggagacggtaactttgaatttctatattccaactttcacattaaatgaattggattttcttcaacagagacgtaagagttttgcggctcgcgaatccttgaagttcattgacaggttagacgatcctagctttactaacttgaaagttttcattgagtttcccgaagttttagatattatattatggtctgatgttatggaacataacaacaatgctggcaaggtaaatattgcgaagctgcctaaaagattgaagaatttactgaaaagttgcatctataaatgctatttagacgggaatgaggggttgcattggtttctaataagcgaagattctcaaattcgtgatatggctgtacaatgcaacattccctcttgttcaattgttgatgtggattcgatcttatctaaggacatgaacgacaaatcatttagagagagtgaaaaattcaataatatgatgcttaaaaatggcactaaggaagaaagcgaaaacggcagagaaaccatcaaaactaatttcgataagacagtatatgcttcgagaggtacgggtgaactgtggtctccatga

SEQ ID NO: 1844 - DNA, 330 bp, Saccharomyces pastorianus
atgtccgcttttgttactaaggctgaagagatgatcaaagctcacccatacttccaattatccgcaagctggtgtcctgactgcgtatacgcaaactctgtttgggacaggttcaacgtaaaggacgaagtgtttgtttttgacatcggttctctgccaagaaccgaacaagaaaaatggagggttgcatttcaaaaagttgtcggtagtagaaacttaccaaccattgttgtcaatgggaagttttggggaaccgagagccaattgcacagatttgaaaacaaaggtacgctaaaggaagagttgactaaaattggacttctgccttga

SEQ ID NO: 1845 - DNA, 531 bp, Saccharomyces pastorianus
atgcctgcctatcattcgactttccctgtagatcctcacaatgaccgcatggtaggaaactttgcgcttctgcccttaaacaccaagttcagaggaccagcataccctaccaattctgactacgatattattgacgagtgtttggacctgttccgcgctaactccttcttcaagaatttcgaaatcaaatctcctgccgacagagtgctcatctatggaatcctcttcattaatgattgcttagcccatttaaaaataacaactccccatagtgaggctgtgaaggtgttgactaacgtggccttagataacttcaccctacctggtacacccggttttcctctgaataacgtttatcaagtgccagtacaggaccataactcaatggacctgttaaagacctacatccaacagttccgtcaagagttgtcagtgagactattggaaagaatctacaaagactccaaagaccagccctccaagttttggctggccttcactagaaggagattcatgaataaatcgctatag

SEQ ID NO: 1846 - DNA, 4080 bp, Saccharomyces pastorianus
  modified_base (761)..(794): a, c, g, t, unknown, or other
atgagcgaagcaaacgttgacagcataaaggacagaaatgacatttactctcaaatattcggtgtagagaggaggccagactcgtttgtatcttttgatgacgatttgcatggcgacataaggtttcaggtgttgcccagccgaatcgaagatatcgagaacctaagtgttcttatttccgaggacattgccaacgacatcattatagccaaacagaagaggcattccgcttctcagccagtaaccaatgatcctattgtaaccagtagcgatatggggggaaaaaaatccaactcaaactatattctatcgcaacaagctactatcaaggatgtcccagatacacaaagtctatcgagtgctgataatacccctatcagtagcccgaaaaaagcgagggaccctccagcctcccctcccattattcatgctaaatcaatgtctcatatctactcaacaagtaataatgccagcagacaggccaaaaaccatagtgatcatcctttgcctccaatgtctccaagaaacgaagtctaccaaaaaaacaaaggtcctacggtctttgtacccaagaggaaaccttcactcccgcaactagcccttgctggtcttaagaagcaaactagcttctcaaatgggagtggttcgactacccctacacaggcaagaaagtcgcctttgcaaggctttagtttcttttccaggccaagttccaaagacctgcacgaacaacaactacatcagcagcagcagcatattcnnnnnnnnnnnnnnnnnnnnnnnnnnnnnnnnnncaacaataatactaataataacggtacccatcatcaagtgggcaataacaataataactacccacaacattcacattcactatcatctagatcgatgtcattaaactcttctactctcaaaaatattgcatcatcttttcagtccaagacttccaacggtagaaaagtccctcaaaaatatgaaatgtcttccaacccattcgcagattctcaccactaccatcacacttcaaatagtcacagtaacctcaacaatggtcacagttccatgaagtcctcaaacaccatgagtgcatcgtctgctattggtttgggtctcaagacgagagtttcttcgacttcattggcttcgaagcgatacacttcggtttcaggaacttccttagcatccccgcgtagaagcagcatgacacctctgtcattatcgagaccagtaatgagcgcttctacaaagaggccccaggtatatccagccttactgtcaagagtcgccactaaattcaaaagttccattcagctcggagagcataaaaaggatgggttggtttaccgtgacgcatttacaggtttgcaagcagtcgatgtaatttgtgctatcattagaacttcggacagaaatctggctttactatttggtagatcactagatgctcaaaaactatttcacgatgtggtttatgaacacagattaagagattctccgcacgaagtttacgaatttacagacaactcaaggttcacagggaccggttccacaaacgctcatgatccgctgatgctgctaccaaattcatcttctttcaattcagggaaccaaccttatcaaaattctggaatggttccatcaagttctacttcttctttaagtagtgaacaggcaactttgacgggttcaagactgcacatgaatcgttcactatctcaacaaaaaaacccagcagcgattcataatgtcaatggtgtcttcacattgctggcggaatgttattcccctacgtgtacaagagacgctttgtgttattcaatttcatgcccaaggcgtcttgaacaacaagcgagattaaatttgaaaccaaatggtggcctaaagcgtaatatctcgatggctttagatgatgatgatgaagaaaaaccatcttggacaagttctgtatccgaagaggattgggaaaacttacccaaaaatgaaatcaaaagacaagaagctatctatgaagtttatatcacagagaagaactttgtcaaatcattagaaatcacaagagacaccttcatgaaaactttggcagaaaccaatataatctctgcagatataaggaaaaactttatcaaacacgtctttgctcacataaatgacatttactcagtgaatagacgatttttaaaggctttgacagatagacaaaaaagtgcaccagtagttagaggtattggtgacatcgtactacgatttattcctttttttgagccatttgtttcgtacgttgcttcaagaccatatgccaaatacttaattgaaacacaaagatcggtcaatccttattttgccagatttgatgacgacatgatgagttcgtccctgagacatggtatcgactcgtttttatctcaaggtgtttcgagaccgggtaggtatatgttattagttaaagaaattatgaaatctactgacccagagaaggacaagggagattacgacgacttgagtaaagccatggatgcgctgagagatttcatgaaaagaattgaccaggcaagtggtgctgcacaagatagacatgatgtaaaattactgaaacaaaaaatcctcttcaaaaacgaatatgttaatttagggttgaatgacgaaaagagaaaaatcaaacatgaagggatactatcaagaaaggaactgtcaaagtcagacggtgtgattggggatattcaattttacctactagataatatgcttttattcttaaaggccaaagcggttaataaatggcaccaacacaaggtttttcaaaggcctatcccattgccattgttatttgcatgtccgggagaagatatgcctgcgttaaggaaatatattggagaccatcctgattgttctggaacggtgatccaaccagaatataacgcaaataaccctaagaacgcaataactttcctgtactacggggccaagcaaaggtaccaagtcacgctatacgctgcacaatatgctggattacaaacgcttctagaaaaaatcaaaaaggagcaggcaactattattagtacgaccgaaatgttcaatgtgacaaagatgagtgatagattctttgattacactaacaagatcaacagtgttacttcctgtgatggtggtagaaaattgttaatcgcgactaattctgggttatacatgagcaatattaaaagacagcagaataaagatgagaaacagaaaagctccgcatttttttcaactccgatccaattagtgcaaagaaataacattactcagattgcagtgttggaagagttcaaatcaataattctattgattgataaaaaattatacagttgtccgttgtcattgattgaagcagaaggtaatgggacatctttcttcaaaaagcaccataaggagttgatcaatcatgtgagtttcttcgcagagggcgactgtaacggtaagagattaatcgtgactgcacacagttcgtcacattcgattaaatatttcgagcatgaacatccattattggctgagaaaaatggtggtgggagcggcaataagaaaaatctgcgaaagaaaattaccgaggtcacttttgattccgagccagtctccatctcatttttgaaggccaacttatgtattggttgcaaaaagggtttccaaattgtcagcatttcgcagaatgctcacgaatccttattagatcccgccgatacatccttagagtttgcgctaagagatactttgaaaccaatggcaatttaccgtgtagggaacatgtttttgttgtgctatacagaattcgcctttttcgtcaataaccaaggttggagaaagaaagaatcgcatattatacactgggagggcgaacctcagaaattcgccatttggtacccgtacattctcgctttcgatagtaatttcattgagattcgaaagatcgagactggtgagttggtccgttgtgtccttgccgataaaatccgccttttacaaactagcacccaagaaattctctactgttatgaagactatcgaggatacgatactgttgcgtcattagacttttggggttga

SEQ ID NO: 1847 - DNA, 2682 bp, Saccharomyces pastorianus
atgagaacaatggaaacgcaggtgcagggtgccgacagggggctggtgttgcccccaatgaactcaacggtgtcgacggcgacggcggctaccacggtcacgaatacggacacagatacagatggagatgaggaggacgaggaggaggacgaggatgaggacgaggatgagccattggtggaggacggcggcgtcgaatgggtgcccgcgtacatgctgaccagggaaaagtcgcactacttgggccacttccttggggccaacaagatgctggaggccgtgaagtgcaagcattgcgacgtggtgattagacggcaggcgagcagcacgagcatggccgtggcgtgccaggaacatctgcggagcgtacacaggatagacccgaatgccaattactacggtgggtggtccaatgcagacgctggcgccacctccatgacaaggccgcctttgaagaaccaccagggcggagttagcaacactgcgacaagcagcattgtaaaccttctggaaatagacgaggaccttctaaagcggacgaaagagagagaaatggctttgcctcttgtgcaatcgctcgctatcattatcgcgtcggagaacttgcccctgtcgtttgtagacaactctgctgtgcgtctcttgatcaaccagaacgccaactcactaagcttcatcgatcacgatttgatcctgaacacaatcaggtccattgcgtacaatcttgaccgaatcatccaaaggacggcgttgcgtaacaactcagacttgtcgttgatcatcgacaagaattatttgttgctagacccgacagaaaggtccaatcaactgtcgaatagattgaaaaaccaactgtttgagatgcagaagatcaattttttttccttaagccattccatttggaataacataacctccatcttgagcattcaatactatgacgatttccattcccaagtgaagattttgcccctgatcatccaaaacctacacgaattcgacaacgatcctaaactgtccattccagcgcaattgttcaaaatatcacaggagttacctgggttgcagaacacggtaatctccatgactttgccaaggccccaactaatagatcttttgaacgtcatggacagccagccctttttccctaattcgtatacgaatgccaagaactattaccataactgtatcatttccattataaattcggcaatgctaccattatttggtacttttaaatccactgatatcaagtatccggtaccatcatctaccaaggaaccactgactcttttagactctttgatcgatttatcgaatatagacatttcaaacacaattttctcgaaaataaattctttcctagatgagttgcaatcaaatccgtggcaactagataaattccgctcactatgcgggaaattcggattcgaattcaagtgtcatagattcagaatatctcgttattctactgccacggtttcattgcaaaacttcttaaatctacgtcctataatagaagaataccaatccaccattcaaattgataaattcaacgaaatcgatttccaaataatagactatttattagccactttaaattctatcaatagaatactagagttctttacctcttccaaaaatttgaatttcacatacgttttgtttgccattatgtctattgaaaaacacttactatctactttgagtactctacaatttcaaaggttgattgcgccatttgaagcatttttgtcaaagatccaagaattcaaaacaattctattttcagatgacatgaatctcttggcgatgtttttgtgccctgcaattttatttgaaagagaagttctggagtattctttccatacaatttcactttctgaaatagtagacaaactttccacactaattttcactttgctgaaaagatttttgaatttgcaaacaataggtaatgtgaacaacgataataacccctctaataacaaccacatgaacaatcacaatggcgacaataacaacgtttcaagttcaaatacaccagcatcaagaataaatatagagtctaatagtggacgaagcttagcctcacccgcacaacagccacacgaaaacaacaacaataacaacaacaataacatgccattcaattccctcaatgatactcatcaactatcagactccaccatctcgagcgaaatagacacaatatttttgcaaaccatccaagaagatttatacgaatatttaagtacggtgaattctattgtacctatatcatatagatcatattgtgaacagagtagtttcgtgagagataatggtcgtttcaaaaagagaatcataactgaagattctatattaggcgagttagagcaaccaatgaacttcatcgaggagttactagacatacacgttcccgtatgtagtgcattttgggaccaatttttggataacgatgctggaccaataattagagtattattcaagatgatgcaatgtcagtcttcttcatccatcagggaagaatattcatttttgaatgacttcgttccaagagtacatcctgatttgactcaagaaatcattaagatcaaattatttaatgatcaattcgtggccagtaaagtggactacgatttagacactttgcaaactgcaagccaatatattccgtag

SEQ ID NO: 1848 - DNA, 1443 bp, Saccharomyces pastorianus
atgtcctccaatcgtgttctagacttgttcaagcccttcgagtccttcctgccggaagtgattgctccggagagaaaggtcccttacaaccagaagctcatctggacaggtgtttcgctgctgatctttttaatcctgggccagatcccgctgtacgggatcgtgtccagtgaaacctcggaccctctgtactggttgcgtgccatgctggcctccaaccgtggtacgctgctggagctgggtgtctcgcccatcatcacgtcgtcgatgatcttccagttcttgcagggcacccagctgttgcagatcaggctcgaaaacaagcaagacagagagttgttccagattgcccagaaggtgtgcgccatcattctgattttgggccaggcgctcgtggtcgtcatgacgggcaactacggtgcgccctctgaccttggactccccatctgtttgttgttgattttccaattgatgtttgcgtcgctgatcgtgatgttgttggacgagttgctgtccaagggctacggtctaggctccggtatctctcttttcaccgcgaccaacattgctgagcaaatcttctggagggcctttgcccccaccacggtcaactccggtcgtggcaaagaattcgaaggtgccgtgatcgcctttttccatcttttggttgtcaggaaggacaagaagagggcccttgtggaggccttttaccgttccaacctgcccaacatgttccaggtcttgatgaccgtggccatcttcctgtttgtgctgtacttgcagggcttccgctacgaactgcccatcaggtccaccaaggtgagaggtcaaatcggtacctacccaatcaagctgttctacacttccaacacccccatcatgttgcaaagcgccttgacctccaacattttcttgatctcgcaaatcctcttccaaaagtaccccaccaacgcgttcattcgtctgatcggtgtttggggcatcaggccgggcacccagggccctcaaatggccttgagcgggttggcatactacatccagccattgatgtccgtatccgatgccatcttggacccaattaagaccgttgtctacatcacttttgttttgggttcgtgtgcagtcttctccaagacctggatcgagatctccggtacctccccacgcgacatcgccaagcagttcaaagaccaaggcatggtcatcaacggcaagagagaaacctccatctacagggaattgaagaaaatcatccccaccgcggccgccttcggcggtgccaccattggtgctctgtccgttggttctgacctgctgggcactctgggttccggtgcgtccatcctgatggccaccaccaccatctacggctactacgaagcggctgccaaggaaggtgggttcaccaagaacctggttccagggttttctgatttgatgtga

SEQ ID NO: 1849 - DNA, 1221 bp, Saccharomyces pastorianus
atgtccttcgataaccagttgaccgacgaccaggagattgtgctcaagcagatttggactcatctcttccatctctggcaggtgcccgtggacggctcttccatctaccgtagtaactctgtccacaactcgccccccaagaagaagaaaacgtcttggttcagcaagctgcactcctccgacgagacacaggacggtggcgaagctgctgagacggccagcctctacgaaaagggcaaggtacacaaggcgctggccaacttggacccggaatcgaccatgaagcagttctggcacgatatcaagaacgagaccccggatgccacccttttgaagttcatcagggcccggaagtggaacgcagaaaagaccatctccatgctgggccacgacctgtactggcgcaaggacacgatcaacaacatcatcaacggcggcgagagggccgtctacgagcaaaaggagaccggtgtcatcaagaacctggaactgcaaaaggccaccgtccagggctacgacgtagacatgagaccgatcatcctggtgagacccaggctgcaccactcgtccgaccagaccgaacaggaactcgagaagttttctctgttggtcatcgagcagtccaagctgttctttaaagaaaaccacccggcctccaccaccatcctctttgacctgaacgggttctccatgtccaacatggactacgctccagtcaagttcctgatcacgtgcttcgaggctcactatccagagtcgctgggacacctgctcatccacaaggccccatggatcttcaaccccatctggaacatcatcaagaactggctggacccggtcgtcgcgtccaaaatcgtgttcaccaagaacatcgacgagctgcacaaattcatcgcccctcagtacatccctacctacctgggcggtgaaaacgacacagacctggaccactacacgccaccagatggctccctcgacgtccacctccaggataccgagacccgcgctaagatcgaaaaggaaagggacgacctggttcagcagttcctggaggccaccactcaatggatcgaacatcagcccgtggacgacccaacatacgtacaattacaggaaagaagatcgcaactctctgctgcactctgtaagaactactccaaattggacccgtacatcagatcgagatctgtttacgactgcaacggctctttgaaagtttga

SEQ ID NO: 1850 - DNA, 2688 bp, Saccharomyces pastorianus
atgatgcatcgatcttcaagacggtttttatccactcaaagaaaaggtcctggtcctggtgtgcagaagctgattgcaatcggcgagaaatggaaacagaagaccatccgtgggttccccaaacaagaaggccaagataaaggttcaaaatatatcttgtgccagtttccgtatccctccggaatgttacatataggacaccttcgagtgtatgttattagcgattccttaaatagattttacaggcaaagaggctacgacgtgatacatccaatggggtgggatgcttttggattacctgccgaaaatgctgctatcgaaaggggtatcaaccctgccatatggaccagagagaatatttcaaaaatgaaacgacaaatggaaagtatgctggccaattttgactgggaccgagaactagccacatgtgatcctgaatattataaattcactcagtggatttttttaaaactgttcgaaaatggcttggcttaccgcaaggaggctgaaattaattgggatcctgttgataagacggtcttggctaatgaacaagtagatgcccagggccgttcttggagatcaggagcaattgtagagaaaaagcaacttaagcaatggttcttgggaataacaaaatttgctcctaaattgagaaaacacttgagtcaattgaaggactggccttccaatgtgaaacaaatgcaaaataattggataggtgaatctctaggttcagaactgatctttaaagttaccgattccagatttgaagatttggtagtgtttacaacaagacctgaaaccttatttgcggtgcagtacgtggctctagcattggatcatccagtggtacagaagtattgtgagacgatacccgatttgaaagactttttgagcaaatgtaatatattgccagacgatacaaaagaaggattccatttgcctaatataagcgccgtcaaccccttgacgaaggaggaagttcccatttttgtagctccttatgttatcagtggctatggttctgcaccaagtgcggtgatgggttgtccaggccatgatagtcgagattttgaattttggaaacaaaattgtcccggacagcacattaaaacatgtgtaacacctttctttgacgatacttccaaattatctgaaaaagaaaaacaagaattaatcgaaactgttccatttacgtccactgatggtgttctgactaaagtaagtggcgagtactcaggagtctttactggggtggcaagaaagtcaataatggggaaactgcataccgaaaaattatccaaaaatgtcgttaggtataagatcagagattggttaataagtagacaaagatattggggtactccaatccctatcgtccactgcgatagttgtgggcctgttcctgttccagaaagtgacctgcctgtcaaactgcctgatattaaggaattgaatacgaaagggaacccgttatcaacaatcaaagagtttgtaaatgttgattgcccttcctgtggaaaccccgccaaaagagagacggatacaatggatacttttattgatagttcttggtattatttcagatatctggacccgaaaaatacatcaaaaccgtttgatcgcgaaatcgcaagcaagcatatgcccgtcgatatttacattggcggagtagaacacgccattttgcatttgttatattcaagatttatagccaaatttcttggatccatcaatgcatgggacgatcccactggaatgtttgagcctttcaaaaaactagtcacacagggaatggttcaaggtaaaacctatattgatcccgacactgggcggtttttgatgtctgatgagttggaatatatgaatgactcttcggacagtaattctgtaatcatcaaagcaaacggcaaagtaccgatggtatcttatgaaaaaatgtcaaaatcaaagcataacggtgctgatcctaacgaatgtatctcaaagcacggacccgatgctacaagagcacatatccttttccaaagtcccgttgcagacgctctcaattgggacgaatccaagattgtcggtattgaacgttggttgcaaaaggttcttgctttgactaaaaatattcttaaccttaaggagaatctgacaatcagtaaagagtacaagacaccaacagatctgaacgatgcggaggtaaaacttcacaatgatgtacaacgttacttgaagtcaataacggaatcctttgagattcatctttcattgaatactgtaatatcagactatatgaaattaaccaatattttagaggctgcattgaggaaaggtgaaataagaaatgaaatgatggtacagaatttacaaaaattggttaacagcatctaccctgtggtcccatcaatttcagaagaggcggcagaaatgattagctctcaaatggaatggaaccaataccagtggccagcagttgagcgcgctactgaatcccaatttaagaaatttcagattgttgtaaatggtagggtcaaatttatgtacacagcagataagaattttttcaaattgggtagatatgctgttattgaaactttaatgaagttaccagaaggtagaatgtatctaatgaataagaagatcaaaaaattcgttatgaagtataatgtggttagtttcttattccataaataa

SEQ ID NO: 1851 - DNA, 3348 bp, Saccharomyces pastorianus
atgacttcaacagtggttggtaataaaaggcctatagagcaggttgacgatgagttgctttcattgactgcccaacaggaaaacgaacagcaacagcaacagagaaagcgcagacgccaccagtttgctcctatgactcaattcagcaataatacgctggatgaagaagacagtggcatcaggagcaattccgagactacagtggcggataacgatgcctttttggaggaatcgccttctggatatattaaaaaagtaatcttaagaaactttatgtgccatgaacactttgaacttgagctaggttcccgattaaattttattgtcggtaacaacggtagtggtaaaagtgccatattgactgctattactattggtttgggagccaaggcaagtgagaccaatagaggcttgtctttaaaggacttgattcgagaaggctgctattctgccaaaattactcttcatctagacaatagcaagtatggtgcctatcaacaaggaacttttggtaatgaaattatagtagagagaacaatcaagagagatggacctgcctcttttagtttgaaatctgaaaacgggaaggagatcagcagtaagaaaaaagatattcaaactgtagtggactatttttctgttcctgtaagtaacccaatgtgttttttatcacaagatgcagcccggtctttcctaactgctagcacttctcaagataaatatagccattttatgaaagggactttactgcaagaaatcactgaaaatttggtttatgccagtgccattcatgatagtgcacaggaaaacatgggactgcatttagaaaatttgaagtctttgaaggccgaatatgaagatgctaagaaattgttacgagagttgaatcagacttcagacttaagcgagagaaaaatgcttttacaagcgaaatcattatggattgatattgcgcataacacggatgcctgcaaaaacttggaagatgagatcagtggtattcagcacaaaatcgatgaaatttctgagaaaattaacagcaggcaagaaaagattgaacgttacacatctgacggtgcaactgttgaaggagaaatcgattccaaggtcgtatatgttaatgaaaaggatagcgatcatcaaaatgcaaggcagctattaagggacgttaagagtaggtttgaaaaggaaaaaagtaatcaagctgaagcggaaagtaatattgatcaaggtaagaaaaaagtcaatgctttaaataaaacaattgctcatttggaagaggaactgacgaaagaaatggggggtgataaagatcagatgagaaaggaacttgaacaattagaaaaagataatgaaaaattgagagatgttaataattctctggttgttaatttacaagattcacagaacgaagaaaaagacattcagcatgaacgtgaatcagaattgagaatcgctgcgcgtagcattcaaaacaaaaaaatagagttacagaatattgccaaaggtaatgatactttcttaatgaacttcgatcgtaacatggatatgcttctgaggaccatagaacaaagaaaaaacgagtttcaaactcctccaatcgggccattgggttcctttgtaactatcaaaaaagatttcgagaagtgggcacgttctatccaaagagccatatcatcttccttgaattcatttgttgtgtcgaacgcaaaggataataggctattcagggacattataaggtcatgcggtataagaagcaatatccctattgttacctatcgtttaaatcgattcgattattcaagaggtaaggcacacggtaactatccaaccatagtggacgcgctggatttcacaaaaccagaaattgagtgcctattcgttgatttaagtaaaattgaaaaaatagtgttgatagctgataaaaatgaagctagaaatttcttacagagaactccggcaaatgttaatatggctttgtcgttgagagatagacgtagtggtttccaactttcaggtggctataggctagatacggttacgtatcaagataaaatcaggttaaaggttaattcatcatccgataatggggccagctatttgcaggacctgattgaacaagagaccaaagaaatacaacatatacgagatcgttatgaggagaaattgggtgttgtaaggttaaaaataaatgaaatagatgttcgactcagaaacacaaaaaatgaaatgagaaaaactaattcgagaatcacggaattgaaaatgaatgttgggaaagtagtcgatacaggtatactgaattcgaaaatcaatgagaggaaaaatcaagaacaagccatcgccggttacgaagctgctaaagaagaacttgggttgaagattgaacaaattgcacaagaagctcaacccatcaaagagcaatacgattctacaaaattagctctggtggaagcgcaggatgaattacagcaactaaaggaagacatcaacagtcgtcaatccaagatacaaaaattcaaagatgatattgtttattaccaagataaaaagaaatcttatcaggaaaatataaaaaaaattgaagccaatgtagcggtattaaatgaaggtatacaaaaacagattgaaaatgcatgtggattttgttcaaaggagcaactggaaggtgtcgacttaccggatactcaagatgaaatcaaacgtgaactggaaaaagtctcgaggatgatccaaaaggctgagaaaagcttagggttgtcacaggaagaggttattgagctatttgagaaatgtagaaataaatacaaagaaggtcaaaagaaatacgtggagatagacgaggcactaaacaggttgcataattccctaaaagctcgtgaccagaactacaaaaatgcagaaaagggaacatgctttgacgcagacatggatttccgtgcatccttgaaagttcgaaaattctctgggaacctttctttcatcaaagataccaagagcttagagatatatatcttaaccactaacgatgaaaaagcaaggaatgtagacactttatctggtggtgaaaagtccttttcccaaatggcattgttattggctacatggaaacctatgcgttctaggattattgcattggacgagttcgacgttttcatggatcaagtgaatagaaagattggtaccactctaatagtcaaaaagctaaaagatattgcaagaactcaaactattatcattactcctcaagacatcgggaaaattgctgatatcgacagttccggtgttagtatacacaaaatgagagatcctgaacgacaaaataactccaacttttataattaa

SEQ ID NO: 1852 - DNA, 2640 bp, Saccharomyces pastorianus
atggataagtcgattgccaaaggtctgagcgacaaactgtatgaaaaacggaaggctgctgccttggagttagaaaagttggttaaacaatgtgtcttggagggtgattatgatcgcattgacaagataatagacgaattgtgcagggactacgcatatgcattgcatcagcccatggccaggaatgcaggattaatggggttggccgcgaccgcaattgctctgggaataaacgatgttggccgctacttacgaaacatccttcctccagtgctagcgtgttttggtgatcagaatgatcaagtaaggttctatgcatgcgagagtttatataacattgcgaagattgccaagggtgaaattttggtttacttcaatgaaatcttcgatgtgctttgtaaaatcagtgctgatacagagaactcagtccgaggggcagctgaattactagatcgtttgatcaaagacattgttgcagaaagagcgtctaattatataagcattgtgaataatggttctcatggtttacttccagccataaaaacggacccgattagtggtgacgtttaccaagaggaatatgaacaagacaatcaactggcgttttccctaccgaagttcattcctttgctgactgagagaatctatgcaatcaatcctgatacccgtgtgttcttggtcgactggttgaaagtcttactcaatacacctggattagagctcatatcgtatttgccatcctttcttggggggttgttcactttcctaggtgactctcacaaagatgtaagaacagttactcatactcttatggactcactattacatgaagtcgatcgcatctcaaaattgcagactgaaataaaaattaatagactggagaggctgaagatacttgaagataaatacaataacaattccactccaactaaaaaagccgatggcgcactcattgctgaaaagaagaaaacattgatgactgcattgggcgggctatctaagccggtaagtatcgaaactgatggaagcgtatcaagcacaaatgaatcaaatgatgaaaggcaccaaaataaccaggaacagttattggatagcgaggcatctagccaagaaccacttcgtgatggcgaagaatacatacctggccaagacatcaatctaaattttccagaagtcattacagttttggtgaacaacctagcgtcttcagaggcagagattcaattgatcgcattgcactggatacaagtcattttatctatttcaccggacgtctttattccatttctctccaaaatactttctgttctgttaaaactattgagcgactcagatccacacattactgaaattgctcaacttgtcaacaatcaattactgtcactatgcagctcatatgcaagcaaagaaacggatggcaaaatcgcttatggtcccattgttaatagtctgacactgcagttttttgacagtaggattgacgccaagattgcctgtttggattggcttatcttgatttaccacaaggctccaaaccaaattttgaaacataatgatagcatgttcttaactttattgaagtccttatccaatagggacacggttttgattgagaaagctttaagccttttgcagagcttatgttcggactcgaatgacaattatttgcgccagtttctccaggatttattaaccctattcaagagagataccaaattggtgaaaactagggcaaactatatcatgagacaaatatcttcgcgcctatcaccagaacgtgtttataaagtaatgtctattatattggataattatagtgacattacatttgtgaaaatgatgattcagattttaagtacgaacctaataacatcgcccgaaatgtcctcattgaggaataaactcaggacttgcgaggatggcatgtttttcaacagcttattcaaatcttggtgtcctaaccctgtgtctgtgatatcgctatgctttgttgcggaaaactatgagctagcttactcggtaatacaaacatatgcgaattatgaattaaaattgaatgatttggtgcaattagatatcttgatacagttgttcgaatcaccagttttcacaagaatgagattgcaacttttagagcaacaaaagtatccatatttgcataaatgccttttcggtatactgatgatcataccgcaatcgaaggcatttgaaacattgaataggagactgaatagcctaaacatatggacatctcaatcatatgtgatgaacagttacgcaaaacaaagagataacactaacttctgcgattctaattcagatatctcacaaaggtccgtaagccaaagtaaactacacttccaagaactaatagatcatttcaaagccacttctgatgaagaagagtacccttctgatatgataaaactcgaccatggggctaataacaaatcacttctacttggaaatttcattgacggtatcgatgaagataaacaagaaatagtctctccaatgtcccctatgaatgaggcaattaacgaagaaatggaatctcccaatgatagtagttcggtaatattaaaggattctaatagtctaccatttaattcaaacatgtctgataaatcgaaaaaataa

SEQ ID NO: 1853 - DNA, 1311 bp, Saccharomyces pastorianus
atgagctccgctatttttacatgtaattgttgtgttatccagttcaaaaccagtgatttgcagaggtatcacatgaagactgaatggcatagatacaatttgaagagaagaattgccaaccttcaacctattggcgcggaacagtttgctgaaaaattgcaaatttctgaaaaggaacaagctgaaaaccaagtcgatgagttcggctttcccgttttgaaacctatcgttaatcaaagtagccaacatagtgcattatctgcgaaacagaaaaagccaatcaagtcgaaaagaggaaggaatgttggtgcaaacttgctgaagaaaaatgacaaggatgacgttgctaaagagaaaaaagctaggtccgtttctccttctggatcaatatcttcgcagttgtctaacctgaccgtaagaactgaaaatacaaacacagattacggtgaagatactgtttctgaatatggcttcacaagcgactctaattatgatgctactagtgatgaggatttagacgccgccgacagacccatagataacaaagaagctgaaaagatatctatcaccgaatgtatatattgcgggaaaaatagcaaggaagttgaaaggaatgttaaacacatgtttaacgaacacggtcttttcatacctgaaagatcctatttgattgatttaaatggtttattagaattcttaataaaaatgattgttatagaacataactgtttatgttgtaactttcacggctctggtttagaaagtataagagcgcacatgagttctaagcgccattgtaggctaccgtacgaaacaaaggaggagcgtcaattgttcgccccattttacgatttcacgtatgatgatcgttctatcgatgaggagactcagtgcggtacagcaggcataccagagccttctacggatcatgaggcaaaggactatgaggaagatgccgaagtggatactacgttgattctgagcgataacgatattaatgcaaattatactactgtttccattgacgaatcaggtttggaacttactttaccaacgggcgcaagactaggtcaccgtgcaggacagagatactacagacaaaatttaccctcccaatcaaatcccgatgagagcagaagaactgttaccgccgccgacaggaggatgattagtggtgtcactgaaaagcaatacaagaagggcatgaagaaaatgcaacaattggagaaaactgccataaatacgcagatccgccgtgatatcaaaagggtcaacttccaaacacactacagggacgaactgttgcaataa

SEQ ID NO: 1854 - DNA, 171 bp, Saccharomyces pastorianus
atggctcacgaaaacgtctggttctctcacccaagaagatacggtaaaggctcccgtcaatgtcgtgtctgttcttcccacattggtttaatcagaaagtacgacttgaacatctgtcgtcaatgcttcagagaaagagctaacgacattggtttcaacaaatacagataa

SEQ ID NO: 1855 - DNA, 681 bp, Saccharomyces pastorianus
atgcgtaccaacactctattgtcttccgtcatatctttggctttgttgtccaacgaagttttagcaactcctccagcctgtttgttggcttgtgttgctcaagttagcaaatcctcctccacatgtgacactttgaaccaagtttcttgtttctgtgaacacgaaaactccgccatcaagaagtgtttggactccatttgtccaaacaacgatgccgatgctgcttacaccgctttcaagagctcttgttccgaacaaaatgcttctttggatgactctagcagcagtgcttcctcttctgcttcctcatccagcaaagcttcatcctctagcaaggcctcctcctctagcaaggcctcctcctccgcctcctcctccgcctcctcttctatcaaggcctcttcttcatcatcttccgtcaaggcttcttcctctgaacaagcctcttctaccgaacaagtttcttcctccaaggcttcctctaccgaacaactttcctctagcaccggaaaggcttctaccactgctttctcatcttattccattgtgtctaaggtcccagttacttctggtaactcaacttctaccgccatcatctccactttctccgaaggttctggtaacgtcttagaagctggtaagtctgctttcattgctgctgttgccgctttgttgatttga

SEQ ID NO: 1856 - DNA, 840 bp, Saccharomyces pastorianus
atgcaggtcactttcaaaaggctttaccatcccactcttgctcggatgtccttcttgagtaaattcctcaagccaatgatgaaaacagcttcaccaaaggactaccaggtaaagcaattgattaaacccgtaggtttgacagatgcgccaaagcgtaatgtgaaatattcgcagggaaactcgctgaaggatatgttcgattcgcaaaagactaaccacagagtggaagaattgagcgctgaattcagcaagtccgggctttacgaagtacaagtcttccagaagactaaggggaaaatgttcttggcccctatttcatactggaaggacactaaggctttatattttcctcatctagttggtacttccgtggatggtacgaaagaccaaaatgttgaggatcttctgaggggtaaaaccagtatcgtgagattattcagcacagctgctggtgataagttgagtggttcttatttccaagaagcaaccagcgataacaaaaccactgactatttgatggatgctgatgctcgtttgggtctaaacaatcacaatgtgcaaatcatcgaagtgaacctcatagagaatgctgtgaaaagcgcccttgtaaaaacacttgctcgttggactaatcgtattccaaactggcgtcagccgttttatttcgagtgctccagagctcaatggccatttcacatcagagaagaactcttctgcaataatgtcttttctggctacgtctttttggtggaccaacacctgaaagttagatgggcagcctgtggggaggccactccatccgaaaaggaagcgttgtggaagtttgctaaaatcctctaa

SEQ ID NO: 1857 - DNA, 237 bp, Saccharomyces pastorianus
atgttgtgccaacaaatgatcagaaccacagccaagagaactagcaatattatgactagacccattatcatgaaaagatcagtacatttcaaggacggtgtctatgagaacattccattcaaagtcaaaggtagaaagacaccttacgctctttctcattttggatttttcgctgttggatttgctatcccatttattgcctgttatgttcagttgaaaaagtctggttctttttaa

SEQ ID NO: 1858 - DNA, 2079 bp, Saccharomyces pastorianus
atgaacaaattttggaatactaaaaggtttttgccggccaatgcagatggtttgagcggtatcttgaatgaaatatctcaaaatgatcaaatacttgtggttcaacctagctttctgcctatactcaatagtttgcttactttccaagaattgactcaatcgacgcctgtaaaaaagattgttcttctcgatgaccaactaagtgacgattcatctggtgcgctaggcaccattccacgaatggatctaatctttcttattgacgtcagaacatctctacaacttcccccaggattactcgataccgcagtaaagcataacctatcaccattgcatatagtatattgtgagtggaaaacctcttttccgaaatatactaagaatttggagcaatggcagatggacgaacgtacctcagaaattacaaagccacatttccctaatgtcattgaattacaattgaaggaaatatcgaacgagtattttctttatccttgggaacttttgccgtttccacagatcgatgacaatgttttattgagtcattctctttataacatggaaaatgtaaatatgtatactcccaagttacgttctttgcaaaacgccacagagtcgatattagttgataatatggtgaattgcttgcgaagtttggtctttgaaaccgatagtatcataactaatgtggtgtctataggtaatctgtcaaagaaatttagtcaccttctgaagaaacgaattgacaaacaacaaactgaaaatgacttgttcataaaaggtacactttatggtgaacgaactaattgcggattagagatggacatgattgtcctggaaagaaatattgatcctataaccccattgctgacccaacttacgtatgcaggattattagatgatctatatgagttcaattcgggattgaaggttaaagaaaaggacataaatttaagttacaaagaagacgcaatatggaatgatctgaagtttttgaattttggatccgttgggccccagctaaacagactagcaaaggaattgcaaacccaatacgatacaaggcacaaggccgagagtgtacatgaaattaaggagtttgttgattctttaggttcattgcaacaaaggcaaacatttttgaaaattcatacgaccttatcatctgacgttttgaaagtagtggagactgaggaatatggttccttcaataagatcttggagttagaattagaaattctgatgggaaacacgctcaataaagatattgaagacattgtaatggaattacagtacgagtatgaagtcgatcaaaagaagattctgagattaatttgtttattatctctttgtaagaattcacttcgagaaaaggattatgaagatttgaagacctctatgattgactcttgggggattgaaaaatgttttcagctggaatccttggctgagttaggattcttcaccagcaaaactggaaaagcagatttgcataccgctccaagcaagcttacaaggttacaaaaagaataccggtatatttcacaatggctcaatacggtgcctttggaagacgaacatgctacaggtaaaactaccactgaaaaagaagagttcatagaagctacctttgcttatagtggtgtaataccattaaccatgaggctggttcaaatgttatatgatagatccgtattattccataattattcttctcaacaacctttcattctatcaagagagcccaaaatttctcagacggaagatctgattgaacaactatatggagattcacaaacaattgaagagagtaagtggatccctgaaaccgtttctaaaaagatcaatgcaagcatcaagaataacaagagacagtattcaatagacagctttaagggaacctctcgtgccgctgaagatattgcgcttgtagtgttcctaggcggtgtaacaatgggtgaaatagccacactaaaacatctgcaaaaacggctaggtaaaaaaggcattaacaagaggtttatcatcattgctgatggcctgacgaacggcgatagaatcatgaactccatatcttaa

SEQ ID NO: 1859 - DNA, 2343 bp, Saccharomyces pastorianus
atggctcccaaatctggttcgtctagttcaaaaaaaaagtcattcgccggctctagtactgctgacccaaaaatagtaaaatttaaacttccgactgaattcattactagaccgcacccctcaagagaacatggaaaggaaacgtgcactgcgtatgttcacccgaacgtactatccgcactagagataacaccaggatctttttgcaccgtctgtaaagttggtgaaaatggaatcttggtaacagctaaagcaggtgatgaaggaacacatcctgtcaatgtcatcactctttccaattccatacgatcagttggaaatataattctcggtgaccgtctagagataaaaaaggctcaagtgcaaccaccttatgccacgaaagttgcgatagggtctctacaagggtgtgatattttgaaatgcatcgaggagaaagtaattcaaaaattattcgatgattgcggaattataatgcctggaatgatctttcacaacgtaaagacacaaacagatgatgaaagtattgatattattattgtagatgcaagtgacgattcactccccgacgtccaccaaatagatcttaactcagacgtagtatatggtatgctggaggaccaaatttatctttccccacctgttatatttcgaaaaggttcgacggatatcacttttacaaaagaaatgcaagcaaatcggaaatataatcttcctgagccaatatcttacacagcagtaggtggtctacacaaggaaattgaatcactgaaaagtgctatagacatacctcttcatcaaccaacattgtttagtagttttggtgtttctccacctcgaggcatactactccatggccctccaggtactggtaaaacgatgttgctaagggtagttgctaatacttctaatgcacacgtcttgactattaatggcccttcgattgtctccaaatatcttggagagaccgaagccgcattaagagacatctttaatgaagctagaaaatatcaaccttcgattattttcattgacgaaatcgattccatagctccaaatagagcaaacgatgactctggtgaagttgaaagtagagttgtggctacactgttaacgctcatggatggaatgggcgctgcgggcagattggtagtaattgctgccacaaatagacctaactccgttgacccagctttgagaaggcctggtaggtttgatcaagaagttgaaattggtataccagatgtcgaagctagatttgacattttgactaagcagttttcaaggatgtctccagatcgtcattccttggagtcagaagggataaagctcattgcctctaaaacgcatggttatgttggtgctgatttaaccgctctgtgtagggagtccgttatgaaaacgattcaacggggcttaggaacggatgccaatgttgataagttttctttaaaggttacactaaaggatgtagaatgtgcaatgatagacattagacctagtgcgatgagagaaatatttttggaaatgccgaaagtctactggtctgacattggtggccaagaagagctgaaaacaaaaatgaaagaaatgatacaattgcctttagaagcatctgaaacttttaacaggttaggaattactgcgccaaagggtgtcttactttatgggccaccgggatgttccaagactttgactgcaaaggctctagctacagaatccggtatcaacttcttagctgtgaaaggtcctgaagtcttcaacaagtatgtaggtgaatctgaaagagctataagagagatatttcgcaaagcacgctctgcagcacctagtattattttttttgatgaaattgatgccttgtctcctgatagagacggagggtctacatctgcggctagtcaagtcttgacgtctttacttaatgaaattgacggtgttgaagagttaaagggtgttgtcattgttgcggcaacaaataggcctgatgagatagattctgctcttttaagacctggcagactagatagacacatttatgttggcccaccggacgtaaatgctcgtttagagatcctgaagaagtgcacgaagaaatttaatatcgaagaatccggaattgatctgcaagagctggcatgtcgcacagagggatattcgggggccgaagtcgtattgctctgccaagaatctggactgtctgctatcatggaagatttggatgtcacaaaggtggaattacgccattttgaaaaagcatttaaaggaatttcaagaggaatcactccagaaatgctttcatattatgaaggatttgctctcagaagtggttcatcctcttaa

SEQ ID NO: 1860 - DNA, 2100 bp, Saccharomyces pastorianus
atgaccgatatcacacccgtggaaaacgatgtggacgtcaacggtaatgtcaatggcgacgtttccagtactttaaagaggcctatagatcaaatttcaaataaagatgagggcgagaacggtgggcctcttaacggtctagcagaggacaagacccctatcaatgatggaacacataccaaaaagcccaagctgaacggagatatctcttcatctgcttctacgcaggccgcggaaaacggctttgtagaaagtcccgcgtcggcggctaatgagaatgatacatataacgccaccgaagtcagagcagaagaagagtctcaacaggtattgaagagggagaacgaagaaggacacgggggcaagcagaaaagtgctactgctaatgacggttcgaagttgggcctttccgaggaagctccaaaggagcctgctcctgcccctcctccagagccggatatgaacaatctgccccaaaacccaattccaaaacatcaacagaagcacgcgttgttagctatcaaggctgtcaagcggttaaaggacgctaggccttttctgcagccagttgatccagtaaaattggatattcccttttactttaattacattaagaggcccatggacttatcgactatagagaggaagttgaatctcggtgcctatgaagttccggaagaaatcactgaagacttcaacgttatggtaagtaacagtgtaaggttcaatggccctaacgcaggtatttctcaaatggcaagaaacatacaggcctcttttgaaaaacacatgctgaatatgccagctaaagatgctccacctgtgataaccaaagggcgcgggtctagtgctcaggaagacgccccaatagttatcagacgggcccaaactcacaacggaagaccaaagagaactatacatcctccaaaatccaaagacatatatccttatgaatcgaagaagcccaagtccaagaaactacagcaagctatgaagttttgccagactattctcaaggaattaacagcaaagaaacatgcttcgtataattacccctttctggaaccggtggatccagtttctttgaatttgcccacatatttcgactatgtcaaagagcccatggacttgagcacaatttccaagaaattgaatgattgggagtaccaaactatggaagattttgaaagagacgtgaggttagtgtttaagaactgttacacattcaacccagacgggacaattgtaaacatgatggggcatcgtctagaggaagttttcaactccaagtgggtcgaccgacctaacttggatgactacgattctgatgaagattcaagaaatcaatgcgactacgatgactacgagtctgaatattctgaatctgatatcgacgaaaccataataacaaaccccgctattcaatacttagaggaacagttggccagaatgaaagtagaattgcaacagttgaaaaaacacgaattagagaaaataagaaaagaaaggcggctggcacgcggatctaaaaaacgcggtaaaagatcaaagggaaggacaggttcaaagagcggttcctccaaaggtagaagagataagaaaaataagttaaagacggtagtaacctatgatatgaagcgtatcattactgaaaggatcaatgacctaccgacttctaaactggaaagagcaattgacataatcaaaaagtctatgcccaatatctctgaagatgacgaagtagaactagatcttgatactctggataatcatacaattttaacgctatacaactccttctttagacagtatgaaagttcgtccaacacgtccaacgggctagacggtgcctctggtataacccgagatacttcatctttatcgcctactagcgcaggtggtagaaaaagacgatctaaagcattgagccaagaagagcaaagtagacagatagagaaaataaaaaataagttggctattctcgacagtgcttctcctttgagtcaaaacggctcccctggccaagttcaaagcacaacacggaatgggttttcttcatcgtcggatgacgatgtcagtagtgaaagtgaagaagaatga

SEQ ID NO: 1861 - DNA, 858 bp, Saccharomyces pastorianus
atgaaaatcaatatatcccgcccattacaagttttacaatggtcttcatatatcctggccgcttttttcatacaattgctgatcattcttcctttatcaattttaatatatcacgatttctacctgcgactattacctgctgattcatccaatgtagtaccgcttaatactttcaatatcttgcagggaatacagtttggtacgaaattcttccagtcaatttctagcattccagtgggcactgatctgcctcaaacaacggataatggattaccacaaccaatccctatgcgtgacaatatagagtacaagctcgatttgaatttacaattctactgccaaaataagattgggcgtttgaatctagatagtatgttaatcgacgtttataaaggccccggtccagttttgaggagtccaggaagagtagacaacgaagatgaaaagatatttcatacctctaggcctatagtctgtctcacagtagacgattcattgtcaccccaagaaattgaacagctgggcccatctcgcctaaatgcctacaacgaagaatggctaaattcaattacaatcgaagacaaaatatcattagattcatcgtatgaaacagtttccattttcctgaaaacagaaacggcccaaacaagcttaattctacagccagagagtggagccactttcagaatgaattttgagcaaggcttaagaaacttgatgcttcggaaaagacttctatcatatgtcatcggcatttctgttttccattgcatcatatgcatgctatttttcctaacaggatgcactgcgtttgtatttgttcgcaagggtcagacgaaatccaagaaacaaagctga

SEQ ID NO: 1862 - DNA, 3438 bp, Saccharomyces pastorianus
atgagcggggtcagaaaggaatcgtcagaaccaaatgagattcttcgacaagaggttagaactagtactagttcgccctgtacaccatctgagatgtcgcctctgttcctgaacaagaacaccaagaaagcaatgcaatccatcgctccgatactagagggctttagcccaaaaacatcggctagcgaaaacatgtctctgaaactgcctcctcccgggattccagatgaccatagcgaggaaaaccttaatgtccatgacacactacaaagaaccataagcactgaatcagaaaatgggaataacgccaatccaaccagtacgtctggactaaagaaagcggatagtaacccgaagccagagacggattctgacggtctacccagcaattccaataatgccaatgaatccggtagtatagactctacctctaagaccgcatccccacaaatcccacaagcacctgttgacgttgaacagactcctgctgcaagcagttcagcacctacttcatccacctcttcccgcaagtcctccacaagtcaaccaaaaccaaaattgcccaagattgggaagattggggtctgtgcaatggatgcaaaagtcctttctaaaccaatgagacatattttgaaccgtttgatagaacatggtgaatttgagactgttatttttggagacaaagtgattctagatgagagaatcgagaattggccaacatgtgactttttaatatctttcttttcatcaggattccccttagacaaagctataaagtatgttaaattacgcaagccttttttcatcaatgacctgataatgcaaaaaatattatgggatagaagactatgcttacaagtactagaagcttacaaagttcccactccaccaagactcgaaatcagcagggatggaggtccccgagccaacgaagagttaagaatgaagttgcgcgaacacggtgtggaagtgaaagctgttgaagaaccggactggaaaatggtagatgacgatactttggaagttgatgggaaggtcatgaccaaaccctatgttgaaaagcccgtagatggtgaggaccacaatatttatatatattatcactctaagaatggtggaggtggtcgccgtttgtttcgtaaagttggcaataagtcttctgaatttgatcctgccttagttcatccacgtacagagggttcctatatctatgaagaatttatggatacggataattttgaagatgttaaggcctatactattggtgaaaacttctgccatgctgagactagaaaatcgcctgtagttgatggtatagtcagaagaaacactcacggcaaagaagttaggtatatcacagagttatcagacgaagaaaaatccattgctggaagagtatccaaagcgttttctcagatgatctgtggttttgatttgctgcgtgtttcaggtaaaagttacgtcattgatgtcaatgggttttcatttgtaaaagacaacaaagtctattatgattcgtgtgcaaatatattaagaaacactttcatcgaggccaagaaaaagatggatacggaaaaaaagaacttgccaatcattcgtgaagaaaaagagcaaaaatgggtgttcaaaggtttggttataattatccgtcatgctgacagaacaccaaagcaaaaattcaaacactcatttacttcgcctatttttatatcgttattgaaagggcacaaggaagaagttgttatcagaaacgtaaatgatctaaaaattgttctccaagccttaagaattgcattagatgaaaaggcaggaaatccagccaagattaaagtattggcaaatgctctagaaaagaaactagacttcccagggaccaagattcagttaaaacctgttttaaataaggagaatgaagtcgaaaaggtgcagtttattttgaagtggggtggtgagcccacacattctgctaaatatcaagccactgagcttggggagcaaatgaggcaggactttgatttattgaataagagcattttacagaatatcaagatattctcctcatccgagagacgtgttcttcatactgcacagtactggaccagagctctttttggtgcagatgaactaggtagtgacgaaatcagtatcagaaaggacctattggacgatagtaatgccgccaaggatctaatggatacggtgaaaaagaaattaaagcctttgttgagagaggggaaagaagctcctcctcaatttgcctggcccccaaagatgccagaaccgtacttagtcataaagcgagttgttgagttaatgaattaccataaaaaaatcatggataacaattttgctaaaaaggatgtcagcacaatgcaaacaagatggtgtacttctgaagaccccagtctattcaaggaaagatgggataaacttttcaaggagtttaacaacgtagaaaaagtagacccttctaaaatttctgaattgtatgatactatgaaatatgatgcccttcataacagacaatttttggaaaacatctttgatccggggcatccaaacgaatctatcgctgatgagttaggcactcattctttggttgatcgttatccaattaatattctcgccaaaaacaattttaagattgtagatagccatagtatgagtaagagcagtaatagcgtcggttctttgggttgggtcttagaaagtggaaaaacgtctagatccagaaaaaccaaatcctcatctcaatttgatgagccaagatttatgcagttgcgagaactgtataagttggctaaggtattatttgattttatttgccccaaagaatatggtattttggatgctgaaaaattggatattggtttattaacatcattacctttggctaaacaaatactaaatgatataggagatatgaagaatagagaaacaccagcttgtgttgcttatttcactaaagaatctcatatttacaccttgttgaatatcatatatgaatccggtattcctatgagaattgccagaaacgcgttaccggagcttgactatttatcccagatcacttttgagctttatgaaagtacagacgcttctggccaaaaatcgcactcaatcagactgaaaatgtctccaggatgtcatacccaagatcctttggatgtccagctggatgacagacattatattagctgtattccgaagatctccttaacaaaacacttagatatggactacgtgcaacagaagttgagaaacaagtttaccagagtcattatgccttcgaagtttacacccgtaaatattacgagcccaaatttgagtttccagaaacgcaagactagaagaaagtcgacatctgttgacaagtctaaacctcctgcttcttctgggtcctcatcatccacttctatcaacaaaacgccagaataa

SEQ ID NO: 1863 - DNA, 726 bp, Saccharomyces pastorianus
atgaacatgggtggtagtagtagcgctgctactaaaaaagcaacatgtaaaatatcgatgttgtggaattggtacacgattgatacctgctttattgctagatcctggagaaatgatacgaaggggaaatttgcgggttcttgtatcggttgttttgccctggtggtcgtcgcacaatggcttactcgtttttcaagacaatttgatgttgaactcttaagaagacagaaaataaagcatttggcaaactactcaccagaagagtacgttgtaaaatgtggcgatgaagatgccaagtctgatatggaggagctgcaagggttccataacgaagctagctggaaaacaaccttgatcgctctacaaaagagttttatctacagtttttacgtttggggcccaagaggattaaataatcctgaagatgatttattaaagaaagtcctatcatgttgttctttagtaactcccgtagaattgtaccccagctttttggatcatatggtaagagtaaccattttcgtcctacaatggggattgtcatatatcatcatgctgctgttcatgtattataacggctatattatcatcagttgtttgattggtgctatagttggtcgttttatattctgctacgaacctcttggttctatgggtggaggagaatcggctcaaagcactgttagttacgacaaagaaagcgatgaccgtaaatgctgcttgtaa

SEQ ID NO: 1864 - DNA, 825 bp, Saccharomyces pastorianus
atggatttagagaataagagcgctaggtttaaaaaaactggcaaaaaaatagcgtctgacaagtcgttcgaagaagtagttcaatccgatagagatgttctgaaaaaatcgaagtttctctcagatttatttcagagtttgcaaccatacatcaatgacatcaaaaaggtgcggtgtgtagcaatcggtaactttaaagaagactttcctgccacttaccaattcgctcttcttctagagattattgaccacattcatagtgagaattcaagagacattgttgtttccttatatgacccggtattcaccaaagaggaaacaatatacttgaaaactttgggagaaaggtgggtgatagaggaaaacttctcagaaagcaatacaagcaattatgggtccgtgttatatttccttccccatgctcctttagatttgactgaaaatatactatcgtcggagtgcccacacttatggctagcaaacaatatagtgtcacacactgacaggtatactaaggcccaactgtatgaaaaatatcctcgcttgggcaagctcgtacattacttgcaacctagcatcacaccggagaccaagaaacaagatagcatggatgattttacaacctttgttccaaaaaggaaaaggaaaaacagaaacaactcttccaagctcaaggtcaaactaccagaactagactatgagtctattgccacggagtttacatcttgccgaatactcacagattttgacgggggaaaatatttgaaagaacaaccttggatcaactccttctctgatttgacattatatgtcgttgaatactaa

SEQ ID NO: 1865 - DNA, 792 bp, Saccharomyces pastorianus
atgaggaattttttcacgttattttttgcagcattattttcgcttgcagcactcatattggccattgtggcttgcgcaggttcgacgaaaaactatagccctataaacaaaatatattgtgccgagttagatctgtcgcaaatacacgtatcgacggttttcccctcactagggtcagctacgctgtcgacgttgggcttgccctcgtatataaatattggtctgtggtcatactgtttggaggactcttcccacagcatccaatcctgctcttcccccagcggtatccaaaagttcaatctaacgggattgttgtatgacaacatcgttgacaacgaggctttgaagcttatagactccatagctgacgtagttctcccctcaaaactacaggacaagatgaaatactacaacgatttggtcaaatgcatgttcatcaccatcatcataggcattgtcctgagctttgtcaatttggtgttcagtatcctgcgttggatcatccatattaggccgctggtgtggggtggtgcttttttttcgttcttggcgttcgctgcgctaattatcagcataggttcgtgtctgggtacttattcgtatatcaagtacatcctgaaacacaactacagtgactacggtatttcgttgagcattggtaggacttaccaaggtttaatgtggggggcggttgttggagctctactgaatttcatcctatggtgtagtgtgagatctagaccaaacatgatctatgcgaatgcaccaattgaagagaaaccattgatttga

SEQ ID NO: 1866 - DNA, 4314 bp, Saccharomyces pastorianus
atggctaagaaaaataagagtagctcgaaaaattcgactcccgtgaatgatataccagtcgctactgggaagaagaagacaaaaggaaaaaaggcgcaagaaccagaaccagaagatgataaaaaaaccaagcagcaagttaatagggcaaaagtgacatcaacggcaagctggacaggtaaattgcctcacacgatattacacgagacatgtcaaaagcgaaaatggaatagggtagagtacgatatgaagaaaattggtgacaagggctttattgctattgccgttttgtcgtttaccgacccaaagacgaaagaaactttggttgcaagaatgaacgacccaacctatgataaggctgctggaaaaggccttgtcattccccaagaaactccagttgaagcgagacatatggcctccactatagcattatatcgcatcgcatataatacaaacctgcatatgatgctcccaccaaatcataagaaaacatggtatgaccttgacgatttccgtaagggaaatttgaagggcgacgaaaagcgtataaacaaactgtttgatctggatcccttcaggacaatggtggaagatagaaagcttaaacaacagcgtgagaaggaatatatggcacagaataatcaagcacagaaagagcacgtaacgcggactatcttgtctagccatagcgaggctccttcctccaagaaaaatttgaaagacagcaaatcaaagtcgcatagagattcacacaagccttcattagtaaggtttccaaaaaaagtttgggaaggcgcaatatttgttgatctcgatgagtcttctagacagctgatagaaacatcattgaaagtcaaaatagattggctaagtaaaaaaattacccataccaatgaagtgcccactgaagatagagaacagctcaaggaaaagctggtttctttacagtttaggccaaagcacatagaagaagctatgtcatacaaagatcccttatctttcttattattcaatttacctgaggatgacttgccgggattttttcataagaagaaaggggatacaaagaataaagtcgagatctcaactttacccctgtctactcgaatgattgttgagcgcttgacagaaattggcgtatcatcagatgaagcattgctagctttacaagaaaatgacatggacgaaaatgaggcagccggtttcttgacaatggaatacttgccatctctgaaaattaattcaaacgtgcctgtaggggaagctgaatctattgaatgttggaatcaagaactggagactctagaaagtatttacgaaggttgcgtgaaggacattaaagagaattctcattacacgttaaatttaattgaaaaatccaaaatcaaactgaaaatctacaggactaaaaattatccggcttctttgccgggaattatagtgtcaaccttcgatataaattacaaattacctgactatatcaagaagcaaacactgactaaactattgcattatctccaagaggctaatttattaggcgatatgttaatatatcatatatttgaatggctgaaagacaatattgctgcaattattgataatcctggtccgttaatttcagaatctgacttaaagggtgcaattagcaacagaagcatacctaaagataaggcaaacacaaataatactatgggctcaaagagatttgcaaagaataacatatctgacgttatgttaagtgctctaaaggaagaatataccaaaagaattagaagccctgaatacgaaaatatgcagttagttagagaacaattgcctgcttggaagaaacaaaaagtgattgtcgacctcatcaataataacgaagttgtactgatcactggtgaaacaggttcaggtaaatccactcaggtcgttcagtttgttctggattttttgcaaagtcagaaagaagattttagtaaaacaaaaattgtatgtacgcagcctagaaggatatccgccattgggcttgctgaacgtgtttccgatgaacgttgcgtgacttgtggtgacgagatcggttatgtgataagaggtgtcaacaaaactaaggcatctacaagaatcaagttcatgactacaggtgttcttgttagacttttacagaatgctagaactatgttagagaataccattgttgttattgatgaagttcatgaacgttccattgatacagatttgatagtgacactaatgaaaaaccttttgactaaagttcgtggtatgaggattgtcctaatgagtgccactgttaatgttgacttgttcaagaaattttttcccggattagcaacatgtcacatagaaggacgtacttttcctatcacagattatttcttagaagatattttggatgctttagatttcaaaattaaaagggaaaaagctttatcttatgatgatggcgatgatgatgaaagaaatgataatgaccagtacctaaggccaagggccgactctaagttttttacatcagggcaaataaactacgatctacttctacaagttgttaaacacgtggataaacgtttaaaggatactgacaacaatggatctgttattgttttcttacctggtgtaggtgagattaacaagtgctgtaagttgctatctgataaaaccaatgaagcaaattttgtaatattgcccttgcattccgctttaacccctgaggatcaaaagagagtgttcaggaagtatcacggaaagagaaaggttgttgtctctacgaacattgccgaaacttctattactatagatgactgtgttgccactattgacacaggtcgtgccaagtcaatgttctataacccaaaggataatactacaaaactagttgagtcatttatttcaaaagctgaagttaaacaacgtagaggtcgtgctggtagagttcgtgctggtttgtcgtacaaactattttctaagagtttgtatgaaaatgacatgattccaatgccaattccagagatcaagagaattccattagagtccctttacttatccgttaaagccatgggtataaaaaacgtcaaagtgtttttgagcacagcacttgatgcaccacctttgctagccttgcagaaggctgaaagaatgttaactactgtggggttagttgacgagttcgataactcgcttacacagttaggtcaattcatcagcttgatgcccgttatggatagtaagcatggtaagttactgatttatgggattctatttggatgcacagatatttgtgttttacttgtttcgatacttggcattggtgctttgccttttatcggaggttttgaaaacagagacaaaataaagaacctgctatccaaatatgaaaatcgtggggacttatttacggtgttggaaattgtcagaaattatttgaagattaaagacccaaccattaaaagaaagtacttgaaggatcatttactttcatataacaaaatgaatgagatcaaatcatcgatagctcagtattattctattttaaaagatgtaggatttctaccaatgaattacagagcaaatttatcccccgatctgaatagaaatgagaaaaactctgatatcctcagagctattctcactggtgcgttttatccacacgtggccagggtacaattgccagatgtgaaatatttgtcaacaagctctggtgctatcgaaaaagatccagaagccaaaatgattaaatactggattagaagtgaagaatatcaggataagttagaagagtttaaaacaaatgactcgcaagaaactcaaaagaaggtcgatttggaaaatttacccctgcctgcaactagagcattcattcatccaagttctgttttattttcaaccaactcagtgaatttggaagacgctaaactgctttctgaagtagaaggtccaatttccaagcagtcaaagatacccacagttgcaagatatccattcgtcttgtttaccacatcccaagtcactaataaactgtatttaagagatttgaccccaaccactacgttatcattattgttatttggaggagcgatctcttatgatgtgggcggaagtattcattcaccagggattgttgttgacaattggctcccaatcagaacctggtgcaaaaacgcagtgttgattaaggaattaagaacacaacttgatgaagctataagaaagaaactagagagccccgattatgctaaaaaatcacaatctgagaattctgatgctgatgaaacgctaaaaattgtcgagaaaatattaacttccgagcaatga

SEQ ID NO: 1867 - DNA, 1257 bp, Saccharomyces pastorianus
atgagtgaagcagatgttaaaaaatttgttaataatgctagaaaaaccctgaccgatgctcaacttttatgttcaaatgctaatcaaaggattgttaatatcaagaaaaagatatcatcctggcagttgagtatttctaagctcaatttcttgattgttggcctgagagagcaaggcaagtttctttatgtgactatactcaaggaaggtattgggaagaaattgattcagaaagaatggaatcaagttgtcctcgtggccctggttgatgagatgaagtactggcagaacaaaatcaatactaaagtagcaagattggatggtatagtcaatgagctaaatagaacgcaaaaggatgatacaaatcatcctaagttaggggattatatctcaagggagaacatcaacttattgaatgaaaaactaaaagaggtaccggtaattgaacgtcaaatagaaaatatcaagtttcaatacgagaacatggtcagaaaagttcacaaagaattgattgaagctaaattagctgacacaacacggaaattccaaagcgaattcggaataggtaagtccttggaaacagatgtggcagagcaatttagtaaggaattaacagatcttgaaagagacttggtagaaattttgaactctctgacacaacattttgacaaaactctgttattacaagaggagaacgcaggaaacaaagaacatgccgacttgtttaaagtggtggaagatgatgatcaagagttatttaacataactaaggcgttacatgaaataattgatgatgttgataagacaatatacaatctgaatcaatttctggaagaaaaaataaaacaaaaaacagaaatacatactgaggtctctgaaataataagcgattttaacagaaatttagagtatctggtaatctttaaagacatatcaaaccttattgataccttcaagaattcctgtacagaagatattcaaataacaacagaactttgtgaattttacgacagttttgaaaaaagctatggtaatttgatttctgaagcaaagagaaggaaagaagtggcaaataaaatgagaactatattggaagattgcgagatacagttacaggacttaaatgctcaagaccagaaagaacgacaaaattttattgcggataatgggaattaccttccagagacaatatggcccggtaaaattgacgatttctcttccttatacacttttgaatacaacgtcaaggatccttaa

SEQ ID NO: 1868 - DNA, 2139 bp, Saccharomyces pastorianus
atggcagattcggagtccgatagtggtgaggatttcttatttaaaagaagaaggattgatccctataatttcagcgatgaagaggaggaaaatgatgaatcaagcgcaagtaataccatggaatatgaaaacggtaccttcaatatgagtaataaaagcaatccagtggactcaaaactatcaaagagatatggtatcggtgccaagttactgtcgaaaatgggatatgtttccggaaaagggcttggtaaggatggttctggtatagcgacgccgatcgagactcaaagccgaccaatgcataatgctggcctaggaatgttttcagaaactgttgccagcaactatcgcagcgaagatgaggagcaattaagttccggagatgagatggcagaaggcgtaaagcaagtaaaattcaataagacttcgaccgagattttaggtgagccaccgtttcatgattctgtcgatataactatagtacgaacactaagagagctgaaaatagctggggtacaattacccgagaagataacaaaggaattgaaccctataagtgaaataccgaaatcgaaaaaggatgtatttttgaagacattacaagaactactgaatatagaaaaaagtttggaaactatttatgatcgtacctctcctttggaactacaaattaaagaattagatgagcaaatggcgctcctctctgatttagaaatcactttgaaggatgagagtagacacaatacactctttgacaaatttagtgcaatattaaaaatgtccgacgacgatcttatagacagattagcttctaatctattgagcaaagaactgctcatagagttggactgggatcctctagaaaacctaaacagtaaactcgacgaactaactttgattatagaattgctaacatatagaatggatacggcgtcgaagtttttaaacagaacacaaactgctatatttaaaataatatatcccaaacttgagaaattttggaaagaatttgatttaacaaaatcaaaaatcgataatacaattacattgttactggattttgagcaggtattgacttttattgaatgtaagaaacacattatggagcagtacatttatccgaaactgttattttcgctggacaattgggaacttcaagatgaagaagggcttgtttcaccaagaatctgggttttagactttatcgttctgattgatgataggacgagggaagtaattgtaacaaagatcgaagccaagtttttttcttactgccaaaattggtaccatagggaatcattttgtatatccagttctgatataatatttattagggagcttctgggcgaatcgaaatattatcaaattctaaacaaggaatttcttcccaaatttctagatgaattatgggaaagacataacgatcctatatttgaattagaagattggaaagtagaagatgatgttaatcgtgaagaaaaagaatcaggcttcttttatttcgtaaggaaattgagaaactatgcatattattttcatcctaagcaatatgaactgctgatacgaggaactttcaatagtataaacaaacttctttatcaatggcatatctattgttcggtagaagacttacacaggtccaaatggtggcttaattggctaatcaacgtgatgtttaaagaccgtttaccgacagaagtagagctgttagagattagaaagagttatgaaatattagtcatgtctgacagctttcatgttaatagatctaccctaaatgaagattttgatctaagaaaaagtttgcgaaacgtgacggaaatgcaagcaattggcaatgatagtaaaattgaacacgaacctacttatactatacagaacattccgcttacaaaagtctctagttcattcaaggacgtagtggaagactattgcctggaaaaaggttatctgattagtaaactaccaaacaggtatactcaattgccatatggccgggatcaagatagtgtggtccctttgtttgaaattcgaagcggaaagagaacagtagctgtggcaataaaggatgacgttctttggttagaagattccaacggaacgtttacgccaacttatttatgggagctaagtatataa

SEQ ID NO: 1869 - DNA, 3912 bp, Saccharomyces pastorianus
atgtatcgatataataaagggtctcctcttgagagaacaccgcagaaacgagttagccgccacgagaatcggcgtaacagtattgaattaccaaaactgccacctttgaacacaagaaactcctttttagatgattctgataacggaacagataacgtctcaattggctggacaccaatcagtgacaatcagcaatatccaagcccgatccctcaagcttttacttttgcgtctaaacatcatataagagggaacgttacaagttcgacagaatctacacccaaatcagctaaacatatgaaagaaaggcgaccaccaccgcttttacataccaatgaaacattactcttaggctcacccatggcctctcctggatcttggtccagagaaagaccacccagtaggttaccttttgtaggggatccagaagtacgagattacatagacgacacgtctaaccattccacaaccttaaaatcaccatttgtcaatgactttagttcactttctatgaaatctccaacagatagtatcaaatgccagaatcggttttctgacgaatttaatcctcggcatcatgaaagagagaaagctttgccccccattccttcctctaccacccttttgctatccccctttaacgacgaagattcagaatttttcaccaagccaccaccacctttatcaacctccagaaacattagcggacatagcagagtatcagagagtttagaaagtgtttactcggattcagattatacttttaataattcgaatgcaaggcaaagtagtttcaactccttactgggcgccaaaccgttggagctagcacccagcattactgccccaacacagccattttctatccaatcaatagacgaacacaaactttaccaatgtgacaatgttcacaaactatccggtatctacgagtggattctaaaagtctattttgaatggtttaacgaatgtgtgttcacgaaaatcgacctcttccaaatagtccagttactgttagagttccagatgcccaagaattttgatcaagatacaatagactctaatgtcgataatatcatggcttctcttattgcacaagaagcggtaagatttgatataatcaatgatgaagagatagccgtggtagtagctggcctggatgtcactggtgtcttcacagagttactaccgtgctattcgttcattgataacacctatgggcctaccaattcttcaatctgttattctaacgtctgtacatatggacaaatctcggattttagaaaggaaataaaaatttctgaaattataaataaatccgtcggactttggacggaatactggcatttgacacctgaagatttggcggaaatcaatccacgtgaagttcagcgacagagtttcatctttgacctgatcattttagaagagagatctttgaatatggctaccgcagccgtggaaatctatgggaaacggttcgacacgactttacttccagatgagcctgagttcaaatctttggcatttgatatctttgagcctctgatacagttacatactgaatttctgttgacaccaattttctggaagctgaaaacaagaggtaagtttattgatggtatcgggaaaatctattcaaaatggtgcgctgaagccaaggatatatatttggattatgcgaaggctatggcaaccgttcacgaaattataacatgggagaaaaaaaacaagacaagatttgttgcatggcttaaaaatatcgacaattctgttgaaattacaagatctaagatgtatcacgacgtgatttttttcggtgggtttttcaaatctttacagaatatgcccgtgactttacgttcaatactgaaaaatacagacccttctatggaggattatgaatatctcaaaatagtcattaaagatgtagaaaatttgaactttgaagtaaatcaagttcacggattggcgattggccacagaaaattagtgagattctcaaaacagttagtattgagcactaatagtagtaatgcagcaagttatgtaaacgttggaggtggttctaatactggtgaaggtgatgctattcaggacaagttagcccttggactaacttatcctgaaagaaaattgatactgtccggaacagtttacaaaaagagggaactatggctggatccaactcctgtgtatattgcattactggacaattgcttactaattacggaagaaataaataaaggcgaatctcaaagatataaacttatcgagagaccgatccccatagattacctaagtctcgagaaaagaagaattgcggaagacaatacactgcccacgaggagttactctcaaagagaacacaaatcacctatacattcgttttcgacacccattagttcaatgaggcctttactcagaagctctggaaatcatgtatcaacagcatacggagacaagaaaacgagtagcactgaaatttctaacgcgaacccaaatattaatgaattcacattcaaaatcagaaatactgctacaggcgaatcttttaaattctatacaactactgcagaggaacttagccaatgggtcggtgctatcatggagtcatttaagaaaaattctgaaaagcatgaggtgaatccgtttgagtttactgtgttaagttctgaatttggatattttgacaaggacgcgccagtaaatttacctgtagctccagaaggctctgaaatcgatgtagcattgaaaaggtatgcccaaaaaatagacgaggatccatgttcgtggagtaagactacaaggataatgtgttgtgaagatgtcaaatatgaaggtaaaatctacctactcgtagctactatcgacggtgtctttataaaatgtagagacgactataatcacggatttgtgaaaatattggagacgaatgatgtcaaaagaatggaagccagtattaaattggggcttttgttcgttttggatagcaaaagactgtgctactttagcatctcgaatctgctaagctcctatattaaagaagattctccggataaaagttgtattgtgggaatagtaatcaaagataaggtacgatttttcaaactcgctgatgatttcggtaattccaagcatctgttttttgagagaaaggggaaaatagttatattgacacccgagtttgatcaattaacaaacaaagtgaagtattttaaattctacaaggagtacaagcttcctagttcaagtaacaacattctaaacaatgaaatcgaagatattacgatattgaggaaaagttttgcagtttgtacgaagaaaacagtcatactttatcaagattcgttcgaagataacgggatagttttgccatcttttttgaacgacaaggagatgatggcacacttaaggcatccccacctgaataatctaccgttcaaaaacgtgatggactcgaagaaacgcacatctaaagaatcacttaccgaagaagccaaaaaggatattgctacttgtaaagctataccagtgaattttttccaaatctcgcaatccaaatttttcctgttggtatacgacgaagctgtagttaagataaactgctacggtgaaatgtcagattggagaaaggacattctactgttggatttttgttgcactggcgcaagttttcatgagaaccatttgattctcgttggcgacaatttaatacaaatatacgacctgaaaaatattcatcaaaacctgggcgaactagctcctatccaaataatcaaaggcaaaaagataaagctagctagttcagaaacaaaagaaaagacaatccttgtcttgagtcatccaaacatacttaacagacagctgttggttgcgtgtaaccccgtaaccatcctagatcacaaataa

SEQ ID NO: 1870 - DNA, 2013 bp, Saccharomyces pastorianus
atggtcgaactggatatgcagaagaaggcaggtggtggcagtgttagttctgaaatggacgctttgaacgctaccaataacaataataaaccaggagttccaaacactaagagaaatgttgcaagtagaaagaaatctgggaataaggtacccaatggaagagataacgcacataattatcatggacaaggtcgtaagcagaacaataagcagcacaaactaagagcgccttataaggagacttctactgatataaatgatcaagatatagatttatctatacaggaggaaattctcggtggtaacttcaaactaagaggcaggagaacgcaagtttcgattaaccatttattaaacttccaactgcctgaggtcgaaagagaaaggaacagttcttccactaataagaaaccgactagaagacgtgaagagcacgtgcacctacatggtgactcgttcgtcaacgtaaactatcgtcttttagtggatgatcgttttgactacccagaacaaagcaatgatcccaacattcctgtggatcaagaaaggattctcagagtcatagtaccaaagggtcagaactgttctatttgcctcagcgaagaaccggtagctccaaggatggttacctgtggtcacattttttgtctaagctgtcttttgaactttttttccatcgaagaaaccatcaaaaataaagaaactggatatacaaagaaaaagaaatataaagaatgccctctttgcggaagtattattggccctaagagagtaaaacctgttttgtatgaggatgaatttgatgtcgccaggctgcacaatagacctgaacccggtgccaccgtaaacctgcaattgatgtgcaagccgcacggttcgctattacctttaccagtagaactacacctggatccactaaaatgtggcgatttccctcctacaagtttaggatcgattaagcattacgcgcacatcatgaaatgtgatgtatcgttttctttggagctttatcaaagggatattgatgctatccaagagcaatacgagattgacaaggccatttataatgatagtggaaaattcgttaagcggtctgttgaaaacatcaatgaccagatctcgactttactagcagcaaccactgagtcaaacccagcttctaacgatatcaacgacggcttggcaaatttccatttcgatgatgatattttgagtaagtacgatgatacatctgcttatttcttttatcagactttggtggcatcatctacaaaatactatttgtctccattagatgtaaaaattctgctgactatttttcaccaatattccaaattcccagagaatatcgaaacaacaattgagaacatacattacgatacagtggttactgaacagttgattcgccgctacaagtacattggccatcttccaataggtactgagattgctcttgtagatttggactggcgtaaaatacagttcatccctagagaaatttatgaacagttcgctcatgaattaaaacaacgtcgaagaaagttcacgatgaaaaagcaaaaagaagacaaggaaaagaaactgtatgaaaaaaaactggagcaagaacatgctgagttttacaggaaggaaaatggaaacccgcttaagtttgaagattctgtacagatggctaccaattacgattccattatgaattcaccaatccccttaaattcattaggatattccgttctggggtcacaagaaaaggtttcctctgtcccttcaaagaaaaagccttcccatacggaaagaacaatttggggaacgtcaattgcagtgacagaagatgaaagggcttcaaaggaaaacaaggaatttcaagacatgttactgcagcggatgaggcaagaagacgttccggatgccacagattctaccgattctccacccactagtaatggcagaaaggccaagaagaaaaaggggaaggtcatgctattcagcagtaaccatcaagctctcggctag

SEQ ID NO: 1871 - DNA, 1929 bp, Saccharomyces pastorianus
atgagtgggaaatttgtacgtgcatctaagtatagacacgtttttggtcaggcagtcaaaaaggaattgcaatacgaaaaacttaaggttacgaataatgcttgggactctaacttgctgaaaaccaatggtaaatatattgcggtgaactggaacgcttccggaggcggtgcctttgctgttattccaattggagaagtgggcaaggccccagaccaagtgcctttattcagaggccacaccgcgcaagtcctggatacggattttgatccatttaatgatcgtagaattgcttccggttctgatgattctaagattggtatctgggatgtcccggaaaactacaagtttcgtgaccatgtagacgaaaatggggacccaattgatatcaagcctgtgaagtttttaactggtcatgcaagaaaagttggacatgttctttatcaccctgtcgccaagaatgtattggcatcttcttcaggtgactacactgtcaagctatgggatgtggaagctgggaaggacctgatcactttaaaacaccctgatatggtaacatccatgtcattttcgtacgatggtaatcacctagccacagtggcccgagataagaaattgagagtctggaatatcagagatgaaaaaattgtcagtgaagggcctgcacataccggtgcaaaaaaccaaagggtcgtctggttaggaaactctgacagattggctaccactggtttttctaaactgagtgatcgtcaaataggtatctgggatgccttcaatctcgaaaaaggagatctgggtgggttttataccgttgaccaatcatcaggtatcttaatgcctttttatgacgatggtaataagatactttacttggtaggtaaaggtgatggtaatattcgatattacgaattccaaaacgatgaactgtttgaattgtctgaattccagtcgacggaagcgcagagagggtttgctgtggttcctaagagaatggtaaatgtcaaagaaaacgaaatctttaggggttttaaaaccgtcgttgatcaacgcatcgaaccaatttcattcttcgttccaagaagagcagaagagttccaagaggatatctatccagacgcaccatcggataagccagctttaaccgccgatgagtggttttctggtaaatccgtggagggtccaatacttgttagcatgagatccatctatgatggttctgttccaagtttccacgaagctaaaaagcctgaagaggcatctacccaagcagaggatcccaaagttaaagaagcaaagtccgttaagaaagaggagaagccacttgaggaaatcaaaaaagaagagaagcaagaagctactaaatctcctacaccaccaagttctaccttctcatcttcccctacgattaaccatgtgttgaaagaggatacgtcgattaacaagctgctaaaaaagtcttctgatattgatgaagtcaatcgcgcagaagatccatccagagatacttccgggtgggaagaagctgatgatgagccagctcctgttaaaatcgaaactgttattaccccaactgaaactaaaaaggagaactcagttaaggtagaatctccaaaggtagcagaaccagcaccggtatcaattgccacagatagaaaccaagaagaaaagaccgcagagaatgaaaactctccggctccttcatcttcgactaccaccactattaccgctaccacggccagtaccaaggaatcttcttcagcagctaaggcttctaccaagtcgttaggcttaaagcaatctgttgaaaagttgtccacattggttctgcaattggaagatgtaattgataaactaatgaaagccaaccttgacaaggatgaacgtttgttgaaattggaacaaaggattagcgaattgtccaaatga

SEQ ID NO: 1872 - DNA, 6732 bp, Saccharomyces pastorianus
atgagttccataaatcctgataatgataacaaggatgttgcgtctaacaccaatgtacagctagctagtgtctatattaaggcacagtcttatattcctcagattgaacaggtttaccaaggtacaaatccaaatattcaagaggcaaaattattaggggaactgttgcaagttctagcagaagttcccaaaggtacccatttattttgcgatcccattctagagccaatatccattttctccttgactatcttctcatttaatgaagaagctaccgccacatggctgaaaaatcatttcgatccaattctctccgtctgtgacaaatgtatattgaattttgcaagaggtaagtgtaaaatgcttcaacattttgctattcagagacatgttccgcatgagcacgtcgctaaattcaatgatatagtttgccaatggagagtagaggcagtgtttcctattctaaggaatatttcggtcaacgataatacaggtatcaatattacgaaggaaatcgaaattgcgatgtatgaatgtctttgcaacccacatatgttgaggcttaacaaggacctcaaagccacctttgaggctattttcaaatttttctacaatacaaagcatcggttgctggacgttacaaacccttcaagtataaaaacatttatatcaggtgtcatatattgttggtgcgaaggctcgaaagaggaaaacgagtggtcacaagcctttttaatggatttgtactcaagagacttccatataaacgtgtctagtttgacaccggacattatcgaggaagtttatattcatatcttattcttacaaaatccagcaaactggacagaggtcgttgtttcccaattttggtcaagattattatcagtcttcaatttatttgacaaagacgtctttgtagagtatttccaagccccaaagaatgcggaatcgttgaaaaaatcattcaagttcccattagagccaatttataagatgtggtacaatcatttgagcaaatcttatcacgacaagcctttggactttctattgagagcactaacgatgttcttaaataaatttgggcccgaattttggtctaaaattgagcccttcactttccacagcattttggatataatattcaacagagattcattcccggtcaaattagttaggatccaagataatccaatagtcgaacaccaaacagaaatttactttcaactcactggctcagtgactgatttgctttcttggaccctgccattttatcatgcattaactccgtccaaacggatccaaatggttagaaaagtctcaatggcatttttacgagttatcgcaaattatccgtccttaaaatccattcccaaggcatgtttaatgaattcatcgactgccttgctgagagcggtacttgctattaaagagaatgaaagagcaatgctttataaaaacgatgaatttgagacagtgctattgactaagacagattccagagcattgcttaacaatcccttgattcaggatataataataagatctgcttcaaatcctaatgagttttacccagggctggggcctgcgtctgcatcagtggccacttccacaatgatggtgttggctgaatgtattgattttgatatactgttattatgccatcgaacgttcaagctttattcaggaaaaacaatcagtgaaattccaatttcgactaacgttttaaaaaacgttacaaataaaattgacctgagatcatttcatgacggtccattattggcaaaacaactgttaatttctttgaagaatatcaacggtcttctaatagtaccagcgaacacccccgtagccaaagcacacaacgcgttgaatcaaaagtttctccttttatcaacaagattaattgaaaaatttgcagatatcttgcctgatcaattgtcaaagattctttctgataaagatgcttcacaggggttctggtcctgtatattttcctctgataggcacctgtatcaagcggctacaaatatattatacaatacttttgatgttgaaggtagattagaagggattctagcaatcttgaataataatttgactgttaatttggggaatataaacgtgatgttacaaaggttgatcaattgtgaattttatgagccttgtccacgtgctgttcgtgtcctgatggatgtggtgagtgctttcgttgacccaatttctggtgtatttgctaattatcaaacgttgaaacgcgaaagcactgaaggagaatttttgaggttttgggaactatgctggtcatttttggatacaatttataacttcactctaaaatgggcttctaaatatgactattctgaactggaaaattttacaaaggatacattagacttgagtcgctcactggtggactcttttagagaattttcagatattcttcagggtcaagacaaaaatttattactcaacgtcctggaaaccttcaaaaatatgttatattggctaaggctaagtgacgaagtacttttggaatcttgtgtcaggttaattataagcacgtcggatttagcgcgtgaaaagcatgtaaaggttgaagattcattagtagagatgatggctaaatatgcctcaaaagcaaaaaaattctcgaataaattgacggaacaacaagcaactgagattctgcaaaaagcgaaaatattcaataaagcgcttaccgaacaagttgctacagaagctgaaagctacagaaaggaaaaggagctgtcgaggctgggaaaagtgatagacctcacggattcggcgtcagcatctccatccttaccaccttcttcgccttcagttgtttctggctcttctgcagaatcaagagctgactatttgcaaagaaaggctctatcttcttcaatcactggaagacctagggttgctcaacccaaaataacatcttttggcacgtttcagccatcgactaatgtcaatttgcagcgtacgaaaccagtcaagcctctatcaaaaatggaattggcaagaatgcaattattaaataacagggttattcatccgcctagtgcaccggctttccataccaagagcagaggtttgagtagtaaaaatgacagtagtagtgaggaaagtgacaacgatatagaaagcgctcgagagctttttgctgttgccaaggcaaagggtaagggaatacaaactgttgatataaatggaaaagtggtgaagaagcaaagtgcggcagaattagccaaacaagaacttgagtatatgagaaagagattaaatgttgatatgaatcctttgtatgagactatattacagtgggattatactagaaatagtgaatacccagatgatgagcctatagagaattattttgacgtaaaggattctttcaattctccggtggattaccaaaggactatgaggcctttattgcttttagaatcttggcaaggtctatgttcttcacgtgatagagaggattataaacctttcagtattatcgtaggaaatcggacagccgtttctgatttctatgatgtctatgcctctgtaaccaaacaggttttacaagattgcggtatatctgattccgatttaattgtaatggcgttcttgaccgattttagacaaggaaaaaggctaactagtgaagattttaaaagagcacaaaacacatgtttagcaaaggttagaacgctgaagaacaccaaaggtggaaacgttgatgtcacattgaggattcatagaaatcactccttcagtaaatttttaacattaaggtcagagatacattgtgtcaaggttatgcaaatgacaactgttgaaagagagtattcaacactagagggactggaatattacaacttggtcggccaaattctacatgctaaaccgtcacctcctgtaaacgttggtacagacgaaattgagatggttaagaaaagctataagcttaacacatcacaagccggcgctattgttaactcggtatcgaaggaaggtttctctttaattcaaggtccgccaggtaccggtaaaacaaagactatattgggtattattggctatttcctatccacaaagaatgcgccaccttcaaatgttatcaagacaccgatagaaaaccactcatcgagcactgagcaactcctaaaaaagcagaaaattctaatttgtgcacctagtaatgcagctgtagatgaaatctgccttagattgaaaggcggtgtatatgataagcagggccatcaattcaaacctcaattggtacgtgtagggaggtctgacgttgtgaacgttgcaatcaaggatttaactttggaagaacttgtggataaaaggataggtgaaaggaactatgagatcacaagcgatccggacttagaacgcaaattcaataacgcagtctcgaaaagaagggaattgagagataaattaaattctgaaagtggtaatccagaaagtccaatgtccactgaggacatcagcaaattacaacttaagattagagaattgagtaagattattaatgaacttggtcgtgacagagacgaaatgcgtgagaaaaattcagttaattataggaatagaggactcgatagaagaaatgcgcaagcccatattttggctgttagtgacatcatatgttctacattatctggttcggcccacgacgttcttgccaccttgggtattacctttgacacggtcattatagatgaagcgtgtcaatgtactgagctttctgctatcatccccctaagatatggagggaaacgttgtattatggttggtgatccaaaccagttaccaccaactgttctttcaggtgctgcaagtaacctcaaatataaccaatccctatttgttagaatggagaaaaatagctccccatatttattggatgttcaataccgtatgcatccttccattagtaagttcccctcatcagagttttaccagggtcggttaaaagacggccctggtatggatgttttgaataagaggccttggcatgagtgcaagccgttagctccatataagttttttgatattattagcgggagacaggagcaaaattctaagactatgtcttatactaatatggaggaagtacgtgttgctattgagttaattgattttcttttcaggaactttgataataaaattgattttacggggaaaattggtataatttcaccttatagagaacagatgcaaagaatgcgaagagaatttgctcgttattttggtggcatgatcaacaaatcaattgatttcaataccattgacggttttcaaggtcaagaaaaagaaatcattttaatatcgtgtgttcgtgccgatgacaccaaatctagtgttggttttctaaaggattttcgtcgtatgaatgtcgctttaaccagagccaagacaagcatttgggttttaggacatcaaaagtctttaactaaaagtaagttatggaagcatttaattgaagacgcaaaacgtagaaaatgtcttgactatgcttgctccggctttctagatcctagaaataatagagcccaaagccttttgaagaaatatagtgttcctgtactatcggaacaagaagacgattacaaattacctatggaatatataaccaaaggaactgccgacgcggaatctaataaagaagcaaagaagagaaagattgttgatgaaggtgatgaaacaaaaaaaattctaaagaaaaagaagaaggacaaggagaagaagaaagaaaagagcaaagataagaaaaagctaaagactgatgagaaaaagaaaaaagaaaaaaagggagaactgtccagtgcatcatctggtaccaagaaaaaatcttctatttttggtggtgcaagtgtagccaatatagtagtttctaaaggttcccttgacgtgaatggcagtacgaagacgacagctgcagtcgataaaaagaaaaagagcaggcatgtttgtttctcagatgatattagcattataccgagaagtgaggagcctgaagtaaaagtaaccagaagtctgtcttctgtactaaaggaaaagaaaacaactctaaaagaaacgaaaccgtcttcgccacctccagttagtgggagtgacggtgaagatgatgaagatgattatacaccttccatttccagttcattgatgaaagttgaaacgaagaataatagtaacagaataactcctaatgaacaagtttttagtgcgagtatatatgatgatccgcaaactatacaacctaaacagtctcagccctctcccacagtttcaagacatgcaaattcaaagacatatgcaacgagtaattcaccaggtattttaagtgcctccgattatggcgagcctgaccagaccggatcgaacgcatcacatagttggcaacctcagcataggggtaacgagaaccaatatccaacaacacctgtgggatctcatggatctcttgggtcattgtctgcacatccgcaagtgagtttccctactggtccagaaaacgcatgtagtatagattcttatccgcaacctcagcctcaacctcaacatcaacctcaacatcaacatcaacctcaacatcaacctcaacctccaacctcaatggttcctggtagtgtgcctgcaggtgtacgcaacagttctaggcgaaacacatcatctagccctttcattcccaaaaaaaggaaacctagatcataa

SEQ ID NO: 1873 - DNA, 1572 bp, Saccharomyces pastorianus
atggctgctgttagagactacaagactgccttggaattcgccaagagcttaccaagattagatggtttgtctgtccaggagttgatggactcccagattagaggtgggttgacctacaacgatttcttggtcttaccaggtttagtcaatttcccatcctctgaggttaccttgcaaaccaagttaaccaagagaatcacattgaacactccttttgtttcctctcctatggacactgttacagagtctgaaatggccatctttatggctctattgggtggtatcggtttcattcaccataactgtactcccgaggaccaagctgacatggttagaagagttaagaactacgaaaatgggttcattaacaaccctatagtaatttccccaaccaccacagttggcaaagccaaggctatgaaggaggaattcgggttttctggattccctgtcacagaagatggtaaaagaaacggtaagttgatgggtatcatcacttctcgtgatttccaattcattgaagacaactctctgcttgttcaagatgttatgactaaggaccctgttaccggctctcaaggtattacgttatctcaaggtaatgaaattttgaagaacatcaaaaagggtaagctattgatcgttgacgacaagggtcatttagtttccatgctttccagaacagatttgatgaagaaccaaaattacccattagcttccaagtctgccaccacaaagcaattgctatgtggtgctgctattggtaccatcgaagctgacaaggaaagattgactttattagtcgaagctggcttagatgttgttatcttggactcttctcaaggtaactctattttccaattgaacatgatcaaatggatcaaagaaactttcccagatttggaaatcattgctggtaatgttgcgaccagagaacaagctgccaacttgattgctgccggtgctgatggtttgagaattggtatgggttccggttccatttgtattactcaagaagttatggcttgtggtagaccacaaggtacagccgtttacaatgtttgtgaatttgctaacaaattcggcgttccatgtatggctgatggtggtgttcaaaacatcggtcacatcaccaaggctctggctcttggatcttctactgttatgatgggtggtatgttagccggtactaccgaatcaccaggtgaatatttctaccaagatggtaaaagattaaaggcttatcgtggtatgggttccattgatgccatgcaaaagaccggtaataagggtaatgcatccacttctcgttacttttctgaatcagacagtgtgttggttgcacaaggtgtctctggtgctgttgttgacaaaggttccatcaagaaatttattccatacttgttcaatggtttacaacattcttgtcaagacattggctctaaatctttgactttattgaaagaaaacgtccaaaaaggtgaagttagatttgaatttagaaccgcttctgctcaattagaaggtggtgtcaataatttacattcttacgaaaaacgtttacataactaa

SEQ ID NO: 1874 - DNA, 3891 bp, Saccharomyces pastorianus
atgggaaacaccgactcgaaatcaagttcgattctgctgaaccattgcattgccctggttcgaccggacgacgcagtcgcggccccggtctcgctttctccctccccgactccctcaccttctctctccagcaccagtgctgctgatcccttgagcgtgaacctggcgatcttcagactggaccccggtccggacctcgacgccctgctcagcggcaaaccgggcatcccgctcgacgttgacgccgtgttcaacgagttctaccttgatttcatctccatggacgtccaggtcttccgcatcaactccaacttcaaaaaaatcctgcacatcatctccagtctgaacccggtcaacttcaacaacctcatcgtgtttctatcgctgtacatcgtgctgtccgcggactgcccggccgccacccgctcagggctgcacacgtccaggctcatcaacgccatcaagacgctgtcgattctcatgcccatctactacgacaggtctaggtccagcacgcaggaccagtgcgacgtgttctgggccacgcagcacgaggcagaggcagacgtaaagcccctccccttgcaaaacacccttctgggcgaaaagctgctgttggcgattttgaaactggctttccagacggacttcaccacggccacaaccgcccatgcggctcaactgtgggaaatcggcatcctgaccaactccaacaagtaccgctcgttgctgggcacgcacttgcaatggcacactttcgccaacaggctgcttcttttgcgcctgttggcagctctgttctcttcggacttgtatgcctccgccgcgcatacgggcaagcacgacgtcaacatgtttctggtctactggtgcacgcaactgcccaaggacaaaaccattcagttcacttcttcactgctcaactgcattatgcggttcgctctcaacaacaacaaggatttccacagcttgaaaaccaacttcttcaactccgacgccacagcaaacaactggcagaccctttacttccagttcgtccagtcgtgtctgcacgtcttgaacctctcgctgtcttataaggcccagaacaacatcgtcaccatcttcctcacgcaactgcagcgcgagtacgatttgaaattgattttgtccagtttcatcaaaatcttcaaataccccattgatctcgcaatagaacaagaatcgaatattttcaatttcaccaacaaccgcacgaccaatcatgtcgacaccaccagaaggagagccgcatccgccatctccaacgatggcgtatcgtctgcatattcttcaccgccgaattcttcctcgtctgctaatagcagcaaaccgcaaaaaaggacccaactacccaacatccaccccttgctcattcctatgacccttctcacaacaagtctgattgattgcaacaaatccttccaaaactatttcgccgataagtttgccaatcgattcatcatattcgccatctattacttgaagtattacgatttttcgtcttcgtcttccttctcgtgctctttatccgcaacaaactcaaattcttccacaggaaatggcccatccagtgatacgattgacgagcattctgtagccgaattgaacgaaaatagcatttctcaaatcctgctaccattgctcaaccatcttctattgattttgacttccaaaaagcttgttcttttcaaaatgttacaaacttttaacctgaattactacacgaacagtctgccaaacttttataaactcaccaacattaacggggacatcaataacttgacattcagagatttcactatcattcaattatcgaacttgattctggaaaacattaagttcaacttgcaaccaaacccgattttctatgagttgatctacaatctactacccatcaatgacgagattttgaccagttctctcaagaatgacgactcgcacaatgatttgatccttttatcagcaaaaaaaaaattcacacaatcaccaaacactacatccagccacataccttcatcaaagttatcctataatgctgcaatgtccttactttacattctttccaaatcatcaaataaagtttatctgaccacttatgcaacacctctgttcaagacaaaggaaataccatatatgatatcgccaggtttcaaaatggatttattatcactactattaaggtcaatcacaatcttcgtgaacttgtatttcgaggatgcagagaatttgctgtttgctatgtcaagacatcaatcgatctgtcaccagattaacgattccataaattccatttccaaggctttaaacatgaacccgaattcaaatttgcatgtcatgaacttgaaagaaatgggcttcaataggaaagtccaatggaaggatttctaccaattcgatgagattaccgatctacctcaagttaagctacactcattttcaaaccaacagcaacagtcacaacaacagaaccaaaatgacagtcagggtcataatcaaaacgaagaccaaggtcaagataatgaatctccagcaccctatttgcttttcgatccgtcttcgctaaacaatgaaacgttgagcacatctaaccattcaacacacccgaaccatgataagagctacgaagtcatcgctttcattgattataggtcggattccaatttgaacttacaacatcaactaaaatactggccacatagacctcaatggcctactcaattgacgtttacacacaaatgtaaaaatttcaagtacgaaaatttcgacgaagtttggtctggtatggtttatttgcaaaacttttcgcgattaatcaaacatgttttatcgaaaattcctgaaattccaagaatcaaatcggtgcagtattttgaaactttagcaaaattgtcagctttgaagtctgacatattgactacaattcgcccccaactaccactcgacatccaaagaatgacgacttttcaacctttatcaatgcatatcaatgacgatttattggtgtggttccatattatcacgtgggcaaacattttcacgcaaacgtcattcaaatatgaggaaagcccatcacccgagttaaggcactttgaatctctgttagacataaacattgacgaaagtgacaataataatactatttcaagactaacaaccgatcgtttggggtacatacggagatcgagaggccaatcatctgtaagcttagagagaacaatcagcgctggatcgggtgtaggagctccaacaactcctttgaatagaacaaagagtaacggaagtggcactttaatcaatcatatcttgcaaaacacaactcaaaaccatttccatcatttaagatcatcttcatcttcgtcctctattgctttagagagaactatttctaacagttccgtgacaagaaacaggccaaataattctcaacatgctgtttctgaaaccgataacaacaatagcagcaataataaaaatattaacaacaataataacaatggtggattctccttcttcaaatggaaatggggaggcaatagcaataacggtaacaacaatgattcaagcagtggtcaagcaaatgcaaattcgagcacaccaaacaccgctgataacttaaatagttatatgctggatgaagaaatcagcgcgggtgtagtgaataatataatcgagagtaacatttgggttggaactgatatccgactctttagggttggagacttcaaaaaggaatcgttttcatttctggaaatgacgtcttcctttttcaagaaatttaagttcacaaacagcgataatgataattacaataataacgaaattgatgataatgcacagttgagatatacttctagagggttgtacagatag

SEQ ID NO: 1875 - DNA, 396 bp, Saccharomyces pastorianus
atggatgcgcaactggagtgggctagcagccttgttccgaaaagacagttccaacagcagcagcagcagcagcagaacaacaaccagcaagaccttcagaaggaccaactgatgaccgtaggcatgcggatcagacagcgcgtcgaccagggctatgcctccagcacgccgggcacctcgcaggcgtcgctgcagcccgcggtcatcagggactactccagtgttattgttccgcagtttaccaggtcgccgctgccctccgcgcactcgctgccccccatgctgatcaaccagagaaccatgtccaccgaggcgtcctcgctcgagaagtgggacgtcccggagcctgccgcggagaacgaaacaatggtcaacgggtccaagagaagactttga

SEQ ID NO: 1876 - DNA, 273 bp, Saccharomyces pastorianus
atggagacgcccttggacctattgaaactgaacctcgacgagcgggtgtacatcaagctgcgcggggcccggacgctggtggggacgctgcaggcgttcgactcgcactgcaacatcgtgctgagcgacgcagtagagacgatataccaactgaacaacgacgaactgagcgagtctgaaagacggtgcgagatggtgtttgtcaggggggacacggtgaccttgatcagcacgcccaacgacgaggacggcgagggcgcggtggagatataa

SEQ ID NO: 1877 - DNA, 960 bp, Saccharomyces pastorianus
atgtggaagagatcgttccattcgcaaggcgggcccctccgtgccagaacgagattcaccaagcccaagcccaagcagcctgtgctgcctcgcgataaaataagaccgcccactcaattgacccatcattcccgcagcctgcagatcacagagccgattccgccaaccgcctctaacctgcactgccccgacgaccatccgctctggcagttcttctccaacaggaagttcatcaggaccaccgacgacttgccgcccgccggccacgtcaggccctggtccatccctgagctgagacacaagtccttcaacgacctgcactccctctggtacaactgcctcagggagcagaacgtgcttgcccgcgagaaccacctcttgaagaacgtcgtcggctcctcgcacgacgagttcaacaagctctcgcagtccatcagaaccactatgtggcagatcagacacgtcctcaacgaaagagacctggcccactccgcctctcgggccttcttccaggacgaatcgcaaagacaaaagtttctggacaccctaaccaacgaccactttctgaataaggacgtcccggacgacgaggtcgccgccatgctcacacgcttccagctcgccgtgttcgggatctcagagaccatccaggacaacaccgtcgacaccacctttattgaaggaatcaagtttctcgcgaacctcaaactgcgccggttcaaggactcggaagacctgatatcggagctgtctcaggaccccatcacagacgtgggcgagtccttcgtcttgttcacctccgatttcgaacagcgtgctgtccacgaagcatgtgtcgccatcaaggacctgagacagtccccggaaaacaaagtccccaaactgaatgaactatccaccgttagaaaatacttgaaacaattaattcgtgcaaattccatggaacaaactactgcatga

SEQ ID NO: 1878 - DNA, 2130 bp, Saccharomyces pastorianus
atgctggaagagcaattgtatttactggcatgtgtttttgcgtcgaaagccgattcgcataacatcaggaaattggctgccaggttgggttcaaaatcggagtacctgcagatcatttgcgtgttgtggccagaattggatgatcccaaacacctttcgtttctatgtaaacaagaactggtggagagaaacgcagaagaggctgagttatctagcgaagatgtgataataaaattattggaaggggatagtcgtttaattccattgattgaaatggacaacgctaccatatcagctagatatcgcgaattgaaagagtttgtaatcaataaactcaacagcaaacccttagaagatgttgaagattggttgagggagagaatcatgatctgtaatgaaatgcttcccgaatcaccgttatactattctgagttgtgggaaaccgcggatccaggagtgatatcttcaaagtttactgaatggattgatggtgtaattaaaccattagaccaccttgataaacgactacacgttatattcaaaatcaacgaatggaatgaaatgcatgataacgaccaattcaatttaatctttgaaggcatcgaaagtgtacaaggtaataacaagatgaccgaaatcattgaacatgaattgattccaactttgttttatgggaaaaaatgggaaacttttatcagtgaatttttaaataaacagcaattctcgttaaagtctgataccaattataaactgtttttaaaaacatattttagtcttgaagagcgattgaaaggtaacagtgaggcgatgagaaatttacaaagcaagatggtggatatattattcaacaacagtgaaaatttattcaatttatccaacttactccacaagttcaacgagttacgggatctactgaggatattcccggatgatattgcaatagaagacgagaaaaacgttacagttttagaaatgaaacagtttatggaattttttaccaattgctccaccaagtattccttccaggaaatctttgccataacacaagaagaagaatcggcccaactggctcattttacctcattatgccatgaagaatttgataaatccagtgagattcccagtttcttacaatccatgtacgaaacggttttgaaagctgaaagcaatgataaaatatttactaggattagcatggatgacaaaatatacagtatagtggaaattttcttacaaatgaatgagtttaactacattgaaatggtcataacaaagttcgactacgatgaaaatgcgcacttgtacaaacttctagtgaagttcttctggcattttttcaataatgcctcgaatgggctacgcaaagaaccagagatgaagaaatcttcacaaacattgcaaataatccaaaggcacatggtgcaacaggcgggggcgaatctaacaaggatggaagtattactcgaactggcagacaagctatcacactactccataaatttaaacaaaacgcatggcggcacaagagatgcagcattcaaaccaagcaatattttggagtataaagattgtcccctggacataatttccaacctattggaattgaaccctcgcctgtataaggatctgcccaccacgagaggcttgctttccgggatctacgacagtttgtctattagtgacgagggccaaacggtgaagatagaagtggatttgatgatactgcatattgactatgcgcttgtcaatctggattttgacgtagcatacgaaatgggcgagcgagtgtttgaactgtgtcgtgaacgtgggcaacagatgatgaaagcgctgggcgaagagcactggttgacgctgtaccaaatggggaagtttatcgatccaaattgggtggacaacgagatccccacggagataatcattttgcaaatgggcatcttgggcaagctgctggagatttgccctctggaggaagtggagattgtcacgtcacaatggagcacgttggagctagagttgagcgcacgtgacttggtgagggataagtatgcattggaggcacaaagcggtagcaagagtagtgttggcggtattgccagggagatcttccataacgtgacaagtttctga

SEQ ID NO: 1879 - DNA, 768 bp, Saccharomyces pastorianus
atggctgtcggaaagaataagagactatccaagggtaagaaaggtcaaaagaagagagtcgttgacccatttaccagaaaggaatggttcgatattaaagctccatccacttttgaaaacagaaatgttggtaagactttagttaacaagtccactggtttgaagagtgcttccgatgccttaaaaggtagagttgtcgaagtttgtttggctgacttgcaaggttctgaagaccactctttcagaaagatcaaattaagagttgacgaagttcaaggtaagaatctgttgaccaacttccacggtatggatttcaccactgataaattgagatctatggtcagaaaatggcaaactttgatcgaagctaacgttactgttaagacttccgatgattacgttttgagaatctttgctattgccttcaccagaaagcaagctaaccaagttaagagacactcttacgctcaatcttcccacatcagatctatcagaaaggttatttctgaaattttgaccaaggaagttcaaggttctactttggcccaattgacctccaagttgattccagaagttatcaacaaggaaattgaaaatgctaccaaggaaattttccctctacaaaacattcacgttagaaaggtcaagttgttgaaacaaccaaagttcgatgttggtgctttgatggctttgcacggtgaaggttctggtgaagaaaagggtaagaaggttaccggtttcaaggacgaagtcttggaaactgtgtaa

SEQ ID NO: 1880 - DNA, 1038 bp, Saccharomyces pastorianus
atggaaggcgtatatttcaatattgataatgggtttattgaagctgtagtgagaggctacagaaatgggttgttatctaataatcaatacattaacttaacacaatgtgacacgttggaagatctaaaattacaattatcgtcgactgattatggtaattttctttcctccgtctcttcagagtctttgactacgacgttaattcaagaatacgcatccagcaagttgtaccaggaattcaactacataagagaccaatctagtgggcccacgaagaagttcatggactacatcacttacggttacatgatcgacaacgtggctttaatgatcaccggtactattcacgaccgtgataagggtgagattttacaacgttgtcatccattagggtggtttgatactttgcccactttgagtgttgcaaccgatcttgaatccctatatgaaaccgtgttggtggatactccattagctccttatttcaaaaactgttttgatactgctgaggaattagatgacatgaacattgaagttatcagaaataaactgtacaaggcatatttggaagatttctacaattttgtcactgaaaagatcccagagcctgctaaagaatctatgcaagtcctactaggtttcgaagccgatagaagaagtatcaatattgctcttaactctttgcaaagttcagatattgatcctgatttgaagcgtgacttattgcctaacattggtaaactataccctcttgctacattccatttggcacaagctcaagattttgaaggagttagagctgctttgggtaacgtttacgagtatagggggtttttggaagccggtaacttggaagatcatttctaccaattagaaatggaattatgtagagacgcattcactcaacagtttgccatcagcaccgtttgggcctggatgaaatccaaagaacaagaagttagaaacatcacttggatcgcggaatgtattgctcaaaaccaaagagaaagaattaacaattatatttcagtctattaa

SEQ ID NO: 1881 - DNA, 1197 bp, Saccharomyces pastorianus
atgtctgatatgctcccattggctacatacagcctgaatgttgaaccatacaccccaaccccggctctaaactttgaaatgccggttaccgttagaattacaatggccgccatcgaccctgaaccttttgacgacgacaagaaaccatctactttaagaattatcaagagaaatcctgagctttctgagcatgaacatggtgagggatgcaaccacgatcacggccatgacgatgaagaagatgaaagtgacagcgaagaagaagtaccaaagaaagccgtcaaagcaaagaaaggtaaaaaggctgagcaaagcgaatccgaagaagaatccgaagaagattctggagacgaaagtgaaatggacaacgagttcgaagagtgcgttcttctaactttatctccaaaaggtcaatatcaacaagctttggatattaccattgctccagaggaagatgttcaattcgtcgttaccggttcgtacactatctctttgactggtaactacgttaaacatccattcgatacacctttagaagacaactcttctgattccgatgacgacgaagaggactactacagtgaagaaaaatcctcaaatggagaggaagaaaaagacgacgaagagttgagttctggtgacgatgaacttgatgatttggtagatgctagtgacatcgaaagccgtcttgaggagttagttgaaaaggacgaaaaaaagaaaaacaataaaaaggatatcaagagaaaacacgaagaagaagaagaagaatctgctaaacctgttgaaaagaagcaaacaacaaagaaagccaaaaaggccgaatccaagaaagagcctgaagaaggcaagcaaaagccaaagacaaaccttttagaaggcggtattatcatcgaagaccgtgtcacaggtaagggtccacatgccaagaaaagtaccagagttggaatgagatatgttggtaagttgaaaaacggtaaggtctttgacaagaacacaaagggcaaaccatttgttttcaaattgggtcatggcgaagtcatcaaaggatgggatatcggtgtcgctggtatggctgtcggtggtgagcgtagaattgtcattccagccgcatatgcctatggtacacaagctttgccaggcatcccagctaactctgaactaacatttgacgttaagttggtgtccatgaaatag

SEQ ID NO: 1882 - DNA, 2667 bp, Saccharomyces pastorianus
atggaagaaagatcagattctatagcgacctcacaatcaggaagtgaaatgagtcacagtgaagccaagaacagggttgaaacgaataccaggaagagaaagtttgcttgtgtggaatgcagacagcagaaatcaaaatgcgatgcgcacgaaagagcaccagagccatgtactaaatgtgctaaaaagaatgtcccatgcatcttaaagagagattttagaagaacttacaaaagagcaagaaatgaggctatcgaaaaaagatttaaagagcttactagaactttaacgaacttaacttcggatgaaattttgaagagaattgaggaagagcaagagattgttttggataatagcaactttacgaaagaaaaagtaaaacagctgaggaaaagtgcctttgagtccacagatattgaatcaaaaacttttagaacattccggggagacccgattgcttataatgccagaaaacatatagattcttctcccttgacactcttaagctcgtcaacgaattttgatactgcgcagtccataaacgtcatgacagaagaacaactaaaatgcttgcctaaaagtctaggcgacatctatttgtcaagcagcgatattgctgagctatttcaagaatttgctacgaaatatcatcagtttttaccggtagtcgacctggctaaaggagctgaacggatctataacttatctccatgtttattttgggtcatcttgcttattggattgaggcgaaaatttggagctacggacttaatgaccaggttgtctgtattggtaaaatctgtgttatcagaaattaccatatctccgatcattcgatatactccttcagataaagacgaacccgttctaaacgtagcatctgtgtactcagtgcaagcattccttctatacactttttggcctccgttaacttcttcgttaagcgccgatacttcgtggaataccataggaacagcaatgtttcaagcacttcgagtaggcctaaattgtgcaggtttttcgaaagaatatgcatctgcaaattcggaattggtcaacgagcaaatacgaacttggatttgctgtaatatagtctcccaaacagttgcatcatcatttgggtttccagcttatgtttcctttgattatttagtaataagttctaccagagtgcctagttcaaaaagccaggtggatatacccaatgaactaaggcaaatggcccaaatcgctagatttgagaatcaaattgtaaacaccatgaactccaccccagcgagtgcgacggggatggtaagtcaagaggagaaacagcccttgttgcatgtgcttaatcaacagctaggccaattagagatcagtcttgaagaaaataacctagatgatatacggaaatttttgttactagtagcgaaagttcacttattaacatattatttcactgatataacgtctcaggatgcggggaaattcaatgctaatatctatgagggatcgtattccgttatggaactcgatacaagttttgagacaaagcgtggattagtcaaggtctataacgctgccgtaaaatttcttatacacgctaataggatgtgggaacaggacccgaccatcatcaagtattttccaggtttattcgtcttgaatatatggcaatctgcctgtatcattagtaaactcatacattcatcactgcattcgatgttggatattatttcgggcaaaaaggcttataacaatgcgatttcattaacgtttaatgcctcggttttgaaatatgatatggcatatagatcatccggaataatgcgaagtatatggagtttatttgcgaatatgtacgatgcatggaaaaatgatcaaagggaaggtgagaaaaaactggaggatgatttcaatttaggaatcaccataaaatctaggatgtcggtaaatgtcttttttgactgcttatacattttaaaggagaaatgtggtatggccaaattagaaagagacaccaagatttctacagcatacaacgttgatgatgaggaggaagatgaggaggaagaagaagaagaagaagaaggggacgaggaggaggaggaggcactaactggaagtatcctggagggtatggacaatcaacagttaagaacgagaaaattcactaatgtacggcatccagaaaagaaggcgagaagaataattgaaaccattccgttggatccgaacccaatcaatgcaggttctactagtagcggaagctccttaacaactccaaatagccaagtagcaaacactatatcatatagaggtatccttaacaaaatgtccccaagagagcagttgaatcacgcaaacttagattccggtgctatcacagatatgaagcaaaacgaaattaataatgaacatttaccaatagcgaccgctgttggacacttagcgagtcaaccgcctcatccaataacacagattcaagaaaatgttcaacagatggcgcagaccaactcttctctattagaaacgcatgctgtgactcagacgaaccctgtttcaagtggagataaagaatcccctaattccattatggcgaattgggacaactgggaatctgacatggtttggagagatgttgacattttaatgaatgagtttgctttcaatcctaaggtttga

SEQ ID NO: 1883 - DNA, 2103 bp, Saccharomyces pastorianus
atggcaagcaaaaatagaaccctgcatgaactatcatcaaaaaatttcagtagaactcctaatggtttgatttttactaacgatttaaagacgatgtactcaatttttctaatttgtttagaactgaaagagaagaaacacagcaacgacactaaatcatttttatttactccgtttagtaaacatttccctttcactttttcatatcaagaagccattcaggcaatgggacaattagaactgaaagtggatatgaacacaacttgtataaatgtctcgtacaacattaaaccgagcttggcattccatctcctcacgttatttatgtcatcgaaactgttgcatacgccgcaggatagaactcgtaatgagccaaaggaaaaagttcttttccaaccaacaccaaagggggttgctattttacagaagtatgttagggatattggattgaagagaattcctgatatactattatcatcgttcaactctatggaacttttcaccttcgagagaagttccgttacagattcaatcattcatagcgattacttaatgcatattctattcatcaaaatgatgggtgttaagcccaatgtttggtctccaaccaaacccaatgatcctttgccttgtttatctttgttgttggaatacgccaacaatgatgatacatttacatttgaaaaatcaaagccagaacaaggttggcaaagtcagattgggaatgtagatattaataactcagaaagggtatcaccattagcgcatcggttctttacaaatccagattccgagtcacatattcaatactatgtttccgacactggaattaggctttttgaaaataaagccttcggaacttccaaaaagattactattaagtacagttttacaacaaaagctatatggcagtgggttatggattgtaccgaaattatgcatgtaaaggaagctgtttcgttggcagcactattcttgaaaatggggctaattgttcctgttcttttaccaccctcacgtaccgataaaaaaaaatttcagattagcagatcttcatttttcactctgtctaagttagggtgggatctggtttgttggaaaggttacaaaagtaacaatattcgagcacccaatggtgatatcattgatctagatatctctttaacaagtcatgtatccgccggtgatgaaaaaaggacgctagaggagaacgatggttttgctcaggaactgcttatttcttcaagcaatcacagccttaataaattggactatgttttgaatgatccaggtatgagatatttattcaggcgtcatttagaaagggaattttgtgtagaaaatttggacgtttttattgaaatcaagagatttttgaaaaaaatgacaattttgaagagactaatagattctaagcgcggtaataaaaaaataaacattggtacttcaaaaaataatgttgtaaagactattgattcagctttgatgaaacaagccaacgaatgccttgaaatggcctatcatatttactcgtcatatatcatgatcgggtcgccatatcaattgaacatccaccataacttgcgtcaaagcattactgacattatgttgcatccccaatccccgctattagaacgttttcctactagcttggatgattcattgcttgaatccaccgaatctaactcttcttcagtcggttccacagatggtcacacgttacaagaactgcctgaagtaatactgaagccttcaaaaacttcctggaatgaagatagtttatttcaaaagcaaacaccctaccaaatatcaaaagaacttaaaccggccccattaaatctagcagatgctcactgtaatgaaacatcactagaacagtcaaatatcatcctgagatatagtagcgacgacgccgaagattataacggaacacataactcattaccagcaactttgaaaatccttagaaaattatacccactttttgaaagcgtcagtaatgaaatgtataagttaatgaacaacgactccttccaaaaatttactaaatctgacgtgtacaaagaagctaatagcttaatagagattcaagaaaagtgctaa

SEQ ID NO: 1884 - DNA, 924 bp, Saccharomyces pastorianus
atgacaaaggatatcagaacgggcgatttagtgttatgcaaagttggctcatttccaccgtggccggctgtagtgtttccgcaaaggctactccgaaacgatgtatataggaaaagaaaatctaattgcgttgctgtttgtttcttcaacgatccaacgtactattgggagcaaccaggcagattaaagcagctggatcaagataccattcacaattttatatcggaacataataagaatgcaaaccaaagagaactggttaatgcctacaaggaagcaaagaaatttgacgatttcaacgtatttttgcaagagaagtttgatgaagaaaatagattgaaggatttcaaggcgtttgagaagagtgaaggctccagaattgttgctggcgaagatccttttataggtcggacaaaagtagttaataaaagaaagaaaacttccatatctcccagaaacgatcctgaaagcaaggaagatttgcagcagctaaagaaagaagaaacgaaatccaacatccaactacccaaaaagaggagacatacagatgatacagaaaccaagccaggtgccagcgacaagaagaaagtcaaattagactattccaggaaaattgagatttcactactatttcgccgtaggattcaaagaaacttaattcagagagaaacgcctccgtctgcgggagatataaaagaaacgcatgagttactaaataggatttatgaaaactcagatactaagagaccatttttcgatttagaggcactgcgcgaaagtaaattacacaaactactgaaagcaattgttaatgatcctaatttagaggaatttcaccccagttgtaaagagattttgttgacctgggctgacctaatcacggaactgaaaaaagaaaaatcacaagcattatcaacaccttaa

SEQ ID NO: 1885 - DNA, 960 bp, Saccharomyces pastorianus
atgctagaatctgtgcagagactatggaaggacttttttgggacaggaaatgatggcaggaaacgtgaatatggatcgctcaatgaaataagaagaagatctgcattaaagagtaaacgaaagcatatacggtccacgggaaaaagcctgttaaagagaccgagaaaggcaccagttagaaatgatcaggaaattcttaatagtggaagaaggaggactcctaagcggaggctttctaggattttccagacaatcaaagatgttttttctaatgatcatgagaatatgaataagatgcaaaatatttgtggggacatgacaagaattttgaagaagccttctcaaggacggccttcgtatttggatactgatgcggcaaaatcgaggattttgaggagtgatgctttcaaaagaaaattatcagagttaaaatataataagcaacgaattggtgagttgagaaatataagtgctgatgcatcatgtggaaatgatgcgaatcaatcactctatttagatagagaaatgcttttacaacggcaaatcaagaaaagagatgagaaaataagatctctggaaattaaactacaatcattacaggatgaattaaattactcgaatgagaaatataggattttggaaaatctactagattcttcaaacatcgatccatcatacacaaaatctagaagggccatttcgaatctagtaaaggaaaatgatcagattaaacctttaaagattgacctttcaccgtctccaatacgaagaacgaattcgctattcacttcaagccccatgaaaacatacacaagagacaaaaagataccagaaatgcaaccactacatgaaagcatatcccctgattccccaacaccacctcatcgctcaagagaaactgaaaaggcggatgaaacactttcgccaatctcggtagatttttcgagttatttatcgtaa

SEQ ID NO: 1886 - DNA, 1185 bp, Saccharomyces pastorianus
atggtttccacagagttcaaagtggccctaggctgcatagcaactcgtttggctgtaatgtgcctttttccctctttgcagcaacaattggacaaatctgtagaattttcaacgccagtaacttcatttaggtcgttacaagaaggtatatatctattgcggaataacattcaagtgtataaccacggagtggtccatcatccccccattctagttttattcctctctcttttcgactccgacaaattaatctctatcatatacgcttcacttgatgggttgattgcgtatcagttgacgaagatgacaaaggtttttaagaatctaaaagtacaaagctggctaccaggtcttctctatgccgtaaatcccttggttctattgtcctgcgtcagccgttcatcaatcatattcacaaatttcgccatttcttcgtcattatattgcatattaaccgaaggcaatgtcattctatcctcggttatgatatctgttgcgggatacttgtcattttaccctcttctacttttgattccgctattgggtatgctcaagagctggagacaaagaatgttctccgtcatcgtttccatattatctttactaattctgctattgtttagctataatatgctaggtggagaaagttggtcatttttgacacaagtttatggatctataataagttttcaaaaggttttccccaacctgggtttatggtggtactttttcattgaaatgtttgacactttcataccgtttttcaaagctgtgttcaatatcttcatagcagctttcataacaccatttactttacgctaccataagcagccattctacgcatttattttatgtatcggatggattgttttaactaagccatatccatcccttggtgatgctgggtttttcttcagtttcttacctttttttactccattattcggttatttaaggtacccaatcatatcagcattattgtttctacacgctattgtattagctccaattttctatcacctatgggttgttttaggttcaggaaatagcaattttttctatgcaatttccctagtatatgctctggctttagcgtctatcttggttgatttgaactgggcaatgttgagaattgaatatgataatggtgtaccaaatttcaaattaaaagtaacacaaatttaa

SEQ ID NO: 1887 - DNA, 1695 bp, Saccharomyces pastorianus
atgagattagggaacgctattgccacgctgtgcctaacggccttcacatccgcaaccaccaacaatagctatacaagcaacgatcaaacactaaatgccttcaatgacactcacttttgtaagctggatagaaatgataatgtcagtcccagctgtaatgtgactttcaatgaactaaacaccataaatcaaaacatcagagatgatctatcgggtctattgaaatctgattttttcaagtatttccgactagatttgtacaaacaatgttcgttttgggacgccaatgatggattgtgcttaaatcgtgcttgctccgttgatgtggtagaagactgggataaactgcctgaatactggcaacccgagatcttgggtagttttaataacgatacgatgatagaggcggataacgatgatgatgaatgtaaatttctagatcaactatgtcaaactggtaaaaaacttgcagatattgaggatactatcaattattgtgacataaatgacttcaacgggaagaacgccgttctgattgatttaacagcgaacccggaaagatttacaggttatggtggtaagcaggccggtcaaatttggtctaccatctatcaagataattgtttcacgctcggtgaaaccggtgaatcattggtcaaagacgcattttacagacttgtatcagggttccatgcctctattggtacccatttatcaaaggaatacctaaacacaaagactggtaaatgggagcctaatttagatttattcatggcaaggatcggaaactttcctgacagagtaacaaacatgtatttcaattacgctgttgtggccaaagctctttggaagatccaaccatacttaccagaattttcattttgtgacttggttaataaagagattaagaacaaaatggataacgtcatttcacaattggacacaaatatcttcaatgaggatttggtttttgctaatgatctaagtttaactttaaaggacgaattcagatcccgtttcaaaaatgtcacaaaaattatggattgtgtgcagtgtgatagatgcagactgtggggtaaaatccaaactactggttacgctactgcccttaagattttgttcgaaatcaatgatgctgatgaatttaccaaacaagacatcgttggaaaattaaccaaatatgaattgattgccctattacaaacattcggcagactatcagagtccattgaatctgttaatttgttcgaaaaaatgtacgggaaaagattaaacggttctgaaaacagactaacttctttcttccagaataactttttcagcatcttgaagaaagctggcaaatccattcgttatacaatcgaaaacatcaacacaactaaagaagaaaaagaaaaagttgataattcacaatcacatgcatttgacgatttgaggatgcccaaacaaaaaaaaagtgtgccaaaagcagccgccggcgtaggaagtaaatggaaaaatgcttgggaaactgaaaccagtaacgttttagaagcattcaaatttatttatagaagttatttggatttgcccagaaatgtctggagactaacattgggaaaggcttataaattttggaataagtttattggtgttgccgattatgttaaagaagacgttgaggaggcaaatacccataaactaaatatacaatga

SEQ ID NO: 1888 - DNA, 1566 bp, Saccharomyces pastorianus
atgaaacagtttaggttggttaatgcggtttccgcatcatgcatgattattggcctcgtgatggccaattcggactcgatgttcagtaagtggacacaggacgacctggtcgactacttgcacgacaacaagaagggtctggagaagtacgccacagagtcgattgaggatttgaagaaggaagcgtcccaggtgtgggacaaacatgcgcagcccaagccatggtggcaggtgtggtctagtgacagcagcgttggcagcaacagcaactccggatggttcggcaactccgggtcttcggtgtcggactggattttcgacacttggtctacagacagtctgcgcacctttttgaagaagaacggcgtggacgtggatgacgccaaggcgtccaaggactcgctagtgaagaccgccaaggcgtccaaggactcgctagtgaagaccgccaaggagaactttgccaaaatatccaagtcgctgaagtcatctggttactatccttccagctcgtacttcgacagctggtccactgaggacctgcaaagctggttgagtgacaacggtattgactacgacaaggccgttcaaaacaagaacgaactggtccagaaagtcaaggaaaacatctataaaacctctgaaaaggccgaacagcagcgtctgggcgtgcttgaaagtctcgacctggctcaccagcaaatcttagatactacgggccaaatcaaagacacagtgttcgacaaatggtcgagtgaccagttgtacaactggctggaaaaccacaaggttaaacttgacaagaacatgtccaagaaacacgactatttggtcagaatggccaaggaaaacaccgacaacttgaaggacgacatatattggtacctagattacatgaagagagaatcttctccattcttggccaagactccagaatacgtcggttccgtttgggactcctccaaaaactatctttcgaacctctattccaagttcagaggtaagactgacaacttggtcaacgacaccttcttggtggacatcgactcatggtcaaaggacaagttaaagatgtttctagatgctcgcggtatcaagcactcaatgctgtccaccgaaaaccaattgagagaacaggtgaagcaatcaagaaatgaaaaactgaagattataccaacggactaccagaaatactttgacaacagtaactggtccttgaacgacatcaaaagctggtttgctgataagaaggacgacttccaagattctcaagcctactccacaatcatgcaagatttcgacaaggtctccaagaacacaaacgacgcaaaggaccagatttctcaaacttggtcaaacacattccagagctggtctcaagaagatctactgcaatatttgaaatcttttggtgttcccgtcaagcaaacctccacaaaggatgacttgatcaacttggccaagcaaaacacccaatggttattcggtaccgttcaagaaccagtttataagagatatttccacaatgttaaaaactggtcaaagagcttactaagaatcaattag

SEQ ID NO: 1889 - DNA, 1746 bp, Saccharomyces pastorianus
atgaattcgttagcttctaacacaccgctgaatggcactcccgtgaacgaggcggccgtcggcagcaccgagccggtgaacatgtttgagacgatggtggccaatccgattaaagtgtctcggttgcagtccaatggggtgttgacgggccctgcggccaacaccaagtcgatccactactcgttggcgaacttcaacgttttccagtcgctacccaaggaaaccgccaggggcgtggacgacttgatgcggatggagatggcgctgctgagcgggattccggaggagattaagtggtctttgaagaaatacctgacgtacagcaacaaggctccgtacatgattagcctaaggacgttgccggacctgttggggcttttcaagacgttcatacttcctctggagggcattgtggaggggctcaaccagtcttccatatgcgattccggcgcgatggactctttgcagatgggcttgaacgggctgctgatcataagaaacttggcccaggacactgactcggtgcaggtgctggtcaaagatgcggagatcaagtcgttcatcctcttcgtcttgaaaaagtttcagtgcgtcgccacaggcgatagcaagtggcaactgtacgaggggaatgcgacgttcttcaacgaattgacccattacactttggacttgatggaagccatctcttcttatattgctccggccatgaaggacgaccattatttccaaacgttggtgtccatcttgaactacacgaaggatagatatatggttatctccatattgaggtctctctcgaggctgttagtcaggtccaaagccaatgaggagagtgcggccgataatttggaccataagactctgtctttgatcgtgtcctttttattggtggagtgcgacagtgagttgatcattgcttcgttggatttcctctatcaatacattttgcccgggtcccaaagaatcacggaattattcaacagtaaagagtgctctttggtacttgaggctacgctgcccaacctgctgtcatacaatatccccacccctgactacaactctttgcaaaagcacaagatcaagttggagaaaagattaaaacctcctgcacccaaggagccgcccaatctgtcagacgaactgttccaacaactgttcagactgaacgagccactgaggtctaccacttggttgaggtgttgctttgagcccgtacaagaagcagaatttacacaaatatcactttggaggtcgtacgaatccaaatttggccaacctgtgcgtgaatccggacgcaaattactgcctgccgtggaatttatcaaaaacgtttctaacgctttccataacgccgctgccatcgtgatcgctgacccaatgaccggtaagaaaagattcgtcatcaagggcattcaaccaagattcaaagctttgaacattgcagacggagaaaaagaatcgcaagtacccatttcggcgcttaagtccaaatttttgaatgagactaaagaaattacacccgcaagacaaaacaatttacctggcataaaatttcctcagggactatcagatgtcgctaaagttgcgtgtacattcttgtgtcttctgtccaacgacacagacgatggtgtcggttccacattttgtcaacgcatcagaccattagtcctacacaaactggcagatattccacctttaacgttggcattgtctgaatatacggaaaatacgtcgggactgtga

SEQ ID NO: 1890 - DNA, 939 bp, Saccharomyces pastorianus
atgtcaaaggaaacagaagatcagaagaatgttctagacgagccgatccatgggatctacatccctgccgcgctatacctggtcggtgtcgccatcactacgtacatgtccggtgaattaaaaatcttgtggagtttaccagttctctttataatcatgttcactagggcatacacagcttacaaaagaagaagatcgctgtatccaaacaagtggacgtccttagaattggaagaccaaacccttatctccaagaacactgccctataccgcttcaaattgaagacaagattggagagcttggatatccctgctggccaccacgttgccgtgcgtgtccccatcgatggtaaagatgagatcagatactacaacccaatcagttctaagttggaagacgggcacttggacttggtggtcaaaacttacgttgatggtaaagtatctaggtatttcgctggtttaagtactggcgataccgtggacttcatggggccaataggcacgttgaactacgaaccaaattcctccagacatttgggaattgtggctggtggctcaggtatcaccccagtcctacagatcttaaatgaagtcgtcaccgttccggaagatttgaccaaagtctcgctcttgtacgccaatgagaccgaaaacgatattctattgaaggaagagctagacgagatggccgaaaaatacccacacttgcaaatccactacgtggtacactacccaaccgacacatggaccggagatgtcggttacatcactaaggaccagatgagcgagtacttgccggaatattcggatgacaacaggctcttgatctgtggacccgatgaaatgaacaagttggccttgcaatatgccagggaactaggctggaaagtcaattcgacgaaaagttccggggacgatcaagtcttcgtcttttaa

SEQ ID NO: 1891 - DNA, 930 bp, Saccharomyces pastorianus
atgtcatcgaataacaggaaaaagctgcttctgatgggccggtccggctccggtaagtcttcaatgagatcgatcatctttagtaattactctgcctttgacactagaagactgggtgctaccatcgatgtggagcactcgcacttgaggtttctcggtaacatgacgctgaacctgtgggattgtggtggacaggatgtgttcatggaaaactatttcaccaagcaaaaggaccacattttccagatggtgcaggtgctgatccatgtgtttgacgtggagtccaccgaggtactcaaagatatcgagatatttgcgaaggcgttgaagcagttgaggaagtactcgccggacgccaagattttcgtgctactgcacaaaatggacttggtacaactagataaaagagaggaactgtttcaaatcatgatgaagaacctgagcgagacatcgtcggagttcggcttcccgaacctgataggctttccgacctcgatttgggacgagagtctgtacaaggcgtggtcgcagattgtgtgttcgctgatacctaacatgtccaaccatcaaaccaatttgaagaagttcaaagagatcatgaacgccatggaaatcattctttttgaaaggacgactttccttgtgatttgttccagtaatggcgagaacagcaaccatgacgacggctcgaacaacggtactgtgctgctggaccccaagagattcgaaaagatctccaacataatgaaaaacttcaagcaaagttgtacgaaattgaagagcgggtttaagacgctgatactaaacaacaatatctacgtcagcgagctgtcctccaatatggtctgtttcatagtattgaaagatatgaacattccacaagaactggtgttagagaacatcaaaaaggctaaagagttcttccagtga

SEQ ID NO: 1892 - DNA, 1542 bp, Saccharomyces pastorianus
atgctatcgaagaaactgtatagtaacaggaaactgctatcgtccacgaacacgctcataagatttgcgtccacgaagtccacgggcgtggaaaactccgaggccggccctacgtctttcaagactatgaaggtaattgaccctcaaaacagcgacaaaccaaacgtgctggtactgggttccggctggggggccatttcttttctgaagcatatcgacaccaaaaaatacaatgtgtctatcatctctcccaggagttattttctattcacgccattgttgccttccactcccgtggggacggtcgacgaaaagtcgatcatcgaaccaattgtgaattttgctctcaagaaaaaggggaacgtcacctactatgaagcagaagcgacttccatcaaccctgacagaaacactgtcactataaagtcattgtccactgttagccaattgtcccagcccgaatcacatttagggctgcgccaggcagagccagcagaaatcaagtacgactatttgattagcgcggtgggtgcagaacccaatacttttggtattcctggggtcactgaatatggccactttttgaaggaaattcccaactcgctagaaatcaggaagagttttgccgccaacttggaaaaggctaatttgttacctaagggcgaccctgaaagaaaacggttattgtccattgtcgtggtgggtggtgggcccactggtgtggaagtcgccggtgaactgcaggattatgttctccaggacctaaggaagtttttgcccgcattggctgaagaagtccaaatccatttggtcgaggctctacctatcgttttaaacatgttcgagaaaaagctttcgtcgtatgcgcaatcccatttggaaaacacctcgatcaaagttcatctaagaaccgctgtggccaaagtggaggcaaaacagctactcgcaaagaccaaacacgaagacggtaaagtcaccgaagagactatcccatacggtactttaatctgggccacaggtaataaggcaagacccgtggtcaccgaccttttccaaaaaatccccgaacagaactcttcaaagagaggcttggcggtgaataactttttgcaagtgaaaggtagcaataacattttcgccatcggtgataacgcctttgccggattgcccccaaccgctcaagtggcgcatcaagaggccgagtacctagctaagagtttcgataaaatggcgcaaataccaaatttccaaaaaagtctattttcgagaaaagacaaggtcgatctgctattcgaagaaaaccacttcaagcctttcaagtacaacgatttgggtgccctggcatatcttggttctgaaagggccatcgctaccatccgttctggtaagagaacattctataccggcggggggttgatgaccttctatttatggagaatcttatacttgtcgatgattttgtctgctagatcgagattcaaggtgtttttcgactggatcaagttagcattcttcaaaagagacttctttaaaggattatag

SEQ ID NO: 1893 - DNA, 1065 bp, Saccharomyces pastorianus
atgagccaaagtccatcggtgtcgccaagaaggactcttaacaacaaatcatcgtacatcagcagcaatggtggactgattctgccccctgcgaagctggacctgaaccagcaaccggcgctgaatttccagcagaaggcgacttttgacttgaaccaacagttcttctactatccggactcgcctacgaagaaaccacggccaaggttcaacggcggcttgcaaaccagcaaggacagtaatgaaaactattatactaacaacggcaacaacaggtcgtccagatatccaaataccaccaacactgctaatgtcaattctaacccgcatccgcatcagcagtcggtgtctcacataaactccaaatctcttagattccaccaaactaaggagacagacagcatacaggatatctcgttcccttccagaacgtgcacggccaaaaggtatttcaccaggccaatagatctgtacgggatcagaaacaattgtagcgccgtcacgcctgggttgatgaattccccaacgaagtcaaaggcaaacttcaacattaagaagtctattttgcccaggtgcgtgatcaccacatataaattaccgtcaccagtatacgaaacaatagacgatatatcgaaaaaaatcataatcttgcagatttcgctgaattttgagaaaagctatcattttttgcagccgattcagctgtctactaataaaaagacacgggtatcgaaatcactcgaagaattatgcagagagctattgctaccaccaactaaaccgcagcaccaactccaaagcaacatcaagtctatgaagaatcctccgaatatcaataccaagcagagaaccagtaccaccgccggtacaaacgccaatgagagctttgaattgagttttgacgggaaagcgatggacagatctgatatatttcgaatggtggactcatttagcatcgccatctcagatgatgatgacgatgacgacgaggattcctttcagcagagaaacaggaacagcagaatcttacctgctgagatactgagtaacgggcctttgaaatga

SEQ ID NO: 1894 - DNA, 3387 bp, Saccharomyces pastorianus
atgtcaaactcaaattctagaaaacctagcgcaaatcatgcataccgtcaacagcatgattataacgggatgaacgccatggtaggaaatccaatgttgtaccatcctgtggacttcatgaacggtgccggccaatatggccccactcaacacccggcatattacacgaactcgccgttgccaaatgttccaccgacgcccttcgatactgcttacggtgctagtcttttgccatcccatttgttaatggggtcgccgtttgtttcctcgcctaatatgcaaggtggctataaccctggtagatcatcaaaattcaataggaaggcttattcgagacccatttcgagccaaaacagctataacgctaacaacagtaataactacaacaacaacaacaataacaacaacaacaacaacaacaacaataatggaatgatgactccttcaagctattatagaaacgggagaactctattttcgaggaaagacaacaattcaggagatgttactcacaataattctaagggatatgacaccaggaacagcagtggaagaagaggctcttccagaatcaacatttttgatgagatagacccagaaaccctattacagaagccctttcgcattgattataagattctacccgctggtgacgatgcttataggactcgatcgctgcttattgaaaacgtagatagtgctgctgatctacactctttagtcaagaactttgtcaaatctaatgctctggaaagtgcatatatagttgacaacaatgaggctggtaactcagaagaagaaaagactaagagtctatctattttgataagtttcttgactaggggcgattgtttgaacttttataataacattttacaaagactatcagagtttaagacctttttgaaatccaaatcattgaatctgaaatttgtctgcctaaattacgattccaaatcctttccaacacctgtcgaagatggagagttatcaaaaagtgaagatcaagctgctactgtcaataattcgatgatgatgatcagtgcttcgttgcatcacaatgtcgagaataaagatgctacaaggtccatcataattgaatttaaaagtcctttagaaaaagccgaattattcaaggagaaactgcaatttctagataggtcaaagaacaaaagatatatcttagaatccattgagatagtgaacactgatgtaccatcgaatcaatttcctggaaactatgctgtgttgacctttttaaacatcttcatggcaattgaagtcctcgactacttgaagaaatactctaaaaaactaggcatctccaaatgtttctatgtttctctaacaccattgatggtcagttcaggcaggtcttcagttgccagtatttacgaaagcaaattgagttcgcatcgtttatcaaccccatcggttgccactggcaacaacaatgatatcaacaacaacaacaataatggcagtattggatcttccgtttacggaaactctaatataagtttaaccagtctttcatcatccgtctctttgaatgaagagattgacgtgttgacgacgaaactccaaggaatagaccttgatggaactacattagaagtcaattgtcatgattatcctacaccagttatcaatgaacattctgcccatttgagtaatattaaaatttcaaaaacagtagataattccagacaattcccaccagacattccttcgcccttgcctctaaatgaacacatgtttatggctgattccaatcaatcgaatggaacaatagtatcccaacaattaataactggtccttctccgcaatctccgaatctacaaatcaaccaacgagtactatccaacccgataactcaaagcttggagcaaaatttcaatgtttcaaccaaagtggcttcgtccatggggtcagacatcggtaacagaacgatttatataggaaacattaatccaagatcaagggcagaagatatctgcaacgttgtccgcggggggatacttcaaaatattaaatatttagcagagaagaggatttgttttgtcactttcattgaggcgtcgtccgctgtacaattctatgcgaattcatttattgatccaatagtattacatggaaatatgttgagagtagggtgggggcattattccggtccattaccaaagtcaatctcactagctgtaacgattggggctagtagaaatgtttatgtaagtttgccagaatttgcattcaaagagaaattcattcacgacccccaatacaaacaactgcatgaaacattagcgttaccagacgcggagcaattaagagaggatttcagtacctatggtgatattgaacagattaattatctaagcgatagccattgctgttggataaattttatgaacatattgtctgcgattagtctcgttgaagaaatgaacaaagaacctacgggacatgatgatagtagtgaagtgataccgaaaacggcaaccgaagaaaagttcgatggccgttataaagggcttttgataaactatggtaaggatcgttgtggcaatataaataaaaatctggtagctggtaaaaattcaagattttacaaaaaagttaaaaggccgagctacaatatacatctaagtaaactagaagaaagaaggagacaaaacgaaaacgataaaaaggaatcctttgataaagtcctgaatttggaatccctaggtataagtctcgatccacacaagggtgccgacattgatgaaactgagactgaagacactacaggggccaaggctgaagttgaggtagaggctagaaatggaaaccaagccgcggggcccggcgggttaggtcttggagtggtaaactcagacgtaaaacacgcactttcagatgaaaccgattacgacgaattgttcaacaagtcatcaagatcttccgattcgtcgtcggacatagaggtcataatgcattctccgagtgatcctgaatatgccttaaaatcgcagactttaagaagttcgagtcaaacggttataaacagtaagagaccggcaaaggtggaaaacgatgatggtttggtgggactttcacaatttaatcatagatcatcgctaaagcaagctccaccaagggccccctcaacgttgtcctataatcattcgaaaaatagccaagtgccgattcaagacgctggaaataatgcagacgtaacggacaacaagacgaggaaaagaggctctttcccaaggcatagaacgataccaggatcggatgttatggcccaatacctcgcacaagttcaacactcgacgtttatgtatgcagctaatattctaggggcctctgcggaagataacgcgtatcctgatgaatag

SEQ ID NO: 1895 - DNA, 732 bp, Saccharomyces pastorianus
atggcaaaaactttggcacaaggaaggaagcctggtagcggcagaaagccaggaaaaggcaagacgttaagagagggaagaaagccgggcagtggtagaaggaggaggcaagatattggaggtagagacgccgatgcgtcccaacaggatcaggaatcgcgtcccatcagttccagggatatggaggctgtagacgcattgagagagttgacgcatagcccgtcttctcacccagctcataacccaacaacagcaccgccgcatgtggcagcagcggccccattgcctccatctatggattacagccagcagtcattgatggatcagcagtatcaataccaataccagcagcagcagcagcagcagcagcagagggtggacgtggtccctcctaagccgttcatcactcacaagatcttgttgtcttcaacagggcaacctgccggccaaatgaattcaaacccaaatgcaaaccataaccataaccataattcaaacagcggtaacgtcaacatgaacatgaacatgaactttaacattaatggaaacaatcaagactccctgtcttcttttctaatgggaccctacaactacttgcaacggccattcattgtgaaaccataccttgatctgtctgcaagcacagcgccaccgaaccaagcacaaccacaaccgcaagcaacccacatcacaaagagtacggaaactacggagaaaaacacaacaatatga

SEQ ID NO: 1896 - DNA, 888 bp, Saccharomyces pastorianus
atggactccctagaggctagactacagtttattcaggtgctgaaaaacttgcaaaaaacattacacaagacaagggactccaccacatcgtcatcgacaagtacaccaccgtcatcgcaaccgaaattgaacaatgaccccatacagttctatttaagaaactacagacatcattatgaagacttccaccagtgtctgttcgatactaccttgaagatggacccattggacagattgaatgtggtgatatactacattagaataataaaaaacttgtatccccactacaattccagtaccaatatcgccaaagtgttgaatgaagtgttactaatggacgtggatctggtttttgagctgtgcctgccctgcaacgactggaaatccctcacaaacctgaccagctgcaaggagctattcctcgacttgtcaaggctaatcaagttcgacaccaccatcgtgtccacgtcatcagaggccacaaacccggacgcaactacctggtacagcgtcaagactgagaggaccgttcaagactacaaacactcgttgcagcgaacagaaacactgctaaaagacagggacttgaaaaagctggctttcttccaacagtttgatgccgatgctatcaccatcaacccagaattacaaacactgccaacaaacacaaacattgtattgcacaggatggagtcagacagagaatcacacaagagatcaaaggaaacgagctggtacattgaaaggcctaccaacgacatcctagacgaaaccgagtttgaaacgttgtggtcgcattttgaaactgctgatcccgggttcgacaaagtcgactataaaaatatcaagacgttgaatgaaatcgctaaggcgtcatacatgtactaa

SEQ ID NO: 1897 - DNA, 2748 bp, Saccharomyces pastorianus
atgactttcacattctccacttcatcaaggaaaaatgggagaccacctttaaaatctgtttccacagaagacaatattcatttgttaagaaagcaacgccaacaacaagcatcaaggaactctacagagacttcacataatccaaatagtaacctctcagcactcgccattggtaatcgggaagatgaagtacgcagcgcttcaactaccaacttggaccgtttgcgacaggagcaagaagaaaacctattagaaatggactgtaccaaatcaacactgcttcatagagcaaacatgttggtggacgtcctaccatcttttgaaatgtataatgccttgcacagacatattcctcaagggaacgtcgatccggataggcatgattttccaccttcttatcaagaagtacgtacacaaagaatgactatactacccaccactgataattctgtggaaagatcaccattaacagcggtactagaacctgaaaatacatgtaatagtagcactactcattcacttaccaacctacatcctttacaaacgcagcatcttacactaaataccacaggccaaccacgccattctttgtcagagactaatgttagccaaataccatttgaagatgatctaaacgactcagataatatttttatagataaattatacacattacccaaaatgaccactcccgttgaagttgatataagaataacgaaaacagcatcaatacctcacgagcgtcctgaggaacaatccatattgaaagaatatacttccggtgatattattcatggttattgtttgattgaaaatcgatctcctcaacctttgaaatttgaaatgttttacgttaccttagaagcatatatatcagtaattgatcgccaaaaggggaaaagaactttaaagagatttttaagaatggtcgacttgagcgcatcttggtcctatacaaacattgccccaagtacaggtataaatattgttccaggagaaagagattttgatgatgccattattggactttcaaatagtagagaactgaagccaaatacaaaatacaagaaatttttcatgttcaagttgcccacacaattgttagatgtgacatgtaaacaagagcaattttctcactgtctcttaccgccaagttttggaattgacaaatataaaaataattgcaagtattccggcataaaggttaatagcgtccttggctgtggacatctaggtacaaagggctcgcccattttaacgttggatatggcagatgataatctatccgtaaattataccattgatgccaaaattgttggtaaagataaaagaacttccaaattgaatattatgaaggagagagaatacaacttaagagtcatgcctttcccttttgccggtgttactaatgaacaaagtgaaaagacatgtttgagacaactaaaggatttggaaaggttgatcgaggatagatttgaagctttaaacaagattttcaaaaagctggatttagatgaggcaatttcgaatttagatatccatgatacagatatcagcgggactttggacggcaatgaagagttggattcggatgaattactaaggcgcaagatggatcaattacacattaataatagaatagacgatgccgccaacctatcaccatcatatgactccaaaaatatgattccaaaggagaatttagttgagactgagttacgttataaatttaagaacaaaaacaaatcaaactcaagcttattttctcatttcttaagttcctcagaaacaggctcatcggcagccccacatacatataattctgggttaattgtcttatcagttaaaaaaccacaatctgcattgccttattggtcaccatcgttgttgaggaaaactaatagatttgaagccaagagtgaacaagaaaaagaaaactggcaaaggttaatgaatttgcttccagagggagtgaagaaaccactaactaaattggatgtaaacttgacttgcatccaatcgaataacagtgctgaacataaaccgcctgagataagctctgtaacgacagaatttgtagttattacagccaaatccgataactctattcctattaaattcagtacagaattgttaatgaacgagaataggctaaatgaattgaagacaaaattctcggcactccagaaaaaagttcaggaatatcgtaaaaaatttgaagaaaacaatgtgaagctaaatgaactttacaacagaaatagagatcagattattccaagagaattattattcacgaactttgtatctgaccaattaaacaatgatgttgacagtttagctggcttaaaagttaatgttattgatctgcatgacattttcaagaagcagattcacacttttaaagaggaaaatgaagatatcatttccaaaaagggaggcagcaattcttctttagcaacatccaacaacaatttcttacaggcgacattcagtaacggcgcatccacggctactaaatttacccagcagattgtgcatacatgggaaaaagttaagcctctacagtacaagagagatgtaacggttaatttgaagttaaatcccaacatcaaagaaactttagtacctaattttgaaacttgtttgtgttgtaggttttattgcatccgtgtgaatatcaaatttgaaaaccatttaggttccatgaaagtagatattcctgtcgacgtgaagaaattacgaatctaa

SEQ ID NO: 1898 - DNA, 924 bp, Saccharomyces pastorianus
atgttgctgtcttcacggatcgttcgaagctcactggtcactgccccaccaaggctgtctaggtttttcacccaagcgcacaaggtgtgcaaggaagaagaccccattgcccctccatcgcccacaactcaacaaacagaaccgaagtacacgcatttcggctcgaagactgttttgaagtccaacaagcagaagctggttggtgatgttttctcttccgtagccaatcgctatgatttgatgaacgacgtcatgtcgttgggtatccatagattatggaaagatcatttcatcaacaaattggacccggggaaaagaccaaactctaccacacccttgaacttcattgacgtggctggtggttccggtgatattgccttcggattactcgaccatgctgagtcgaaattcggggacaccgaatctacaatggatattgtagatatcaacgctgacatgcttaaagaaggtgaaaagagagccatggagcaaaaaaaatacttcaaagacccccgtgttaattttttggtttccaacggtgaagttctcgaagaaatcgagtctaattccaaggacatctacactgtttcctttggtatcagaaacttcactgacattcaaaagggtttgaacactgcctatagagttttgaaaccaggcggtatcttttattgtttggagttttctaagatcgaaaatccgttaatggacttggcttatcaacaatgggctaaagtcttgcctgtcatgggatccatgattgctaatgattacgactcttatcagtacttagtggagtctattgaaagatttccagaccaagagacgttcaaatccatgattgagaaagcagggttcaaatctgctggttacgaaagtttaacttttggtgtatgcgctatccattggggtattaaagtttga

SEQ ID NO: 1899 - DNA, 2895 bp, Saccharomyces pastorianus
atgatactaatggaaaatgtacaaagagaccgtgtacaggacgagcatgggcatgataccatagaaaatatcaacaattgcaaagataataacaataatattcaagtaaggcggatgaggaagacacagctgtccaagaaggagttcctcgagaagaggaaatcagacgtgttgattgctgctaaatctttggacacggaaatccagaacgttaaaaatttgaaacgattgtccataggttcgatggatttggtcattgaccctgaattggagtttaaggtaagcggtagaaactcatattcctcagagtcctcaaaggaatcaatacaagaatcgctgcatgaactaaacactgtacaactggaaaaaaggcaaggggaagaacagggagaagaacaaggagaagaacaaggggaaggacaagaggatgaagatgacgagtatgaggatggtaatgctactaatgtggacgacagcattgatgtgactcaaacagagtatttgcatgatgaagagactttggagaaggaaaagacttccaggaatgcctcttcttcaacttcatattctgcgagagtaacatccagcaacagaaggttgagtggggttaaatcgtttgcacatgacgagattttggacgtggcagaagatcacaactcaagtacggccaatttaactcaaaacctattgtgggttcctgccaaccaacatccgaatgtcaaacccgaaaattatttagagctagtccaggatactttgcaaaacattcaaataaccacagatcaagatcctgatggaaaaaaatcggatctgggtaatagccatgtattttccaataggcagcgctcgggttctatagttagaagaccctctcacttgaaaacatcctataccaaattcgatgacgaaccttctgctgcggataggcagagacaggtccagggacacgatcaagcggagaaacgaatatcttcactcgaagccaaaaccataaggtctgtgtctttgaaggaaatcactgaagaattaaccaagatctccgataatgccggtttgacagattcagatgcgatcactctcgcaagaagcctgagcatgtccggttcattcactaatgagagccttcacttgggcaacaataaaatcgaaaatgacaatgagtttgcatcaaatatgttcaataagagcgggctgaccataccggagagatctttgagaagatctaaattcaacacgtataaaatcagatcagacaacagtgaacttccgccaacagcaaggcctaacaactcaatgaatgtaaaagcaaatgacgaccgtagaagtgcatcatcgcctgcatcctacatacaaccgcctcaagatcaagctccattgaacgatttccaagagattttcgaacattacagaagaacaagcactgattggggtactgaaaatacaaaatacgtcgatagcaccaactactattcagacgaagaagatttgacacatgcatccatttcccaagatagtagtttcttgtccacagatagctctaacaatagtgttttggtgaaaccaaataatgcaggctcaatgatttcagaaagattagatcaggatatagcttccagtgagaatgaagatgtaaacattaacgaaccaaaccatggctggtcatggttgaactccacgaatgaaaacttggctaataacgatagtgcctatgagcaagtgatagatgatgaagaagaaaatggagattgcgttggggatgaaaaaaccgattttgttaacttaagcgtatctagaagagcaaagtctactaaacgtgcctctgaaagaataaatcattccaagaataggcattcgccaatattccagatgcaatcggatgagtcgaagtcggtggtggttacatcttcagtcacttcactatctccgtcacattcatctgaatccgcagcatctgcggcagtggagaaagagcgaggcttgcctaatgacgacaaaccaagtgcgcataagaagcaatcgctagaaaagagacttgtcagactatttaaaaggaagcagcataataaaaattccaaatcggatgccaaggtaatcaagaaaaacgtcaaacaggaactaaaaaagaagacttcgcattcaagtttatctaaattcagaaaaagccccaaaaaaaaatctcgacaaatcgaagtggtacaagatcgcccttcatcacctgttgaaaccgcttcttccgaaagtttgaatacggcaattgaaattgaactcgttgtagaaagcccagctgattccatcattttttctggcggtaatactaatcacagttctgaatcggtcgtggaaaccataaatgagttagatggcgacgattcgttcgatatcagtggcggcgaaattaattatagcgtcgaggcgagtgctaatatgggtaaagacccagcaaccgaaccaaacgagaccgtcaatgaagaggaggaagttatcgtcccaactctcgcacctcaaatatctaccctacttccaaaaagactaaccttcgaagatattgttacaccagaatatccaaacgcaccgattaaattcacagatagcgcctttggtttcccactgccaatgataacaaactccacagtgatcatgtttgatcatcgactaggtattaacgtcgaaagagcgatctacagactcagccacttgaaactcagtgatccggggagagaactaagacaacaggttttgttgagtaacttcatgtactcttatttgaatttggtcaatcatactttgtacatggaacaaataggcagtgaaaatgcggtattcaatggtgattccgcgctggcaatgacagataagaatgactccgatggtacaattttgatcccggatatttaa

SEQ ID NO: 1900 - DNA, 3309 bp, Saccharomyces pastorianus
atggctctcatcgtggcatcgttgtttttgccgtaccaaccgcaattcgaactagacacctctctacccgagaactcacaggtggacccgtccctggtgaacgttcactccaagggaagcgaccagcagcaccgcgcgctatcgaacaaccactcgcaagagtcgttggtcgcgcccgctcctgagcagggcgtgcccccagcaatctccaggagcgccaccaggtcgcctatatctttcaatcgcgcctcgtccaccaacacggccaacctggacgatctcgtttcctcggacgtgtttctggagaatcttaccgccaacgccaccacgtcgcacacgcccacgagcaagacgatgctcaagccgcgcaacaacggctccgtggagcagttcttctcgtcctcctccaacgtcccctcggaccgcattgcgtcgcccatccaattccagcaggactccggctcgaggatcgcgtcgccaatccagcagcaggaccccacagccaacctgctgaagaacgtgaacaagtcgctgctagtgcactcgctgctgaacaacacctcgcagaccagcctcgacaagccgcacaatcacatcgtgactccgaagtcccgggcgggcaacaagtccgcctccgcggcttcctctctggtaaacaaggccaaacaggcgcccgcctcggcttcctcttcttcctcctccgctgctccgccctctatcaagcggatttccccgcatttagcggccgcagcggccgctgccgctgcgaagcaacggcccatcctggccaagcaaccgtccaacctcaagtactcggagctagcagacatctcgtccagtgagacgtcctcgcagcacaacgagtctgacccggaggagctcacgggcgtgcccgacgaggagtacgtctcggacctggaaatggatgacgccaagcaggattacaaggttccgaagttcggcggctattccaacaagtcacagctcaagaaatactcgcttttaaggtcgacgcaagagctgttcagccgtctgccttggtccattgttccctctatcaaagggaacggtgccatgaagaacgccatcaacacagccgtcttggagaacatcatcgcgcaccaccacgtcaagtgggtcgggaccgtgggcatccccacggacgaggtcccggagaacatccttggcaaaatctccgactcgctgagggacgattacgactcttattccgttctcacggacgacgtcacgttcaaagccgcatacaagaactactgtaaacaaatcttgtggcccactctgcactaccagatcccggacaacccgaactccaaggccttcgaggatcactcctggaagttctacaagcacatgaaccagcagttcgcggacgcgatcgtgaagatatacaaggagggtgacaccatctgggtccatgactaccatctgatgctggtcccgcagatgattagagacgtcttgccctccgccaagatcgggttcacgctgcacgtctcgttccccagtagcgaggtgttcaggtgtctggcccagagggagaagatcttggagggactcactggtgcggatttcgttgggttccagaccaaagaatacgcgagacacttcttgcagacgtccaaccgattgctgatggcggatgtggtgcatgacgaagagttgaagtacaacggccgggtcgtgtccgtgaagttcactcccgtcggcatagacgccttcgacctccaatcgcaactgaaggacgaacacgtcattcaatggcgccacctgatccgtgaaagatggcagaacaagaaactgattgtttgtcgtgaccagttcgacagaatcaggggcatccataaaaaactgctggcgtacgaaaaattcttggcggacaacccacagtacgtggagcagctgaccatgatccagatctgtatcggcaacagcaaagacgtcgaactggagcgccagatcatgctcgtcgtagacagaatcaactcgctgtccacgaacatcagcatttcgcagcctgtagtgttcttgcatcaggacctggacttctctcagtacctcgcattgagttcggaagccgacctgttcgtggtcagctccctgagggaaggtatgaatttgacctgccacgaatacattgtctgctccgaggacaagaattccgcgctgttgctgtctgaattcaccggcagcgcctcgctgttgaacgatggcgctatattaatcaatccatgggatacaaagaactttgcttcgtctatccgcaaaggtttggagatgccatttgatgaaagaagaccgcagtggaagaaactaatgaaggacatcatcaacaatgactccaccaactggatcaagtcctctctgcaagatatccacttttcgtggaagttcaaccaagagggttccaagatcttcaaattgaacacgaaaaacctgtcagatgattatcagtcttccaagaaacgcatgttcgtctttaacatcgctgaacctccgacttcgagaatgatttccatactgaacgatatgacgtcgaagggcaacatcgtgtacatcatgaactcgtttccaaaggcgattctagaaaacctctacagtcgtgtgcaaaaccttgggctgatcgcagaaaacggtgcctacgtaagtctgaatggtgtgtggtacaacatcgtggaccaaatcgactggcgtaacgacgtggccaagatcctgaaggacaaagtggaaagattgcccggttcatactataagatcaacgactcgatgatcaagttccacaccgagaacgcagaggaccaagaccgtgttgccagcgtcattggtgaagccatcacgcacatcaacaccgttttcgaccacaggggtatccacgcttatgtttacaaaaacgtcgtctcggtacagcaaactggtctttccttgtctgcagcccaattccttttcaggttctacaactccgcctcggatccactagacacaagttcgggccagatcacgaatatccattcgccatcacattcgcaatcggactccctagatcaagaacaacaagcaccaccagcttcccccacggtgtcgctaaaccacattgattttgcatgtgtatccggttcgtcgtctcccgtgttggaaccattgttcaagctggtcaatgacgaagctagcgatggtcaagtgaaggtcggccatgccatcgtttacggcgatgccacttccacttatgccaaggaacacgtaaatgggctaaacgaacttttcacgattttttctagaatcatcgaaaattga

SEQ ID NO: 1901 - DNA, 2649 bp, Saccharomyces pastorianus
atggggattttcagcaaacatggtgctaagaagctgggaagagcaaaaacgttcactggatgttggacgtgcagaggaagaaaggttaagtgtgatcttcggcgtcctcactgccaaagatgtgagaagtccaatttaccctgcggtgggtacgatatcaaactccggtggtcaaaacctattcagtttgatccgtacggtgttccaattccacaaagctcttcagcgacaacgacgaacctatcaggtagtgtcgatgaaccacaataccaacgacggaatatcgattttgtacggtacgaagaggagtatgtgtttcacgaagacatggatgacgagttgaccgtgttacatacacctcccatagagagaataagtgaggacaaaacatggatcctgaagaaattcggagtctttaaaggaacagacaaggttgacaaacagtacgccccaaggaaaaagcgcaacaggaggaaagtcgctaaaaatctggaaaattctggttcaaactcctcgtcttcatcaccatcgtcttcgacaccatcctcattaacgcaagcaaagcaaactgaagaaaagccaaagaatagagggcaaatcggaacaggcttaccttctgccactgacgcagtatcaccgacaccaaatctcgtagattacgactggaataacctgaacataacaggttacgaatggatctcaagcgagcttagagatgatgcgttactgtcagcggtgaccctccaaggacatcatttaggccattttcaaccgctcgaagtttcgttagaggaaaatcctagaattttgggcgaagaacaacagatgggctccaaggaacacagccgtgggattgatcctgggaacctaaatgcagtaacgtcgcctgagaaggaaacttcagcaaatgataaactataccaccagaacttaaaactactgtttcaaaaaaatccttccaacagcgaagagcctgatcctcaggcattgatcgatgatatatttgtaaacatagaaccaagatctctaccggcatctgatttgaacgaagtcgccttagctccccccaatgacgactcgcgcatgcccaaatccatgctggaagtcacattcctttcatatgacttaccatccgaattgatagacattgtacccagatcagatcttactgtgcatggtttggcgaggttccttttgaaccactatttcaatgacgtggcagataaaatgactgtggtagtgctcgaaaaaaatccatggaaaactttatattttcctagagccttgatggctttgggtgatttatcaggactgggtcagtcctccaactcgagaaatgcgcttttaaatgctctgttggctgtctcatgttttcatttacaaagcaagtacccaaagaattctaaattacaaaagtacttcctaagccttggtatcgagttgagaaaccaagcttcaaactttttaagactatgcttaaacacaaagtcaagtatacctgaaaaatataaagatgttctgactgcaatcttatctatgaactctatcgatgtcgtatgggggacaatggcagattgccaacaccatttagccatttgcgaggattttgttgaatcgagaatgaaattaagacccaatatttctgaaaaggcaaagaccctacatcggattttttcgtttttaaaattaatacaagacagtactgccttagatcgggtcagggccaaggaaattgttatattaccaagtgaagaagatgatcaatacaaaccattagacacgtctacagctgctgtgactgctgatgcgacgaacattgacgttatgcaagaaggtttatttagagaagctctcaacgaaaacgacggtaaaatacacatagagttcatcaaggatcccgctacaaacacttcggctgagtccaccccacagtctaatacgcctcctattttcactaatatagctacagaaacttactataataaatccaacatttctaagctgataccaaagggcgatgagaagataatcggtacggattctctttatggtttaccaaactctttgatattgctattttcagattgtgtacggatagtgaggcataatgagtactataatttaacgtacttacctgtaccaagaaaatttaatgaattgtcactaaatttcgaaaaacgactattaaaatggaagtcggagtggaagttttatgaagatacccctgaggggaaaagcttcatcaatccaacggtggaagcaataaaccaccatacaatgagcttttacttcagtttaattatttattatttcaccatggcaagaagtttaaattgccaatttctgcaaaattatgtggctaaagtattggatcacctaaacgccatggaagagttggtgaacaaaaagaaggtgaagatcgttccccttatttggcaagggtttatggcaggttgcgcttgtaccgatgaagacaggcagcaagagtttagaagatgggcagcaaagttggctgaaagtgggatgggttcctattggggagctagacaagtgatgctggaggtttggagacgacggaaggacgacgaaccaggcgacaattggtactctatttataaagattgggaaatgaacctgatgttatcatga

SEQ ID NO: 1902 - DNA, 1365 bp, Saccharomyces pastorianus
atgacggaggacaagaagagcgaaatattgaaggaatttgaccctttgaaccaattggatcctccaacgatagccgaaacggataaggatgtggtgtcaaagaagaatgataacgcacaaatgaccgtcgaagcaaacgcggatgtctctgcgcgggacatgggcgaggatgagccattctatgacttccagctgtttgctaagcaacttcaatccccaggggctgatcctctagcaaagtatacaaaatcgtttctaagaaattttatggctcaaaggcttttatggacggtcactgaagaaattaaactcatcaacgatttcaagggttttatttacaacaagtttacgctatatgaacctttcaaaaatcttgatagccctaaaatcagaaacgccaaagaaggtatggaaaagctaattatgggaaagctttatttccgctgtttttcgccaagcctttctgaaactctgcagaagccattagacgatgagcacatgaaagatttgaacgacgacaagaaattattggaaaagactaagcattatagatttataagccccaacatgctagatatccctaacaccatgcccgatgccaagttgaataaatttgtgcatttagcaagttcggaattgggtaagataaacagattcaaatctcctagggataagatggtttgtgttttaaatgcgagtaaagttatatttggcttactaaaacatactaagttagaacaaaacggtgccgatagctttatacccgtattaatatactgtattttaaaggggcaagtgcgatatctggtctccaatgtgaactacattgaaagatttagatcgccagaatttatgcggggtgaagaagaatactatttgagcagccttcaagctgcagtaaactttgttatcaatttaaccgaatcttctttaaccattgaaaatcacgaatgtttcgagaaagaataccaagataatttgagagaagtagcaagggaaaaaaatgaagaggataagcaaagaaaactggaagtgccagatgaatcacaaatgaatggcactttactaaagcccttggatgaggtgactaatattgtaatttccaaattcagtggattattctcacctaccgaagaacgaacacaagaagaagtgttgaaacctaaacaaagcggtaaagaaccaaacgaagaggaagtttctctcctaatccagaagatcgaagagaacgaacggaaggacacactaatgactttacagaacatgtttcccgatatggatccaagcctgatagaagatgtttgtattgcgaagaaatctcgtataggaccttgtgttgacgctttactttctttatctgaataa

SEQ ID NO: 1903 - DNA, 636 bp, Saccharomyces pastorianus
atgaataatactgacccaacttcattcaaaagtatattggcaggtgtggccaagctaagaaaagagaagggcggtactgatgatacagggtctcagtcgcaggataaagagaccataccgccttctcaacaactacaaccgcaagagtccagatctattggtcaaaaccaggtcataaacgctttcaatcagcaaaagcccaaagaatgggccgattcagaaactacaaatgatgtcaatcgaaaaaggccctttaagagtgctggtccgggaaaaactgtgttagtcaacaccactcaaaaggaaaatccactcctgaaccacttgaaaagcactaattggaaatacgtatcttctacgggagttagtaagatatactacgattatatggtgcgcggaagaagtgtgctgtttttaactttaacatatcataaactatatgtggattacatttctaggcggatgcagcccttatctaagaatgaaaataatatactaatatttatagtagacgacaacaaccctgaggacactttgaatgacatcacgaaattgtgcatgttcaatggattcactttacttttagcatttaactttgaacaagccgccaagtacatcgaatatctgaatttatga

SEQ ID NO: 1904 - DNA, 2703 bp, Saccharomyces pastorianus
atggcaaagaagaagtctaaaagtagatccaagagttctagaagagctttagatgctttgcagctggccgagagagagattaatggtgaatttgacaattccagcgacaatgacaaaagaaatgacgctcgccgtaacggtactgttgtcaacttattgaaaagggcaaagggtggcgccgacagtgaagatgaagatgttgggtctgagtcatttgaagatgaagagttaaactccgacgaagctctgggatctgaggatgattatgacgttttgaactctaaattctcacaaactattcgtgataagaaaagcgaaaacggtgcttacgaggaggaagaagacgaaggtgggtacacttctattgacgaggaagacttgatgccattatctcaagtgtgggacatggataacaagaccgcgcaaagcaatgattttgataatgatgatgaagatgcttctccgcaattaaagttgcaagacaacgatgccagctctgaatcaagtagttcaggagaaagtgaatccgaagaggacgaagatgatgaagaccccttcgatgaaatctcggaagatgaagaagatgtggagttaaatacaattacttctaagcttattgatgaaacaaaaagtaaagttccaaaaagactggattcgtatggtactggcgaagctaacgagtttgttttgccttctgtaagcgcaaccagtggatcttctgggaagttaagtttggctgatatgatgaacgccgtggatgatagacaagtcattgaaaacgtgaatttgctaaagggtaaatcttccacttatgacgtccccttgccacaacgtatacaacaaaggcacgatcgtaaagccgcgtatgaaatctctaagcaagaagtgagtaagtggaatgatatcgtccaacaaaacagaagggcagaccatttaagtttcccattgaataaacccactgagcataatcaagcctcagctttcactagaactcaagatgtcgcacaaacagagttacaagagaaggttgaccaagtcttaaaggagagtaacttggtcaatccagaaaagaactccacttttgaagagttaagcactgcgaagatgacatctgaggaaatgagaaagaggaccaccgaaatgaggttgatgagagagttaatgttcagagaagagagaaaggctaggagattaaagaaaataaaatcgaaaacataccgtaaaatcaaaaagaaagaattgatgagaaatagagaaatggccgatatttccagtgaggaagataacgaagaccaggatgtcgctagagccaaggaaagaatgacgttgaaacacaagaccaattctaaatgggccaaagatatgatcaaacatggtatgacaaatgacgctgaaaccagagaagaaatggaagaaatgttaagacaaggtgaacgtctaaagacaaagatcttggatagaaatcctgacgacgataatgatgatcgtgtgcaaaccttgagtgatattgaaaatgaagaagaaaacaaagacgctgcacaattgaagggtaaggtgggcaagaccggggttatgaatatggcctttatgaagaatgcagaagctagagaaagagacgctaacgaagaagctttacgtaaattgagggctgttgaaaatggtggtgacattgaactttttgaaagtgacaaagaagaaacaaatggagaaaatattcaactaattaaaggtagaagaatatacacacctggtacattggattctaataaagagatggacgaactaaatgcccataccagaggagagcacgagattgacgaatctagaagtttggaaaacaggttaaaggccaagaacggtaaacaagcgaaagtctttaagactaatgcagaaggtgcaatgatcgtggaggaacctagtgatgaagaacccgttcaagatagtcaacccccacaggaagacgtcgaggcaaagaatgctaacccatggttagttgatgaaagtgatgacgaaagtgccatcagaaagcaatcctctaaagtcaccattgttgacaaagacagttccaaaaacgcaaaatccatgaataaaatgaataaatctgaattgaagcaaaaatcaaaaaagaaaggtggtaaatcgaacggcgatgaagatcttttgctaacagcagacgattccacaagattaaagatagtggatccatatggtggctcggatggcgaacaaggtggcaatgaatttatgtttaaacagcaggaggtcattgctgaagcgtttgctggggatgatgttgtagcggagttcgaagaagaaaagaagcgtgtcatagatgatgaagacgacaaagaagtggataccacgttgccgggctggggtgaatgggctggtgtaggctctaaaccaaaaaataagagacggaaatttatcaagaaagttaagggggttgtgaataaagacaaaagaaaggacaagagtctgcaaaatgtgattataaatgaaaaggtaaacaagaaaaacctgaaatatcaatcatctgcagtaccattcccattcgaaaacagagaacaatatgagagatccttacgtatgccgattggccaagaatggacatctagagcatctcatcaagagcttattaaaccaagaattatgactaaaccaggtcaagtcattgacccattaaaggcaccatttaaataa

SEQ ID NO: 1905 - DNA, 939 bp, Saccharomyces pastorianus
atgtcattaatagaaacatgtgtatcgttcgctttggcaaacccgctttattggttttgcactggactgctgctgaactgtgtgatcacaccattatatctttggaaaacacaagatagcagaatcgtaggcctatctttacttcattttgcagtgctttatgctatagcgtttataaccgtccgcacagaaagatccctttataaggataaatgggtagcgcttcccttggttaagaaagcccgtatttctcgtaatactagtttgtactgcttcaaactaaaatatccttttgaaacgttgcatattcctatgggataccatttggcagcaagggtaacaattaatggtgaacgattagtaagatactacaccccagtaaatgtccctaatacggaaggtttactagagttagtagtaaagacatacaaacacggtgtcgtttccaaatattttgacaaattgaaaatcggccagtatgtagaattcaaggggcctttaggtgaactcgaatatgatcaagattctgcgacagaattaggaatcatcgcaggagggtctggtatcactcccgtattacaagttttacaagaaattattccatcgccagaagatctaacgcatatttctttgatatacgcaaatgagacagaggacgacattcttttgaaatcacaactagaccacatggctaaagaatacccacatttcaaagttcattatgtggttcataagccgaacggcctatggaatggtgatatcgggtacgtgactttggaagaaatgaaaagatatttacccaaacaagcagaggatcaccgtttattgatttgcggaccaccaaagatgaatgaaatggttttgagctacgcaaaggagttgggctggagtaacggatttcacaaaggcaacggcagtgacaaagtttttgtcttttaa

SEQ ID NO: 1906 - DNA, 1581 bp, Saccharomyces pastorianus
atgtctgctatcccgtttaaaaggaactatgtgttcaagaattgggccggtatttactctgcaaaaccggaacgttattttcaaccgacttccatcgatgaagttgtcgagctggtgaaaaatgccaggctagctgaaaaaacattagtcactgttgcttcaggacattcccctagcaacatgtgtgttaccgatgaatggcttgttaatttggacaaattgaacacggtgcagaagtttgtggaataccctgacctgcactatgccgatgttactgtagatgctggtatgaggctttatcaattgaatgagtttcttggtgcgaagggttactccatccagaacttgggctctatctcagagcaaagtgtagctggtataatatccactggtagtcatggctcttcgccctaccatggtttgatatcatctcagtttgttaatttgactatcgttaatggtaaaggtgaagtgaagtttttggattccgagaacgattcagaggtcttcaaagccgctttgctttcagtcggtaaaattggtattattgtctccgctactgtaagagttattcctggtttcaatattaagtctactcaagaagtgattacttttgaagatcttttgaaacaatgggatactttatggacctcatctgaatttattagagtttggtggtatccttatactagaaaatgtgttttatggagagggaacaaaactgaaagtgcccaaaacgggcccgccaaatcttggtggggcactaaacttggcagatttttctacgaaaccctattatggatctccactaaggtttatgcaccattaacccctttcgtggaaaaattcgtttttaataggcaatacggtaaattggaaaagagttctactggagatgtcaacgtaacagattctatcagcggatttaatatggattgtttattttcacaatttgtggatgagtgggggtgccctatggataatggtttagaagtactacgttcattggaccattctatcgcccaagctgccattagcaaagagttttatgttcatgtccccatggaagttcgttgctcaaataccacgctaccttccgaacccctaaatacatccaagagaacaaataccagtcctggtgcagtctacggtaatgtttgccgtccattcttagacaacactccatctcattgtagatatgctccattggacaatgtcaccaatagtcagttgacattgtatataaatgctaccatttataggccttttggctgcaacaccccaatccataaatggttcacccttttcgaaaacactatgatggtagctggcggtaagccacattgggctaagaacttcctaggttcaaccactctagctgctggtccagtgaaaaaggatgctgactacgacgatttcgaaatgagaggaatggcaatgaaggtcgaagagtggtatggcgaggatctaaagaaattcagaaaaataagaaaagaccaagatcctgataacgtattcttggcaaacaaagaatgggctatcataaacggtatcatagatcctagtgagctttccaactag

SEQ ID NO: 1907 - DNA, 1950 bp, Saccharomyces pastorianus
atggtcttggcacaagtggctaccaaactgggacagcctataccgttggacacgcaacatgcagtgtccgtgtgctttcccacatggaagtccgtgattttgtatgaggaaaaggactccaaagttttaggggccctgaagtccggataccccaggttctggattcacccgtcaattcaaaagctgcgtgatatcttgatcgagaagtacgctaaggaaaacgagacctgtctttgctttccctcctatagagttgctaagcggtgcagagagtatataagaagcaagagcgcgcatcgcaatggcaaggtaaggatcttgcagttggccaccgcgaagcccattaacgaagagcagaagacgtggaaaagagagtgtaagatcgcggtggtgttcgtggacagtgcgtatgaaagcatactgagacaatactggcagttcacaggcgaaataatctccagccggttagccgagtatgttttgcacgagttgtttgtggtggagaagaagcccagtcccgcggaggaaaaggaatacatagagactcgttacggcaggaacttgaattttgcttttgcggatcgggccaaagagttgaccaagaagcggatcgccacgaaagtcatcgataaggatgagcatgacgaggaggaaaactatcactttttctctggcaaccctgacgaacagaatttccaggcaacgttcctggattcgtcgctcaacgaggctaatcacggggaggaccagggcagcggtattggcagcgaagaagacttcaacagcgagtcttacaatggtcttgtttccacaattcctccagaacccatcgaaatgagcacaatagacgaagagcaatccgtagaggaagatgcaggaaggtgtgccttaagggtttgccccgagagagacgttttcttgtttccgagcggtatggcggccatcttcactggacatagattactgttgcaatgggactcactgcggttgaacagagccagaaacgggaatgatcttacctcgtcggctcccaataagaaaacagtgatatttgggtttccttatgcggacacacttcatgtcttgcaagaatttaacgaaacgtacttcttgggggacggggacggttcttcgatgaatgaactaacgaagattttacattccggcgaacagatcctggctgttttcatagagaccccatcgaaccctctgttgaaaatgggcaatttagtagaactgaagagactctccgaattatttggatttttcattatcatcgatgaaacagttggcgggatagtcaacatagacggtctgccgtttgccgacatcgtgtgcagttccttgaccaagacgttcagcggggactctaacgtgatgggtggatcgatggttctaaacccacaaagccgggtgtacgactttgccactcgctttatgcaattggaagatgaatacgaagatttgttatggtgtgaagacgccatctatctggagagaaactccagggatttcatcgccaggaccatccgtatcaactataataccgaatacctcttggataagataataaagccgcacgtagggaaagatgcgctattcaagaaaatatactaccctaacttaacctccaaggagacactaactaactacgacatggtaagatgtaagaaagaaggcgggtacggcggcttattttcattgacgttccatgacgaagaccacgctgaggccttctacgacaacttgcaactaaataagggcccctcgctaggcacaaatttcaccctggtattcccctatactcttatgacatattaccatgaaatggccatggctgaaaagttcggtgtggagagaaatcttcttagaatcagcgtaggtctagagaaccaattgaccttggggaagatcttccaaaaggcaatcgaccaaacgctggcaatatga

SEQ ID NO: 1908 - DNA, 180 bp, Saccharomyces pastorianus
atgttgaaaagatttcccacccctgtccttaaagtgtattggcccttcttcgtggctggtgccgccgtctattacggtatgagtaaagctgctgatctctcttctaacacgaaggaatttatcaacgatccaagaaacccaagattcgccaaaggtgggaagtttgtggaagttgattga

SEQ ID NO: 1909 - DNA, 1272 bp, Saccharomyces pastorianus
atgactgaaccggtctcgagtaatactaataacgctctggtgcaaaaattgacaggtccgcagctttttgacaagattggccgtcctactaggattgttgcgccaatggtagatcaatctgatttagcatggcgtattttgtcaaggagatacggtgccactttggcgtacactcctatgttacatgcgaaattattcgcgacctcgaagaaatatagggaagataattggtgctccctagatggttctgaagtggatagacctttggttgtacaattttgtgccaacgatccggagtacctgttggctgcggctaaatttgtggaagataaatgtgatgctgtagatttgaatttgggctgtcctcaaggtatagccaagaagggacactatgggtcgtttttgatggaagagtgggaattggtacatggtttaattaacaccttgcatgagaatttgaaagtgccagtcaccgccaaaattcgtatatttgatgaccgtgagaagagtttaagctatgccaagatggtattagacgcaggtgctcagtttttaacagtacatgggagagtaagagatcaaaagggccaaaagacaggtttagcaaactggcaaaccatcaagtatctaagagatgaactgcccaaagaaactgtgttttttgccaacggaaatatcctatatcctgaagatatctcacgctgtatggaaaacattggcgcagatgcagttatgagtgccgaagggaatctttataatcctggtgttttcaacgtagaccacactcaggacaaggacaaggttttcccacgtgtggataaaatcatcagggaatattttcaaatagtcaaggattgccaagaatccaaagcctcgaaaacagcgatgaagtctcattttttcaagattctaagacctctcttaccgcaccacacggatatcagatctgatcttgcaaccatgaatgcaaaggccacctgggaagaatgggaggaaaaaatagtgatacctgtggaaaaagtggtggaagaaatatatcaacaaccagatatcgaggacaaggatgaaataactatcggcgagatgcaggcttggggcggttcgtacagaaccgtgccatactggagatgtcagccatattttaggcctgttaacggtatcactggtgataaaagagttatgcaaggcctgacagatgcagacatgaacaagaaacgtaaagctgatgtaccgctagaatcttctggtaaaacgaaggaagcaaaagcatag

SEQ ID NO: 1910 - DNA, 549 bp, Saccharomyces pastorianus
atgtttaaacgttcagtcattcaacaatctcgcctagtctccaactctgcttccagattgggcaagaaggtgttcttcgatccagctgtcaatggtacgaagatcggtagaattgaattcgaattatatgataatgtggttccgaagacagctgaaaatttcagagccttgtgtaccggcgagaagggctggggttacaaaggtgttcctttccacagaattatcccagatttcatgctccaaggtggtgacactgatttgactaacggatttgggggcaaatctatttacggttccaagtttgctgacgagaattttatcaagaagcacgacaaggcaggcttgctatcaatggcaaacgctggtccaaacacgaacgggtcccagttcttcattactactgttccttgttcatggttggatggaaagcacgttgtttttggtgaagtgaccaaaggtatggatatcgtgaaaactattgaatcctacggtactgcttctggtaagccaagagctgacattgtcattgaagacgccggtgagttatga

SEQ ID NO: 1911 - DNA, 480 bp, Saccharomyces pastorianus
atggggatatattcattttggatctttgatagacattgtaactgcatatttgatagagaatggacactggcatccaatagtgcaagtggtacaataaattccaagcaaactgaagaagatgcaaaactactattcggcatgatattctcgttacgctctattacacaaaaactatccaagggctctgtcaagaatgacgtaaggagtatatcgactgggaagtatagagttcacacatattgtacagcttcaagactatggtttgtattattatccgatttcaagcagcagtcttatacacaggtcttgcagtatatatatagtcacatttatgtcaaatatgtgagcaacaacctgttatcgccatatgattttgctgaaaatgaaagcgaaatgagaggtcaaggtacaaggaaaattactaacagaaactttatttctgtcttggaatcatttttagcaccaatggtcaatcaatga

SEQ ID NO: 1912 - DNA, 1578 bp, Saccharomyces pastorianus
atggaattagtactaaataacctcatttctgataagttatcaaaggaagaaaaagaatctggtctcgattttttgcagggcatcctgcagtctgatacaaaggattatgaaacttatttttcatctagggcagctcctggtagcattacagaagacatagcagaaatcgatgcagaattatctgcgcttgacagaaagataaggaaatccttgctggaaaataagtctcaagtcatcaaggatattctcggaaatgatgatagagttcaattggatgagatgtccaagtctttggaagaattgtgggagctggatacaagtatcagtaaaaacacagaggatgataccacgaataaagatcaacaaactaatgaagtggtttcccttgacgactttttagagcacaacaacgaacataatgatacgaataatgatggtgacaatccggcaagaaagaagaaagaagatgaatttcataaagcattgaacaggctaagaaacagactttcgactaaaggagatgacaaggacgagattcgatctgatacattggtcattgtacttgaaaacttggatagtatcacagacttgatggaactgccatttttggcgcgtacgtgtattagaacgggacactatcaagaagctgtcatgctatacactcacactatatcattgaggtcaaggttccccggttcaaccattgtagatgaaatatgtgaaaatgttttaaatgaaataagtactaccatgttaactggcctagtcaaattactgtccactaatgtatcagtcaattcattaaaaaagatattaaagtatctgaattccattcctccattcgatggcgagaccaataaagcactactaagtatcttcttagccataagatacaaattcattaccgatgagatagcatcatactccttggacatcgagtcttccaatgaatcattaattgaaatgatgatcaagagaaaaatcgaggttctcagggaacacgtatatatgtcgttaaatgttttcatcaaaacctttatgtatgatacaagtgatttggaaattccgttcccaatagaactcggaacttctgcattacaaccatacggaagtgagaaggatgagaaggatgaggaggaagttgaagtcaaagttgtagaaaaggcagaagggcaacttgaggaggttaaagtacaagaacaagaggaggagagggagagggagacagaagaggaaggaaagagcggggctatggcggctccagatgagtccagcgcgaataccccatcatttagaaaggaaagcaaaataccaacgaacgcgctcatgctgcagttcgtcgataagtgtgttacatacatattaaacgatctcactcgcggatcaagcgacgtcaaactaagcgactcagtttgtctgcaactagtgtactgttcattccgcctctctgacctaaacagaaactatcaccaccttttcttaaacaggattaacgaaacaagtctgtttaccaccgagcagctcgcccaagcgatcgataagagagcagaattggcctctaaatacgtatactcctaa

SEQ ID NO: 1913 - DNA, 1665 bp, Saccharomyces pastorianus
atgagtaccgattttgatagaatttatttgaaccagtccaaattcagtggtagattccgtattgctgactctgggttaggatggaaagttagcactagcggaggttccgcagccaaccaagcaagaaaaccattcctattaccagccacagaattgtctaccatccaatggagcaggggctgtagaggctacgaactgaagataagtacgaaaaatcaaggtgttattcaactagatgggttctctcaggatgattataacctgatcaagaacgactttcaccgtcgtttcaatattcaagtcgagcaaagggaacattcattgcgtggttggaattggggtaagactgatttggctagaaatgaaatggtctttgccttaaatgggaaaccaacttttgaaattccttacgccagaataaataatacaaacttgacttctaagaacgaagtggggatagagttcaatatccaggatgaagagtatcaaccggctggtgatgaactggtggagatgagattctacgttccaggtgtaattcaaacaaacgtagacgaaaatatgaccaaaaaggaagatccaagcgatggagtcatgcccaagaaagaggatggtgacgaaggagaagacgcggaaaaagcagtggaggagaaaagcatggctgaagcgttttacgaagagttaaaggagaaggccgatattggcgaagtcgctggtgacgcaattgtctcattccaagatgtctttttcaccactccaagaggccgttacgatattgatatctacaaacactctatcaggcttagaggtaaaacttatgaatataagttacagcatcgtcaaatccaaagaattgtttcattaccaaaagcagacgacattcatcacttgctagtcttggccattgaaccgcctttacgtcaaggtcaaaccacatacccctttcttgttttacaatttcaaaaggacgaggaaactgaagttcaattaaatttggaagatgaagattatgaagaaaactacaaagataaattaaagaagcagtatgatgccaaaactcatatagtaataagtcatgtacttaagggtttgactgaccgtagggttatcgttcctggagagtacaaatccaagtatgaccagtgtgctgtttcatgttcctttaaggcgaacgaaggttatttatacccattggataacgcgttcttcttcctaaccaaaccaacattgtacataccattcagtgatgtaagtatggttaatatttcaagagcaggacaaacctctacatcgtcaaggacatttgatttggaagtagtattgcgctcgaacaggggttccacaacttttgccaacattagcaaggaagagcaacaattattggagcatttcctaaagtctaagaatttgagagtgaagaatgaagacagagacgtgcaagaaagactacaaaccgccttgggttcagacagtgacgaggaagatattaatatgggatccgctggtgaagacgacgaatctgtagatgaagatttccaagccagctccgataatgacggtgaagaagttgcggaagagttcgattcagatgcagcattaagtgatgcagaagaaggtagtgacaatgatgaagaaagaccttccaaaaagcctaaagtagagtag

SEQ ID NO: 1914 - DNA, 1395 bp, Saccharomyces pastorianus
atggctgtgactcagtttgaagaagatttgggattattaaaagatatgtacccggagctggatatgaagttggagagagggagtaacagtactgaatttccgcacctactaagtgataagttgccgttcaagatatccctattaaacgatataaggattaagttcggcgagcaagatttgctactatcaaatttgtctaatgaatgtctagagtttacaatatattaccgtcgatatccagacattcgacagtgtgttattatggacgtcaaatcattgtggatgtcagtggacgaaaagaagatgctgatcgataaagtgttagaacttgtagaagagactgtagacacgaaagcggagtttgaggattcgtttacatcaattctaattctgatcttcggattctttatagatgacacagctagaatactgtttcctggtaatgtaaaaaaatgtgtgacccaggaacagtatgaaatattcaaggagataagtgaaaaagctacccttgaaaaaataagtaggtctaactaccactgctgcatttgtatggagatggaaaagggtatcagaatgataaaattaccatgccagaataaagatgcagatcactttctttgcaggaaatgtgctaagtcttattttactgcaatgattgaagaaggccgaatattaagcgtgagatgtccagaatgtgaatatacggaactaaaattggataattttaaaaactatgcaaagatgataaaaattctatttacgcctttgattccagcttcctttttaagaaagctcattgacacagaactatgtgaaagatatgagagactttttcataaccaggcagctacaaaactttcaaagcattgtccgtacgcttgcgttacatgccgaaggtgtgaccaatggtgcataaaggaggaccttgacgatactatggttcagtgtcaaaaatgccattttgtattttgttttgattgcttgcatgcctggcatggttataacaataaatgcggtaagaaagttacaatctcaagatgcattatcgaagagtatataaacgatactgatacttcgatcgaaagaaaacgtgaactggaagttaaatatggaaggagagtgttagaattggaagccaatgactatattgctgacgagatgttgaatttggccattgaagaggaaggctcgaacttacaaaggtgccctaagtgtagagtggttgtggagaggagtgaaggctgcaataaaatgaaatgcggagtgtgtggaacattattctgttttatttgtggagacttgctttatcccgatgacccctacgaacatttcagagaaagattttcaggttgttacggacgattatttgagggtatgcccggtgcagaaacttga

SEQ ID NO: 1915 - DNA, 1110 bp, Saccharomyces pastorianus
atgtttttccccaaacgattgattgtatgggcggtccttttggttttaagcttatcccaatttttactctatttgccaactacgacatgtacaacaagtaaagggcttcgactatgtgccccacagtttactataactgtcattgggggatcaaacacggctaatgagtttattgcaagtgtaagagagtttttaagattgatttcatacctaacgattgacatgggttggtcaaatgagttaaccgatccaagcgtatatgaggatgaaaatttagtagacacgtttcaacctgataaagtctttgagcttaattattttgggttttgtaagcggagtaatagaagtaaaatctactgtacttcaaatgagaattacgggatggacgtacttgaagtactggtccgggatgttggaatccaattgggtaatatttctacaacacgatcgaatgaaacaaagaagtttggtgactctctggtgttaacgtaccggttggcactgacatctattcgagatttcctgaaacatgacaaacatagcgggaacgctctgtcaaaggccttgattggctcacctgatcctaatgcaaaggatcaatcgccaacaaaaaattacttgaagggggttaatctggcatatatattaatggtgtttaacggcatggtgttctaccttgccgtcttagagattatagtcggattcctcagtatctgcgtcgtgtcagcctttggaggtgctctcagcgttggaaagcgccatcgcttgtttcctatccttttgaagttttcaagctcaatattagtaactctctctaccctgacgttattatgtaacgtcatatatttgattgcactgaaaactttggaacccgatgacgtatccgtggtagaactggaccgttctctcccgcatactacaggttgggaattgctgcaagttaacgtgggaagcgggttcatcgtggggcttgccagatacgctattcagtgggtactactgctacttgcatttcttgcggcaaaccattacaaggccaagtccaagaagtctgataagtgcacagaggacgagtctatccccacttctcccgattccatggagaaatga

SEQ ID NO: 1916 - DNA, 2778 bp, Saccharomyces pastorianus
atggcaaaaacactaaaggatctccaaggctgggagatcataacaactgatgagcaagggaatataatcgatggaggccagaaaagatcccgccgaaggggtgctcgaactgaaaatttcctaaagagaatttctgatggaaccaaaattggccgtggtgatagtgttgttatgcataatgaggcagcagggacatactctgtttatatgatccaggagttaaggcttaatacattgaataacgtagtcgaattgtgggctctcacctatttgagatggttcgaagtcaacccattagctcattacagacaatttaatcctgttgtcaacatactaaatcgtcccctgagctactataacaagaagttttctgaaagtgcaaataaaaatgaactatatttaactgcggaattagccgaattgcagctttcaaattttatcagggttgcccatatcgtagatgagactaaatggaatgaaatgaaggatggtatcgatacagaaaaagactttatggttcgttatatctgtgagccgaccggtgataagtttgtaaatattaatatcgaggatattaacgcttatgtaaataagctggaaccgaaggaggcccaagagtatttgaaagacctgacattgccatcgaaaagaagagaaaccaagacagggtcaccaagaagaaagaaaagcaaaacttctcgagctgctcaaaactcagatgatcaaacaggggaagcaaatacaaatgataaagataatagcgataatgataaagaactttctgataatcaaagttcgtcggataaagaggataatgttcagagtaatgaagatatgagtagctatgaggtatcagcggacgaacttgaagaagaggaagaggaagaggaggaagaggaggaagaagaggaggaggaagatgaagaagaagaagggaattctcgtaggaagtcatcaaggcaaagtaaggtaaagttaatcgacgatgatgcggacgttttggcacaacaagcgccgaaaaagagaggccgtaaacctaaggatcccaacaagccacgtcaaatgttactgatatcttcgtgccgtgcgaataacactccagtgattaggaaattcacaaaaaaaaatgtcgctagagctaaaaaaaagtatacccccttttcgaaaagattcaaatctattgcagcgattcctgatttaaccacactaccggaattttatgaaagctcatcaaaattaacagcatcgagctttgaaaataaactaaaaactacccaaaaacatcaaattgtggagacaattttttccaaagtcaagaaacagttaaactcctcgtatgtcaaagaaaaaatattagaatcgacaaatttccaagattacttgccagctagggaaaatgaatttgcctccatttatttaagtgcatacagcgcaattgaatccgactctgctaccactatatatgtagctggtacccccggtgtgggcaaaactttgaccgtaagggaggttgtgaaagagttgatttcgtcctctgcacaacaagaattaccggactttctttatgtggagataaatggattaaaaatggtaaagcctacagattgttacgaaactttatggaacaaagtctctggtgaaaggttgacatgggcggcatcaatggaatcattagaattttatttcaaaagggtacccaaggataagaaaaaaacgatcgtggtcttactggatgagcttgatgcaatggtgacaaaatcccaagatattatgtataatttcttcaattggactacttacgaaaacgctaagcttattgtggtcgcagtggctaatacaatggatttacctgaacgtcagctaggtaataaggttacatcgagaattggattcaccagaattatgttcactgggtatactcacgaagagttaaagaatattattgatttaaggcttaagggactaaacgattcatttttttatgtcgatataaagactggtaatgcaatattaatggattcagtcggcaatgacgccacagtagaacaaacattacctgaaaatgtaaaaaaaattcgtttaagaatgagtcccgatgccattgaaatcgcttcgagaaaagtagcaagtgtcagcggtgacgcaagaagagccctaaaagtttgtaagagggcagcggaaatcgcagaaaaacattacatggctaaacatggttacggttacgatggtaaaatggttgttgaggatgaagattatagtcaaatgcatgatggtgaagacgaagatcttgtcgcaaacgacaaagccaacaaagatgatgacgatgaagacgacgatgaagtacagacagttcacataacgcacgtcatgaaagctttgaacgagacattgaactctcatgcgattacatttatgacaagactctcattcacggcaaagctatttatttacgcattactaaacttgatgaaaaaaaatggatcccaagaacaagagctgggtgacattgtcgatgagatcaagctacttattgaagttaatggtaacaacaagtttgttctggaaataacaaaaacgctgttccaacagggaagcgaaaatatatctgaacaactgagaattatatcatgggatttcattctcaatcaactgcttgacgcaggcatcttgttcaaacaaaccatgcagaacgatagaatatgttgtgttaagctgaacatatcagtagaagaagcgaagagagccatgaaggaagatgagactttgagaagtttatag

SEQ ID NO: 1917 - DNA, 738 bp, Saccharomyces pastorianus
atgtctacaccaagcaccggaggaaatggttctatccctgcagtacggaatcaggtagaggttcaagtgggactagtaggggatgcgcaggtcgggaagacgtcgttgatggtgaagtatgttcaaaatatatacgataaagaatacacgcagacgctaggtgtgaactttctaaaaagaaaagttagcatacgctcaaccgatattatattttccataatggatctgggaggacagagggagttcattaacatgcttccaattgcgacggtggggtcctctgtgatcatcttcttgtttgatttgacgcgtccggaaacgctgagctcgataaaggagtggtatagacaggcgtatgggctgaatgactcggcaatccccattttagtgggcacgaagtacgatttactcatagatttagacccagagtatcaagaacaaatctcgagaacgagtatgaaatacgcacaggtcatgaatgcaccgctggtgttttgttctacagccaagtctataaacattcaaaaaattttcaaaattgcattggccaagatctttaatctgacgttgaccatcccggaaattaacgaaatcggtgatccacttttagtatataagcacctaggtagccagcaacgtcgacatcatagtagtagccaggatagaaagagtaataacatgagaaactcctcttcttcatcctcctcgaaggcaccttcgcccggtgtcaactcatga

SEQ ID NO: 1918 - DNA, 768 bp, Saccharomyces pastorianus
atggctgttggtaagaataagagactatccagaggtaagaagggtttgaagaagagggtcgtagacccatttaccagaaaggattggttcgacatcaaagccccatccacttttgaaaacagaaatgttggtaagactttagttaacaagtccactggtttgaagaatgcttccgatgccttgaagggtagagttgtcgaagtttgtttggctgacttgcaaggttctgaagaccactctttcagaaaggtcaagttgagagttgatgaagttcaaggtaagaacttgttgaccaacttccacggtatggacttcaccaccgacaaattgagatccatggtcagaaaatggcaaactttgatcgaagctaacgttactgttaagacttccgatgattacgttttgagaatctttgctattgccttcaccagaaagcaagctaaccaagttaagagacactcttacgctcaatcttctcacatcagatctatcagaaaggtcatttctgaaatcttgaccagagaagtccaaaactccactttggcccaattgacttccaagttgattccagaagttatcaacaaggaaatcgaaaacgctaccaaggacatctttccactacaaaacatccatgttagaaaggtcaagttattgaaacaaccaaagttcgacgttggtgctttgatggctttgcatggtgaaggttccggtgaagaaaagggtaagaaggtttctggtttcaaggatgaagtcttggaaactgtgtaa

SEQ ID NO: 1919 - DNA, 1131 bp, Saccharomyces pastorianus
atgtgttataaatttggcaaacttgccgttgataaaagtgagctttgtttggcgaatgtgttacaaggtggccaatcttttcggtggatctgggatgagaagttaaatcagtacagcaccacaatgaaaataggtaggcaagaagattattcagtggtaattttaagacaaaaagaagataaggggcttttagaatatgctgctgttggcgaccatggggaccaggacgctttaaagtcacattttatgaaatattttaggttggatgtctcattgaaacatttatttgataatgtatggataccaaatgacaaaatgtttgcaaagctgtccccacaaggtattcgtattttggcccaagaaccatgggaaacgctgatttcctttatttgttcgagtaacaataacatttcgagaatcactaaaatgtgcaacagcctttgctctaattttgggaacttaatcacgaaactagatggcgtcacgtattattcctttcctacaagtgaagagctagctacaagggcaactgagactggcctacgtgatttgggctttggatatagagctaaatatattatcgaaactgctagaaaactagcaaaggacaaagtcgactctggtattgcaagcgatactgagtatctacaaaagttgtgcgaagatgctgattatgaagacgttagagagcatctcatgtcctacaatggtgtgggccccaaagttgccgattgcgtttgcctaatgggccttcacatggatggtattgtacctgttgacgtccatgtaagtagaatcgctaagagagattaccagatatctgcgaataagaaccgtattaaagaactgagagcaaagtacaatgttttaccaattacgagaaaaaaaattaatccggagcttgattatataaggctgatgcttttagagaaatggggatcgcatgctggttgggcacaaggtgtcttgttttccaaagaggttggaggtaccagtggtagtactacaagtggtgaaataaagaaaagaaaatgggattctttagaagagactgagcaaacaatcacaaaacaagtgaaattgaaagtagaattgagtgaaattcacattaaggaggcgaaaatcgattag

SEQ ID NO: 1920 - DNA, 321 bp, Saccharomyces pastorianus
atgcaaaattctcaagactacttctacgcccaacgcagcaactcacaacagcagggacaagctccttccactctgcgcaccgtgaccatggcagaattcagaagagtgcctttgccacccatggccgaggcgcccatgctgtcttcccagaactccaccagcagctctgcttctgcttctgcctcgtcactggaaatgtgggagaaggacttggaggagagactcagctccatcgaccatgacatgaacaacaacaaatttggctccggtgagctgaaatccatgttccaccagggcaaggtcgaggacatggacttctaa

SEQ ID NO: 1921 - DNA, 1776 bp, Saccharomyces pastorianus
atgctaaaaatcaaacctctattgagaatctcgagagtccccgaggcggccaccctcagaacctccaggactagattaaacacggctcgctcttacagttctgccgtgggcaagtctaagtcgttccagcaacattcaggaaaacgcacacagtcatggactactttgagcgttgggaccatcttagccgctgcaggttcaatggcgtatttgaactggtctaacgaccagataggcaacgacccaaaactagacatgaacaagcagaaaatttcgcctgcagaagttgctaaacacaactctgctgacgattgctgggtcgtgatcaacggttatgtgtatgatctgacgcggttcatacctaaccatccaggtggctcggacgtgataaagtacaatgctgggagagacgtcactgccattttcgagccattacatgccccaaacgtcatcgataaatacattgcccctgagaagaagctgggaccactacaggggtccatgccaccagaactggtttgcccgccttatgctcccggtgagaccaaagaagacattgctaggaaagagcaactgaaatcactactacccccactgaataacattattaatctttatgatttcgagtacttggcctctcaaactctaactaagcaagcttgggcttactactcctccggtgccaatgatgaagtctcgcacagggaaaatcataatgcgtaccataggattttcttcaagccaaagattcttgttgacgtaagcaaagtggacctctccacggacatgctgggctctcatgtggacgtcccattttatgtgtctgcaacagccctgtgtaaactggggaacccactagaaggtgaaaaggacattgcaagaggttgtggccaaggcataacgaaagtcccacaaatgatctccactttggcgtcatgctcacccgaagaaatcataagtgcggcgccatctgatgagcagattcaatggtatcagctgtacgttaactctgatagaaagatcactgacgacttggttaagaatgttgaaaaattgggcgtgaaggcactgtttgtcacagtagatgcgccaagtttgggccagagagagaaggatatgaagttgaaattctctaattcaaaggctggcccaaaggcaatgaagaaaacagatgtagaggaatctaaaggtgcctcaagagcgttgtccaagtttattgacccctctttgacgtggaaggatattgaagagttgaaatcaaagacaaacctacccattgtcatcaagggtgttcaacgcaccgaagatgtcattaaagcagctgaggttggtgtgagtggtgtggtgctatccaaccacggtggtagacaattagatttttcgagagcccccatcgaagttttggctgaagccatgccagctctggaagaacgtaaattgaaagataaactggaagtgtacatagacggcggtgttcgccgtggtacagatattttgaaggcgctctgtctgggcgctaaaggtgttggcttgggtagaccattcctttacgccaactcatgctatggtcgtgacggtgttgaaaaagcgattgaaattttgcgtgatgaagtcgaaatgtccatgagactcctaggtgttgccagtattgcagaattgaagcctgagctgttagacctgtcgacattgaaggcaagaacggtggcagtgcccaacgatgtcttatataatgaagtttacgagagccccactttaacagattttaacgacgcatga

SEQ ID NO: 1922 - DNA, 558 bp, Saccharomyces pastorianus
atgctatcatactatgaacataatactgcgttccaaacaaacaattgcagttccggcaacaatgccgccgccacatataatggcaacgccaataatgattcaatcgtaaataaaaggaataacgaccacttcgagtttgacacacacactttttaccaaaggcccaagagaagcaagcgagataccgcaagcacgaggcctccctcaaatgccgcggctgtccataacaataatactactactcataataatattcaatatcagaaaaatatcgaaataacacccttgacgcccgtcaacacgcctcacagcacgaacgcctctctactcaacgagtctgaattttactcggaaacggaagaatacatggtccacggttatttcggtaacagtagtcatggaataacaggcgcggcttccagcggaaatactagctccacacaacaccagtgtcacatcctgcccgctcaacatataattgcatcacaactacctagtaacaccatgaatacgttaactgacaacaatattgctaacgactacatggacatcgactag

SEQ ID NO: 1923 - DNA, 912 bp, Saccharomyces pastorianus
atggttaaggttttgaatatagcgctgcgtttgttggtattgctgtttttggcaggtaacaccctgctgttaattcttatgattatatctggtgctacggaccactatcccgtgaacaggttctactggatacagggaaacaccacgggcattcctaatgcgggagccgagacccgttggaccttctggggcgcctgtctgcaggacaccgatggctcagacacctgctcgagcaatctggcccctgcctaccccatctcgcctgtagacaacttcaacacgcacgtcaacgttcctcatcagtttatttcgaaaagagacgccttctactacctgactaggttttccttttgtttcttctggatcgcgttggctttcgtgggtgtgtctttcgtcctttacattctgacttggtgctccaagatgctatcgaacatggtcgtcgtcctcatgtccttcggggttgttttcaacaccgccgcagttgtcctgcaaacagctgcctcagtaatggcaaaaaacgccttccacgacggtgaccgtagcgccaagctgggtgcctccatgatgggtatggcatgggcaagtgtctttttatgtatcgtggagtttgtctcgcttgccgttttctttgtcaaatcaagactcgcttccgactactccatcgataatacaagatacaggacatcctccaaatggaaccccttccgcagagaaaaggagcaagctaccgatcccatcctgactaccgctcccgatgacgttcaacaaaatgcaagcatagtggggccctcttctaataccaatgcggtcactgcgactgctgctacggaaaaccagccgcaacctaaaggtatcaacttctttactataagaaagtctcacgagcgtccggacgatatctctgtctag

SEQ ID NO: 1924 - DNA, 1308 bp, Saccharomyces pastorianus
atggactataacaagagatcttccgtctctacagtacccaatgcagcccccataagagtcggattcattggcctcaacgctaccaaagggtgggcgatcaaaactcattatcccgccatactgcagctatcgtcccaatttcaaattactgccttatacaacccaaagatagagacctccattgccactatccaacaactgaaacttagcaatgccacggccttccccactttagaatcatttgcatcttctgccaccgtggacatgatagtgataaccatccaggtggccagccattatgaggttctaatgcccctgttgaaatactcccaaaataatccgaatctcaagtatcttttcgtagaatgggcccttgcatgttctctggatcaagcagaatcgatttataaggcagctgccgaacgtgcactacaaactattatttctttacaaggccgtaaatcaccatacatcttgagagccaaagaactaatttctgaaggttacattggcgacatcaactccatagaaattgcaggaaacggcggttggtatggctatgaaagacccatcaaatcgcccaactatatttatgaaatgggcaatggtgtagatctggtaaccaccacatttggccacaccattgaccttttgcagtacatgacgagctcgtatttttctagaataaacgcaatgatgttcaataatataccggagcaagagttaatagacgaatatggtaaccgattaggtcagcgagttccgaagaccgtacccgatcacctattatttcaaggcactttattaaacggtaatgtacctgtatcgtgtagtttcaaaggtggtaaacctaccaaaaaatttaccaaaaatttagtcatagacattcatggtaccaagggcgacttgaaacttgaaggcgatgccggcttcgcagaaatttcaaatctggtactttattatagtggtactagggcaaacgacctgccgctagctaacggccagcaagctccaataaatccgggctacgattccggcaaagagattatggaagtttatcatttacgaaactataatgctgttataggtaatattcatcgactgtaccaatctatctctgatttccattacaatacaaagaaaatccccgcactgccctcacagtttgtaatgcaaggcttcgaatttgaagggttcccgactttaatggatgccctgatactacaccggttaattgaaagcgcttatagaagtaatatgttgggcactacgttaaatgttagtaatatctcgcgctatcctttatga

SEQ ID NO: 1925 - DNA, 1887 bp, Saccharomyces pastorianus
atgacagatgaaacaaacttcacaatagaagtgatcgagcctagggcagatgcccttcgaggtctagactccctgttcctacaagataatgcagcactagtgcagacttatcgcaacatggactggtcagatatttcctcattaactcaaatggtagacgttatagagcaaacagtagtgaaatatggtgatccaaatgattcaattaaattggccttggaaactatcctttggcaaatattaagaaaatatcctttattgtttggattttggaaaaggttcaccacaatagagtaccagttgtttggccttaagaaatcgattgaagttctcgccacttcggtcaaatggttcccaacttcactagagttgtggtgcgattatttgaatgtcttatgtgtgaataatcccaacgagaaggactttatcagaaacaactttcatatcgccaaagaccttatcggtgaacaatttctgtcacatccattttgggataagtttatagaatttgaggttaggcaggagaattgggagaacgttcaaacaatatacgagtacattattgagattcctttgcaccagtacgcaagattctttacatcctataaaaagcttcttaatgaaaggaatttcaaaccgaagagagatattgatacagtattgagaaggacacaaacaatcgtaaatgagatatggcagtttgagtcgaagatcaaacagcccttttttaacttaggccaagttctgcaagatgatttgaagaattggtctcagtatctgaattttgtgacgaacccttccaaatccctggacaaaaaattcataatgtccatttttgacaggtgtttaattccttgtgtttataatgaaaaagtgtggctcatgtacattaacttgctaacaagggaagattcatacgagataacagtggggatttatcaaaaagcaagcaaggtattaccgttagacttcaaaactttgaggtacgattttatcaaatatttgaagaaaaactaccgattaaataacgttctattcagcaagatattcaatgaaacggtatcgcattttttaaatatttggcccaatgatatttcgcttatgacggaatacatttgtatgtggaagagacactctttcaagaactctttagatcaaccgccaagagaaattctagagaaacaaacttcgtttgctaaaattttagagacttcaatcaccaattatttgaccaagcaaactgaccccagagtacatttacaaacgttgataaatgataaaaacttaagtatagtagtggtagaactgataaagaccacatggttagtacttaaaaataacatgcaaacgagaaagtatttcaacttttaccaaaaaaattctctcatcaaggactcagtgccgttttggttaacttattacaaattcgagaagagtaatgtaaattttactagactgaataaatttatcaaggagctgggcgtagaaatatatttaccgacaacgataatgaacgatatcctgacagactacaaaacattttacttaatgcattcaaatattgttgcatatgaaacttcaactttggattcaaacgatttcgatcctattttatatcctgaaatgaaaatctcgaatccacaatacgaaccagtcgcgggagtaaagccgaatgccgaatggtataaaagaacagaatggaaagaagctggtcacgtcgggataatgatagaaagaccacagatatcgaacagtataattgagtgcaattcaagaaatttagttcaaaagcctattacgttaccaaattttagaaacctggagaaaataaaccaggttaaaattaatgatttatatacagaagaatttttaaaggaaaggaaatga

SEQ ID NO: 1926 - DNA, 1542 bp, Saccharomyces pastorianus
atgtttgaagtccctataactttgactaataagaagtttgctcaaagaaggaagttgaaatatcaatacataaatcacctctctagaagatttgacagaatcaccaagaaaattaatactacagacagcttgcccacacccgaaaattccgcagctgaaaacaatgacgaagactatgaagatgatgaagaagaacgaaattatgaaagtgatgttggtgaaagctcggtacggcagcagacgaaaagaagaagagaaagacattggaaaagtgtgattggggagctctattctagtacagaaactgaatccgactctcaagaggaggacgttcaagaaggtgatcaagtcgaacatgagactagaccaaaggaagaagatactgatgaggaaagaaaattttggaaaaaatacgaaaagcccgaaaaaagttttgaagtttggcaaacggtgtcttcacaaaacagaagccccattaataaacaaataataacttatcataatttcaaaaaaattgaaaagaattccttaaggaaaatggaaattccgcttttgcattgtacgaaggaaaataaactctattttcagctcttagccaaaggtttagaacctttacaaagcccaacatctgcagcgagaaactaccaaacaagacatataataacattgaccaatcttctgcatttgaatgtatcaagacataactggcctcttgcatataaaatatttgccacattgataagaattccgaacgtacggatcaagtctatttggggtattggcgttaagatactagataactcgccaaattcgtcaagtagtcttgactttctaaaatggatgtgtcaagtttattcatccaagtcaagattcgttcaaaacgtcaactaccgttccgttgtcccccctttccaaactggttctagaacacatacatcaaaatttgccattacctacttatggtcctctttaattaattgtcaaaaagcgatagaatcgtcaaacgttaccgataatcaatatgaagtggaaaatagccgactagaagaattgatagacaagatatcagaatgggtattgatccctccatttatggaagacgccgaggtttattttatctatgcatcttgccatttactaaaagccgatattttatccaggcaatttgtcaatgataacagaaacagcgacctagttgggctgaataaggacataaatatcaatcaagtgataaagcatatacattatgttaaggtatttttacaaacatgtttggaaaaaggcggatttacaatcccaagtagattgattgaaaatcaattaaaaagctttgagtcaagattgtacggggaagcacacgatatacgtgagagagaaatggtagatgattatggtaacacggacaacagttcagcggataattcattcggggacgtgtatgaaactaatgcagagtttctagatacacaattaatggatttaccaccgatagaaaatgagatggccgagaatcattacagcgatgaagactcaagcgagtga

SEQ ID NO: 1927 - DNA, 2013 bp, Saccharomyces pastorianus
atgaaaatctgtaacttgggagctttagcaaacccgaaacatcttcccataatatcaaggagagcaatgcactcagcaactgtcaactactcctctcaacaggttcaatttcccatggagacaaacaatggggaacactattgggcggaaaagccaaataaattttaccaggagaaaagaccgaatttccagggcgctacttttgctaaacaacaagatttaccgtcattacctgtgccagagttaaattccacccttgataagtatttacagacaattcgtccattttgcaacgacgtggagacctttgaaagacagcagttgttatgtaaggacttcttggagaatatggggcctgttttacaaaatcggttaatggagtactctagtgataagagaaattggatgtccaagttttgggacgatcaatcgtacttgcaatataacgatccaattattccgtacgtttcttatttctactctcacaaaccactacccaatcatttatccaaaatcgataacgatcctttagttaaagccactgcaatcatatcaacagtagttaaatttattgaagctattaaagacgaatctttacctgcagaaactatcaaaggcacaccgttctgtatgaatagtttttcattgatgttcaataattcaagattacctggtaacccacaggataaccaagatacaaacattttctactcaatttatgaaaacaattttataactgttgctcataaaggtagattttacaaattagtgacccacgatggtgataaaaaaccgctttcggaaaacgaaatttggaaacaactgtattctgtagttttccaaggatcacagcccggacccaagctaggaggtgttggttctttaacttctctgcctcgtgatcaatggcgtgaggtttatgtagacttggtgaaagaccctatttctcaagattcattagaaacaattcacaaatcttcctttatgctatgtttggatcttgatcaatctcctgttactttagaggaaaaatccaggaactgctggcacggtgatggtattaatagattttacgataaatctttacagtttctagtcactggtaatggttcatcaggtttcttagctgaacattcgaaaatggatggtacgccaactttattcatgaataacttcgtttgtcagcagttaaagaaattaaatgcaaatgaatttttggaaaaagtgtttacaccatcaggcaaagcaacatttaaacctatggaattaccgttcacgatcactccacaaatcaacaaggccattgaatctgctcaatttcaatttaaggaaacgatgaatgagcatgatttacgtgtctggcactacaacaaatttggtaaaacttttataaagaatcacggtatgtcacctgatgcatttattcaacaggttattcaattggctgttttcaaatacctaaaacgtccgctacccacctatgaggctgcgtctacaagaaaatatttcaaaggtcgtactgaaactggtagatctgtatcaactgcttcttcagaatttgtttctaagtggcagaacggaaatatctctgacgctgaaaaggttcaggctttgagacgtgctgccaaggaacattctcactatttaaaaaatgctgcaaatggcaatggggttgaccgtcatttttttggtttgaaaaacatgatcaactctaatgacaaccaagtcccaccccttttcaaagattcattatttaatttctcttcaacttggttgatctccacatcgcagctatcatcagaatacttcgatggttatggctggtctcaagtatatgacaacgggtttgggttagcatacatgcttaacaacgactggttgcatattaatatcgtgaacaaaccagccaagagtgggttaagcgttaataaattacattattatttatcccaagctgcagatgaaatttgcgaggctttggaaaaagaaaacaaactaaaagcaaagttatga

SEQ ID NO: 1928 - DNA, 843 bp, Saccharomyces pastorianus
atgaaaacactagttgaagagattgataaaaggacatataatcccaattcgtatttcacatcgttggaccctcaagcacgtcgatatacttctaaaaaaattaacaagcatggcacaacatctacgtccaggcccgtaaaacgcataaactattcgctagccgatttagaggctaagctctacacttccaggccggacggtgatgctaataatatcagtggacaggatgatcgaaaaggtaagaattcgaactcatttgaggaaagatatacaccgcaggagcttctccagtcgaacaggaggtttatggaactgaatacagagaacctgtcagatttgcccaatgtgccaactttattgagtgatctgaccagcgtaccacgagatagaatcgaatcgaccacgaaaccaatctcccagacttcagacggtctctccgcattggttggtggtgcatcttttgggaaagagcactccaagtacggtcatggttgggtactgaagccggagactttaagggaggttcaattatcttataagtctacaaaactacctaaaccgaagagaaaaaatactaatcgtattgtagcattaaagaaagttttgagttcaaagagaaatttgcattcgtttctggattcagcccttctaaacatgatggacaggaatgttatttatcataacgtttataataagaggtatttcaaagtcttgcccctgattaccacatgctctatatgcggaggttatgacagtatttcgagttgtgttaattgcggtagtaagatttgttctataagctgttttaaactgcataatgaaactaggtgcagaaatagatag

SEQ ID NO: 1929 - DNA, 1326 bp, Saccharomyces pastorianus
atgaataagactctcttctttgcatttctgttcggatggtatttctgttcgataacactctccatatataacagatggatgtttgatccgaaggacggattaggtattggataccctgtcttggtgacgtcgttccaccaaactatcctatggttactgtccgggatgtatatcaaggttagacatacaccagtgaggaatataatgagacgagataataaagtcaactggagttttttcctaaaatttttagttcctacagcaattgcttctgcaggtgatgtggggctcagtaatgtttcgtttaagtatgttccattgacggtttatactattatcaaatcttccagtattgcctttgttcttttatttggttgcatcttcaaactggagagattccattggaaattggctattgtggtaactatcatgttcggaggtgtggcattaatggtttttaaaccaatggacccaaagagtgctgaaaatgaccaggccttgataattttcggcagtttccttgtcttggcaagcagttgtctttccggattgagatgggtttatacgcagttggtattaaggaataatccacttcaaaccgacgtggtagccgtagaagaatctaatgataccctcttcgcggtaaacgaggaaaatgcggatgatgaacctattgttaatcccgctaataacaagatgctagaaaactcaagagggggcaagccacacccaatccatacgatataccagttggctccgataatggcaataactctgttacttacatccttactcgtggaaagaccatttcctggcatatttcattctagcttatttaaatttaacgtcggaaatggcagtggtgatacagaaacaagtattgtgtccatcgcaaagggctttgtcttaatgattttgccaggctttgcagtctttttgttaacaatttgtgagttcagtattctagaacaaacacccgtattgactgtatctattgctggtatcgtaaaggaagttttgacaattatatttggtatgattattctttccgaaaggttaagcggggtttataattggttaggtatgctgatcattatgatggatgtttgctactataattatttcaggtataaacaagactcaatacagaagtatagactaacttcagctgaagatagcgacaaagaattagaggggcttcaaaccttcgaacacttaggaagcaaaaaaagtgcaccttattctattactgttgacttaacaaaccaagagtatgagcttgatatgattgctcaaaacgctagccattcatcccagcaggtctga

SEQ ID NO: 1930 - DNA, 1410 bp, Saccharomyces pastorianus
atgaacgataccatggacatggacgaaaagaagcccgtttttgggaataattccgaggatatacaaaccaagttggacaagaagctgggccctgagtatatttccaaaagaattgggttcgggactagcaggatcgcttacattgagggttggagggtgattaatttggcgaaccagatctttgggtataatggctggtccacggaagtgaaaagcgtgattgttgattttttggacgaacgccagggaaagtttagtataggttgcacagcgatcgttcgtgtcacattaaccagtgggacttacagggaggatattgggtacggtactgtggagaatgaaaggaggaagcccgcagctttcgaacgggctaagaaatctgctgtcacagatgccttgaaaaggtctttgagagggtttgggaatgctttggggaactgtctttatgataaggatttcctggcaaagattgataaggtcaagttcgacccgccagattttgatgaaaataatttgtttaggcccactgatgaaatcagtgaaagctcaagatcgaatactttgcacgaaaatcatgaacaacaacaatacccgaataaaagaagacaattgactaaagccacaaccgctagtgtggactcaaagagtaatctggtgaagctagaaaacaacgccgacaagggcgggcctatgatggatccaccaacgggcaccaccaataataatagcaatcatcctaaaccctctgacgcatccaaacaagatcaagatgatttactggatgactctcttatgttcagtgatgatttccaagacgacgatctgatagatatgggtaatacgaacaataatgtattaccaaccgacgcagatccgctgttggctaagcaaagctccaatccaaactctaattcagaggcggataaaattacatttgtcactgctaaggcggcaacctctgttcagaatgaaaatcatattggtgatgagaacatttttgacccaaaatatcaggctcagtccatcagacacaccatcgatcagactacgtccaaacacgttccagcaagtgcaataaaggataaagcgatgaatagttcgagggattctgtttatgaaaagtttgcgccaaaaggaaaacaaataaacatgaagaacaatgacaaagaactaggcgcaaatgtgcgagaaccaagtggaaatcaagtaccgcaagaaattgcccagaataaatcaaatactgtcaccgctgcgcctgctaccaccactgctccacggtttgcgccaccttcaaaggtagtacatcccaacgggagtggcgcagtagctgcgcttccgccgcaaagatctacgagaagagaagttggcagaccgaaggttattccattacatgcacgcaagcctagttga

SEQ ID NO: 1931 - DNA, 480 bp, Saccharomyces pastorianus
atgtcgcgtataccttctagtttcgacttcacccaaagggatttggatgaaatgacctttggtgaaaggattgtttatcattgtaaaaagcaaccattggtacccattggatgtctactgacgactggtgcggtcattctagcagcccaaaatgtccgtcttggtaataaatggaaggcccagtattacttccgctggcgtgtgggtctacaagcagctacattggtcgcgctagttgcgggttcgttcatctatgggacttctagtaaggaactgaaggcgaaggaggaaaaattgaaggaaaaggccaaaatgagagagaagttgtggattcaagaactggagagaagagaagaggaaaccgaggctagaaggaaaagagccgaattggcaagaaagaaaactttcgagaacgagaatgaaattaaaggcttggaaaaggagctaagtgacctgaaaaacaagcttgggaagaaatga

SEQ ID NO: 1932 - DNA, 1152 bp, Saccharomyces pastorianus
atgatacatgaaacaaaaatgctgccttcattatccacacttctatcgggcaccgagatttcgtctactcccgtgtcaccaagcttcatcaatccaagaacaaactttcatctggatgaccgcggggccataaagctgcctccgctaaacaccactataagtcgtccaagatctgtggaaagtgccttgagacacacagtcactgcgcagaacaaaaccatcaagccctctggtgacaatctgctcaagcacacgcaatcagactctgccttgtcgtcccaactgactagttcacaagaaaccgtcgatgaatcgcaagaaagcctgccattgactccgctaaacaacaaaaagagaaattatccagtttcttcaaagaaaaacgatatattaacaccgctctctgcagtaaagtcgatcataatcccatcctcctcccaagataaaagacgtgcgtttgcgttcatcacacattctcaagagaccttccccaagaaggaacccaagatcgataatgctcctctagcgcgccgaaagagaagaagaacttcgttccaggaattgtcaatccttcaggctgaatttgagaaatgtccagccccaacaaaggagaaaaggattgaattggctgaccgttgccatatgactgaaaaagccattcaaatatggtttcaaaacaaaagacaagcggtcaaaaggcaaagaatcgccacttctaaatcaaccactataatacagacaatatcgccgccatccccacctctggatgtccatgccacaccattggtatccagggttagggttgaggtactccatgatgaagagtcgtcgtcgtcatgttcttcgccattggaaagcacgccaccaagaccccgtcattctttaaataggcgctcatctacacccaacacgaaaagaagccaggctttaactttccacttgaacccacagaagaaaacactgactccggtgaaaacgtctcccaatagcagagttaacaaattgatcaatagtgtagaccattctccatccaaaatcaaacgctacgtaaataactcttcttcttcccccaaaaggaaaagaaagttcgggttcaaaattgtcgatcaacaaccgctaagagaccttgatccaaatgcattccatggttga

SEQ ID NO: 1933 - DNA, 564 bp, Saccharomyces pastorianus
atgtccatagcaagttacgcccaagagttaaagctagccctacatcaatatccaaactttccaagtgagggtattctatttgaagatttcttgcctatcttcagaaatccaggccttttcaagaaactagtggatgctttcaagctgcatttggaagaagcgttcccagaaactaaaatcgactacatcattggtctggaatcccgtgggttcttgtttggcccaactctagccatggctttaggtgtcggtttcgttccagttagaaaggcaggtaaactgcctggtgagtgtgcccaggcctcgtacgaaaaggaatacggtactgacgttttcgaaatgcagaaaaacgcaattccagtaggttccaacgttgttatcgtcgatgacatcatcgccactggtggctccgcagttgctgctggtgaattggttgaccaaattggtgctaacattttggaatacgacttcgtcatggaattggatttcttgaagggtagagataagttgaatgccccagtgttcactctattgaacgctcaacaggaggctttgaagaaatga

SEQ ID NO: 1934 - DNA, 2025 bp, Saccharomyces pastorianus
atggtcacgactccatacacatcttccccaagaagtagtctgaaatcctcaaccacttcgctgcgctccatacgaacgcagtctgaccgtttgggccccaacgagctagagcataagccaactaaatcctggtccttatggggtaatagcgaagaaggagggccaggtccttccaaagaaactcaaggggagggaacccgtgatagtggctgtcaggtagctgcttctgttgtaaagaagggcaacagcttgcacgggaaccaacactcgacgatcataaaagaaactggcaaggttgaggaaggtgagaacaacaagaataacaacgaagtaaccaacgaaacaaatgcgaaagcaagaactactgcaaaaactagaacgtggccattcttttggggccaaagcaaaaaggatccagagccaacgcacaacattcctactgatggggatgctagcaccttatcacgtctagcaaatagcttaaatcctgctcctctaaccaacacttatataccattcaaaccggacgccatactgattaaggaggaaaatgtcaaaacaactaaaaagttgactgatgatataggaaatcaatttcccaacattgtggtaccgagttttgatattttgcctaaacaaacaatatggaacgccattacatcaaccgttcaaaagtggaagaccgaatactgggatagcagacctctacaaaaacaagattcgtcaagggtacgaaaggaggaagaaggggctcaacacccacaggatcagttgaaagaggaaacgaattcagcggcaaaagaggcaaaagatgatgagcttcaccagcataccagagaaactttgtatagagtagacccatggaagaaaatcaatcttttatcggattaccaatccagacctattagagtccttattgtcggtgttcatgggttctttccaacaaaaatcatcagaccgtttattggtgagccgacaggtacgtccaccaagtttgttacagaagctgaggaaatagtgaaagactatttttcccagcacaatgtacctattgaaataaataagattgctctagaaagagaaggggagatctttgacagagtagattttttctatgaagttatgaaacattggagcaaagaaattaataattcggacttcatttattttgtaagtcattcccaaggttgtccagttaccattatgcttttggccaagctgataaaaaatggtataataaaccttgataattcccagtttttcaatgatgaaattcagttttgctcgtcgaaaaaagtcatatcgatcttggctatggcaggaatcaataatggtccattctatggggccgatcaaactttattcgttcgtgcttaccaaaccatcgagaaagactccttgagagagctatttgaatttcagaagttcgattctaagcaatcgcaaagtctcatagaggggctaagaacaattatatcgagtaatgtgaaaattacattcgtggggtctattaatgatcaactggtacccctgtattcatccatatgtcttttcgcgaatcatcctaatatatttcgagcaatttttatagataaaggttcacagacaccagcattcatcactcggatagttaagatagccggttctttattggacttgggttataacgatcatggaattattaaggaaataagcggatctctggcgggcaccttaacaggaggtggtcattccaccatttataacgagaaacaagtctaccacttgggtatcaaatttgcattagaaacaaccgatttgtcagaaatatctcccgttgaatactcaccatataaactgtctgaattaggagctaatccgtatcgattgccatggtgtatgagaggattaatgtacgaatccaataagcatttcgataatgaagaaattaaaatgttattcaaggagtttgaagaatgggaaccggaaaccaaacaattgaaagatataaaaaacagacttaacggtttgaaatatcgactttga

SEQ ID NO: 1935 - DNA, 999 bp, Saccharomyces pastorianus
atgaagtggtacagcgcgagctttattctttggattgttcttatattccaaaagcttcaaatttgttcagcaactgtatccaatagtatagatgatattctacaattgcaagatgagaacggtgtgatatcggtgacagctgaaaactactcaatgctaagccgtgcctttccagattattataatgtcttgtacatcaccatgagaggtacgaatagtaagggcatgggttgtgaattatgctatgattttgagagaagttatcatacagttgccaatgctattcacttgcaggcaccacaatctttgagtttgttttttacagtagacgtcaatgaagtaccacaattggtcagggacttgcagttaaagaacgttcctcaccttgtggtataccctcctgcagaacccagcaaacaagctgattttgaatggaaaacgtcacctttttatcagtacgctttggttccagataatgcaaaggattctttgaaatttggtgatttcttagccaaaatccttaacatctcgataactgttcaccaagacttcaacgtccaggaattcgtctattattttgtcgcatgtatggcactttttattttcgttaagaaggtgattcttccaaaaataactaataaatggaaattcttctgtatgatattatcattcggtttgctttttccaagtatcactggttacaaattcacagaaatgaatagaattccctttattgcgcgtgatgagaagaatcgcataatgtactttagtggcggttcaggatggcaatttggtatagaaatcttttctgtatcgtcaatgtatatcgtgatgtcctcattatgtgtactgttaatttgcctgcccatgacttcacgtataagcgaaaagatgaggggactactggcgccattcttagcctgtgttttgttctatttcttttcgtatttcattagttgctatttggtcaagaatccagaatatccaattattttttga

SEQ ID NO: 1936 - DNA, 1182 bp, Saccharomyces pastorianus
atggtgtcaaaggatcaaacgtcttttaacaaaagatggacgttgggtctcctgatgttgggcttagtcattgttttatgggttctatcgtctttcctgataagcttgatcttcgaggacgactcctacaggaagccgttcttcatcacgtatatcaataccgccgcctttatcttttatctgttccctactgcaaaggcgatcatggggaactacaaggccacaggacacgcaaacgtccatcgcgagttgatcatggaggaggaaggcgctgatggcgatgatagcctcacagtcaacgcgaacagccccttactgacgaaccttgaagcaggtacgcagccaactcagaagccgaggctcacgctctatgaaacaattaaactaagcgccgagttctgtatactttggttcacagccaacctcgtgaccaatgcttcgctagcattcacatcagtggcatctcagacgattctttccacgacctcttcgttcttcactctctttataggtgccatctgccatgtcgaatcactgagcaaatccaaaatactggggtctttcatttcatttatcggtatagtcatagtcacgaaatcagactctcgtcatcgctacaagactggtattgcggatgtcagcggcgatgagaacgacgccgtacggcttttactgggcaacttgttagcgcttgcgggtgctgttctttacggtgtctacagtacgttgttgaaaagagaagttggggacgagtctcgtgtcaacatgaagattttctttggctttgtcggcctctttaacctgctctttctatggccatcacttatcgtgctggattttttcgggtgggaaccgttcgagctgcccaaagaccctaaagttatcataatcatccttgtcaactgtctcatcacatttgtcagcgatttctgttgggcaaaggctatgctgctgaccagtcccttgactgtcaccgtcggattgagtataaccataccattggcaatgtttggtgacgtactattcaagcacaaaaccatgtctgtagtttatttattcggtgctaccctcattctgggttcatttttcatcattaacaagagctcagaagaagaacattttgaaaactcggtaacagcaagcacttatgaggcaatggaacaaccagtgacaaataactga

SEQ ID NO: 1937 - DNA, 1041 bp, Saccharomyces pastorianus
atgaatgaaccacaaggtcctctggacatcattcccaaagtgaactatccgcccatactcactatagccaactacttctctacaaagcaaatgattgaccaagtcatcagtgaagaccaagactacgtgacgtggaaactgcaaagcttgagaactggtggcgtaccaatggacagccaattaaacaaatacccgaaatacaaatacaagaaagccaagataagccagcaagatgcggactccatcaataaggttccagaaaatctaatcttcccacaggacatcttgcaaacgcaagcgaaaaataacaatcgcgaaaacgccaacggcatcgatgatagcgacgaaaggctctcacaggacgaacagttcaaacttttggtgaccaatctagataaagatcaaaccaatcgcttcgaggttttccatagaacatccttaaacaaaacccaggtgaaaaaactggccggcacagttactaaccaaaccataagtgaaaacattcgtgtcctcttgcaagccataggaaagatatatgccggtgagataattgaactggccatggcagtgaaaaataaatggctgacaagccaaatgtgcatagagtttgacaagaggactaaaataggctataagttgaaaaagtacctgaaaaaattgacttttgctatcatagagaaccagcaatacaaacaagactaccaatccgatagtgtgcccgaagacgagcccgatgtttactttgacgatgaggaagtggacaagcatgaaaccacattgggtaactcgttgttgcagtccaaatccctacagcagtcagaccaccattcccaggacttgaagctacaacttattgaacaatacaacaagctcgttattcagttcaataagctggacgtgagcatcgaaaaatacaacaacagccccatcctgcccgagcacatccgtgaagcgtggaggctgtaccgtctacagtctgacactctgcccaatgcctactggaggacccaaggcgaagggcagggctctatgttcaggtag

SEQ ID NO: 1938 - DNA, 1791 bp, Saccharomyces pastorianus
atgccagcagtcagtcacgagggtaacgagtttcacctctcgcatacggaggaggacaaattgaacgagttccaggtcatcacggatttccccccagatgacttgccggacgtggtgaagctgttaaggaaccacggttggcagctggagcccgcattgagcaggtatttcgacggggaatggagggatggctccgaggacgggatgggagagcccactgccacagccacgcccattcccacgcccatggcagaggagttggcgtggactccgcccgtgttgggtcccaggcctctatcatttacagctgcattgcccgtagtcagaccattgccagcgagcttccgtcatgattttagaaccattgggctgaacggacgctccaataccgtatggtccatgttcgagtccttcagttacaacggtaacccctttctttttgttttgctgctgatcccgcggattatcaacaggctatcagccaccatattcacgtttctttgcactctgttgtctttgcattcgattggcagtgaaggcaatgcaggcaagcccaggatcgccaaagtccctaaagcgcccacaagagaaacgcaaatccccatttctgaaatactgggcgacactaaggacgccgacgaattttgccagttaaaaagcttcgatccggatgtttcctttaatgaggtactacgcattgcgaaggaggagttcaagttcgtactgctcgtcctagtgggcaatacgtgcgacgacgaccacgacggcgacactaccgccacggatgttaactccaagctactattgaaaaaaattctgctgaacaaaaagactttacagtacctgcacaagatcgatgatgacttggtgatatacctgaagtgcgtccaggagctggaaccttggttaattgctcagcaattggaggtcagaaacaccccggagatctttctcattgccaacgtctccaacaagatttcccattcagagactgtgcccttgcaaaggctctctattcttggcaaactgaagattaactcgctaaacaagtttctgcagtcgttgaccaatgtggtggaaagatacagcccagagttgattgttaacagaactgaaatgaatgagctacgcgtgtcaagagaaatcaaaaaattacaagaggacgcgtatatgaaatcattagaaatggacagactcaaagccctggagaaggaaaaaagcttgaagctggtccaagatttgaaattggacgcaactagccaccaactaaactggctgaaggcctgcattgacgaactccagcctttagatacaacagcaaagcagacgactctgcagttcagaacctccagcggcaaaaggttcgttaagaagtttccctccatgaccacgctttaccaaatctaccaatccatcgggtgtcacatgtacctcgaagtgtactctagtgaccccgcacaatgggccagcgccctccaggaaaagatcagccagttggccgcagacgctgccgtgctctgcttcaaggacgagcagcccgatacaagcaccgcagctaccattgaagggcttggcgacatcatcagtaacgagcttgcttccttcgatcttgaacagggcaaactccaattcgacttcgaactggtgtcgccctaccccaagtacaccgtgcatcccgacgaaaagctttcggtggaccgggtgcctcaactatggcccaacggcagtcttctagttgaagctctcgttgaagaagaagatgatgatgatgatgctgacgacgacgaataa

SEQ ID NO: 1939 - DNA, 636 bp, Saccharomyces pastorianus
atgcaggtgttacaatttttgttggcggctttggtctccttggtggtggccgtacagggtttgcatttcgacattgcagcatctacaagcccagagttggtttgtattcgtgatttcgtcaccgaaggccaattggttgtcgtggacatccactccgatggttctgttggggatgggcagaaactgaaccttttcgttcgtgattctgttggaaacgagtaccgcagaaagagggacttcgctggtgaagtccgtgttgccttcactgccccatcctccacagcatttgacgtttgtttggaaaacgaggctcaataccgtggccgttctttgagcagggctattgaactagacatcgagagtggtgccgaagctcgtgattggaacaggatcagcgctaatgaaaaattgaagcctatagaagtcgagctacgtagagtggaagaaatcaccgacgaaatcgttgacgaattggcctacttgaaaaacagagaagaaagattaagggacactaatgaatccactaacagaagagtaagaaatttctccatcttggttatcattgtcttggcatcgctaggtgcttggcaactcaattatttgaaaaactacttcaaaacaaaacatatcatctaa

SEQ ID NO: 1940 - DNA, 534 bp, Saccharomyces pastorianus
atgagcaagtccagtagtgttagctataaaagagtagagctgttcgaaaacccgaaagtacccagcgaagtggaagacgaaatactggaaaaatatgcggaatctagtttggatcacgatatgactgttaatgaactaccgatatttttccaggacttacaactggaacccacaatttgcaaacttgtgaggaacgaagaagttgtcattgagggcactgaggtgatagattttgcgaaactgatacgatgtacatgccaattactgatactaatgaataacctaacagtgatagatgatatgtggtcgatgctaattaggagttgcggcagagatgtcgatttcccccaagtagcgttgagagatcacgtaataagtgtaaaagacctacagaaaatttccaatctcatcgggactgaccagagcgaagggaccattgaaatgattagctctgcgactgacgggaagaggcttttcatgacgtatttagactttgcttgtgtattgggcaaattaggatacttgaagatgtaa

SEQ ID NO: 1941 - DNA, 108 bp, Saccharomyces pastorianus
atgctacgctccattcttatcgtcttacgaagcatgcgttttatgcgaagactggtgaagaatctccatctcttgcttccgataacttattcgcttccttttatatag

SEQ ID NO: 1942 - DNA, 1920 bp, Saccharomyces pastorianus
atgagtgtttccgctgccaagaggtcgttggacctcgtttcttcaaattcgctagcgcaatccgacgattcggtgtctcgccatgacgagatggagaatgaccacacacatgatgatatgcatgataatgatgacagcgatcaaccaaggaggaagggcagtaagacgagcaagaagcaagatttagacccagaaaccaagttgaagagaactgctcagaatagagctgcccagagagcctttagagagcggaaggagcgaaagatgaaggagttggagaagaaggtgcacagtttagagagtattcagcaagaaaatgaagtggaggccactttcttaagggaccagctggtcacgcttgttggcgaactgaaaaaatatagaccagaaacaagaaacgactcaaaagtccttgaatatcttgcaaggcgagatcctaatttacactcaccaaatttcaacactaaaaataacagcgagtcaattgtaacccctaacgatgatatacagaaaaacgtcaaacaaaaaatgaatttcaattttcagtatccgcttgataatgatgataatgacgctaaaaatatggaaaagcaattaccgtcgccaaatgatccgaaccattcagcccgcgtgcccatagcgcaaacgcaaaagaaattaagcgatgcgacagattcctcatcggctaccttggactccttctcaaataataacgatgctctgaatattaccccaaactcctcttcttcgatcgattggctagataatgtgatgtatacgaatagacttgcaacaggcggtgaccagaaaaatgcgagtaatgaaagcaagagtaaacccaaaggcgttgacagtaacatgttttccaatgattttaactttgagaatcagttcgatgaacaagtttcggaattttgttcgaaaatgaaccaagcttgtggtacgaagcagtgcccgattcccaaaaaaccagtagttcaattagacaaagaggtttttacttcgtcttccgtattaagtgcaaattctccggttttaacaaatacttgggattctcattccaatgttgccaccaacacccctgctattactactaatggaagttcgttttcaagctttggtcagccagggttcgatctcactactaatctttatgctatcaatgataatcacactgacaacagtgacaacaataaaactaataattacaacgacatacttccattcatatccgaatcccccttcgatatgaatcaagtgactaattttttcagtccaggatcaaacaacaccactaacgcaaatattactaataatcataacccaagtctccagcaaagtactaaagacgacataccttttatcaacacaagtctggctttcccagacgataatccaactaatattcaattacagcctttgtcacaatcacaacatcagaacaagttcgattatgacatgttcttcagggattcttcaaaggaaggtaacaatttatttgaagaattcttagaagatgatgatgatgataatgatgatgacgataatgatggtgaagccgtgaatgcatcggatgatgaatcaaaccttatcaagaacaaattaattaacgaagaaccacaactgcaaaatcaatgtcccctatcaacaccaaaaaatggaagtggagctctaaagaaccaaaatggcagtaatagagaggacgttaacgaaaacgatagcgatgttgttccatcgaaggaaggatctttactaaggtgttcggaaatttgggatagaataacgacacatccaaaatactctgatattgacgtggacggtttatgttctgaactgatggcaaaggcaaagtgttccgaaagaggggtcgtcatcaatgcagaagacgttcagcaggctttaaataagcatatgaactaa

SEQ ID NO: 1943 - DNA, 2328 bp, Saccharomyces pastorianus
atgcaaaagtctgttagagttggtgactattttgataatgatgataatggtttatggtcgtggtatctaacgaatctaagattgggtgatttcgaggaactcataggtaatcaactaaagtatactttattaaaaagatttctaaatagtcatttttatggcgataacaacacttcgattagaccaaacaagaagattttattggtttccatacctgagaatgttcatgaagatatttccatattagaaatttttcttaaagattacttccatctagaaaagttagaacatattcaaatttcaaaattgactcactctcattgttataatcatgaaaaccactacttattaacggactatcttaacaatttccaagatccctcttttttagaatttgcaagtacgagttggcaagttcaaaaaaatccgaagtcttcgaataataacaataataacagacatttaatacatgcttccacagcatcttcatcaaagccatcaaatgcgcaattaaaaacaaacactttagataatcaattgttagatacaaatacacagaattcaatgactgcacgaaccaatacaaacacaaagactttaacatatacagatacggctgattcaagtctcacgccagctgaatgtaacaacaaagacgataacaatatgccccagaataatgaaaatgaaaatgaaaatgaagaagaggatgcaggggacgacgcagccagttcaatagtactgaacttttcccatccacggacactagcgtcaaaggcaaataaagtaccaaaaattttcccatcgtatactaatgaggattataacccatcgcattccgagatagtatcgatagatagttttgctggcgaagacgtatcatcaacatatcccggacaagatctgagtttaaccacggcaaggcgtgaggataaagacgatgaagaccagaactcaaatggctccgatgatgaaagctttgaagaaacaagctcgagtgtagaaagttctgttagctacaccaactgcagtagtagcagtgacagcagcattgttcgctatcattttagcaccggtagtcgtggtagtttgggacgtggagatgttgatcataccaatgctacctatatttctgaattatcaagcataaccagctcaatagaaaacgtaactaattccactactccagaggaagaagaccatttggttggagataattatgaagctcaagattatttatcgggagaggaagatgaggaggaggttgatgatgatgaggatatctcttcttcagactactctgtattatccattctaccatcgatctcaatctgcgattcgttaggatactttaggctagtcttgcaatctattttaatccaaaatccagatacgaaggagattttcaccgcaattagacaatcaaataatgaacctacagtggcaagcgttactgatgattggctattgtacgattcaaaattttcgatgaataatttacaaattttaacacttcaagacttgctcgatatcaagagatcattccccaagattctgctctatacaatggttatcgtaacagattcaggtccacaacaaatagaagaagagcataaaaatttaactcaacaacacaacgatgtagatgtaacgaaggaagaacctctaaattcagaattatcattatctaacgacccacaacaatatttcccaactacattcgatgacgactatgacgaatacatcgatgatgacgatagtggtgacgatgcttcattgtcagaacagtcaggtccacaaatgtatttgccaactagaatggcatctaacgtcactacagcccatcgttctataagaactgttaatagtatcggagagtgggcgttcaatagacacaattctgtcactaagattaataaaagtaacagtaacgaatcagataatctaaaggaatacggggataaaatttcagcggttgatccatatccaatgacccaattgtcaaactctaacacagttacgtcaaattttagtcatttgttaaagaataaaaattcttacaaacgtaaccctaaaggtaacaatgaaatcaattctaggaacgaactaaaaaaaatcaaaagttccattaatgctatgagtgcagtggaaagatccaaaagtttaccattacccactttattaaagtctttaagtggtatagacaatcataccaatggtaataataaggatacaaaacgttggaaatttaagatgaccaggtttaggaataataaaagcaatggctctacagatatggataaatctcaacgttgtgccatcatgtaa

SEQ ID NO: 1944 - DNA, 627 bp, Saccharomyces pastorianus
atgtcttctagaaaaaagaatattctgaaagtgatcatcttaggtgactctggcgtcgggaagacctccttaatgcatcgttatgtcaatgataagtattctcaacagtataaagcaacaattggagcagattttttaacaaaggaagtgacagttgatggtgataaagtggccactatgcaagtttgggatactgctggacaggaacgtttccaatcactgggtgttgccttctatagaggcgcagattgttgcgttttagtctacgatgtgaccaatgccagctcgtttgaaaacatcaagtcttggcgggatgaatttttagtgcatgccaatgtaaattcaccagaaacatttccatttgtcatactgggaaacaaaattgatgctgaggaatccaaaaaagttgtatcagaaaagtctgctcaagaacttgccaagtcattgggagatattcctttgttcttgaccagtgccaaaaacgccattaacgtggataccgcctttgaagaaattgcaagaagcgccctacaacaaaatcaagctgacacagaagcttttgaagatgactataatgatgccattaatatccgcctcgatggagagaataattcttgtagctgttaa

SEQ ID NO: 1945 - DNA, 2118 bp, Saccharomyces pastorianus
atgtcgttgggtcctcttaaagctatcaatgacaaacaattgaatacccgttctaaactagttcacaccccaattaaagggaatgctccagacctcgcaggcaaagaaaatcacttaaagcaaacaaagaggctggatccaaataatgacaatcatcaccaaccagcacaaaaaaagaagagagagaagttatctgcactatgcaaaaccccaccttcactaattaaaacaagaggtaaggactaccatagaggtcattttcttggtgaaggtggctttgctcgttgtttccaaatcaaagatgactctggtgaaatattcgctgccaaaacagttgctaaagcttcaataaaatcggaaaagacaaggaagaaacttttatcagagattcaaattcataaaagtatggctcatcctaatatcgttcaattcgttgattgttttgaagatgatagcaatgtttatattttattggaaatatgccccaatgggtcattaatggaactattgaagagaagaaaagttttaacagaaccagaagttagatttttcaccacacaaatatgtggtgcaatcaaatatatgcattcacgaagagttatacatagagatttaaagcttggtaatatcttcttcgattcaaattacaatttaaagatcggtgatttcggtttagcagctgtgttggcaaacgaaagtgaacgtaaatatactatatgtggtacacctaactacattgctccagaagtgctaatggggaaacattccggacattcatttgaagtagatatctggtctttaggtgttatgctttatgctttgttgattggtaagcctccattccaagcaagagacgtaaacactatttatgaaaggattaaatgtcgtgatttttcttttcccaaagataagccaatttcagacgaaggtaaaattttaataagagatattttatctttagatccaatagaaaggccctctttgacagaaatcatggattacgtatggtttagaggaacttttccaccatccataccttcaacagttatgtccgaggcatcgaatttcgacaatattccagaagagcaatcactaattaatttcaaagactgtatggaaaaatctctattattggaagccatgagtagcgataaaagccaacgtcaaaagagggactatatatcgtcaatcaaatctagtattgacaaattagaagaatatcaacaaaatagaccatttttacctcactccttatcccctggcgggaccaaacaaaaatataaagaagttgttgatatagaagctcaaagaagattgaatgatttggcccgtgaagcaagaatacgcagagcacaacaagccgttctaagaaaagagttaatagccacatcgactaatgtgattaaatcagaaatctcgctaagaatactagccagtgagtgccatcttaccttaaatggtattgtagaggcagaagctcaatacaaaatgggaggtcttccgaaatcaagactgcccaaaatcaaacatccaatgatagttaccaaatgggttgactactccaacaaacacggtttttcttatcagttatcaacggaggatattggcgtcttattcaataacggtacgacagtcctccgattggcagatgcggaagaattctggtatatcagttatgatgatagagaaggttgggtagcaagccactatttactgagtgaaaaaccacgcgagctaagcagacatttagaagtagtcgatttctttgccaaatacatgaaggctaatttaagtcgtgtttccacttttggtagagaagaatatcataaagacgacgtgtttttgagaagatatacaaggtacaaaccgttcgtcatgtttgaattaagtgatggtacttttcaatttaactttaaagatcatcacaaaatggcaatttccgatggagggaaattagtcacctacatctctccatctcatgagagcactacatatcctttggttgaagtgttgaaatatggtgaaattccaggatatcccgaaagtaattttagagaaaagttaacattaataaaggaaggtttgaagcaaaaatctacaattgttaccgtagactga

SEQ ID NO: 1946 - DNA, 465 bp, Saccharomyces pastorianus
atggcgcgttcaagaggatcatctagatctatgtctagaccaagacaaacccaaaccagatccgcctccacgatggcggccccagctcacccacaacagcaaccaaatgcttactcacaccctcctgctacgagttcgcagacaaagcaaccaggtatgtttgcgcaaatggcctctactgccgccggtgttgccgttggtagtaccatcggccacactctaggtgccggtattacggggatgttttccggatccggatccgaaaccgctcctgttgagcaacaacaacaaaacatgagcaacgcctcaggtcagacccagatggaccaacagatgggaagaacctgcgagttagacgcaagaaactttacacgttgtttggatgaaaataatggaaactttcaaatttgtgatttttacttgcagcaactaaaagcctgccaggaagctgcacgtcagtattaa

SEQ ID NO: 1947 - DNA, 612 bp, Saccharomyces pastorianus
atgtcgttgtctttgttcagcaagtttgttttacagaaatcaccaggcagaccgacgctggggctaggacggttcgtatctttgccgtatacttcattgcttaaacggcccgatgctcccagtttatatgcacatagatatgtacatagtacacaaacgaaaagccatttaaactttatattaaacaataatgatatgatttctttccaaaaatttacagtgaaaatactaaaggagcagtgcaaatcaagggggttaaagttatctggtcgcaagtccgatctattacaaagacttatcacatatgattcccgttcacatatgagaagtaacgcaaaaccacaaaatgaaccccccaggagtctatttgtagacaaaccaataaaagttaatagtacattgctcagtgaaaaaatccctaaaataattgacaaaaagcatttctccatgcagaaagtatctaatgtccagtctccttgcgaagttcatcaacattttcaggatgcaaacttacaattaagagataggatttttttaataggatttgttatggtatcgtgtctttggtggaacctcgaagctcaggaatctaaacctaccattgatcactaa

SEQ ID NO: 1948 - DNA, 1536 bp, Saccharomyces pastorianus
atggacaactacgaagatgctgacccctggaatgccaactcgaatgcgtggaaaaaggacgatgattccattgcccctaccacgaatggtgatcctgctttcagaaggatctccagtgagtttaacaccttgaatttgtcaacatctctagacacaaacgacgaagatgacggatttttgccggctaatgatgtactagaagaaagcatatgggatgataatagtcatgctctaaatggagccggcacaaaccaaacatccacgataagcgctaatgaaacggttataaaccagaatgatcccgagcatttagatcgagacgataccgacaatgacctattcgattggaccagcaagatcagaaagacgtatagacctttgaatgccgatattattatcattgaagagatccctgagagggagggtttactatttaagcacgctaactatttagtaaaacatttaatcactctaccaagtagctcgccttctgaagatcgtactgtagtaagaagatattccgattttctttggctgagagaaattttactaaaaagatatccttttagaatgattcctgagctgcctccaaaaagaattggatcacaaaacgcagaccagatttttttgaagaaaagaagaataggactgtcaagatttatcaatttagtaatgaagcatcctaaattaaataatgatgatttagtgttaacatttttaaccgtacgcactgacttaacaagttggagaaaacaagcaacttacgacacttcaaatgaatttactgataaaaagatatcttcagaattcatgaaaatgtggaaaaaagagtttgccgaacaatggaatcaagcggcatcttgcattgatacctcgatggaattatggtacagaatcacactgctcttagaaagacacgaaaaaaggacaatgcaaatggttcacgaaagaaacttttttgagacactagtagataactttagcgaagtaactccaaagctgtatccagtgcagcaaaacagtaccatattgggtattaataatagctttggtataattaaaaaacatctagaaactacgagcgacatctgcaaacaagaaatggaagaagtatcagggatgttgtcccctaaattcagaatctttactgacatcttactttctttgagaagtttgtttgaaagatataaaattatggccgcaaataacgtagttcaattacaaagacatgttgaagtaaacaaagagaagttagaatcaatgaaaggaaagccagatcttagcggagcagaatatgatagagtaagaaagattatacagaaagacagaagaagcataatagagcaatctaatagagcctggctgattaggcagtgtattttggaggaatttacgatcttccaagaaactcaattcttgataacacgtgccttccaagactgggcgaaattgaattctaactatgccggtcttaaactcaatgagtgggaaaagttagttaaaaacactttggatatgcctatttctcgtgagtaa

SEQ ID NO: 1949 - DNA, 1170 bp, Saccharomyces pastorianus
atggtcaattcgccgaaaagaccatctgatggcactgaagaaccagcatcgaatagacctaaatataatcaatccgttcctgagacaaaacctgcatttaatctatctccaggtaaaactagtaatttaccgaatagttccccatcacctactcgaacaaagccatctacagattcatctgccccacgcaataacgtaatgggtagaatggaggattcatcacttccaaaaaatacaccacctaccactaatttgaaaatggaaagtaatacagatacgaaaaaaacatcatcaagccctgttggtttagccttaccaaagaaagatgacaagaagaaaaacaaagctacgggtaaagcagattctaaggacagtactggcaaatctgctctctcagggcaaaatgctcagcaacactcggatccaaataaaatgcaagatgttcttttttctgcaggtgtcgacatcagagaggaagaagctcttttaaattcatctattagcgcctctaaatctcaagtacaaataaataacgtaagggttcctaaacacttaccatttctccaccccgaacaagtttctacctatatgaggaaagttggaaaagaacagaactttaacttaacctttacaaaaaatccagaaattctgaacatgatgtcaagcgcgtgcgaaaactatatgaaagatattctaacaaacgccattgtgatctcccgacatagaagaaaggctgtgaagataaactctggtagaagaagtgaggtttctatggctctgagagcagttgcactaatccaaaagaaagaagaagaaaggcgtgtaaaaaaaagaattgcgttgggccttgaaaaggaggattatgagaataagattgactcggaagaaactttacacagagcgtcaaatgtcacagccgggctaagagcaggcagtaaaaaacaatatggatggctaacttcgtcagtgaataaaccgacatctctaggagcgaaatcatcgggtaaagtggcctctgatattgctgctagaggggaaagcgggttgaaggttagggaagctagagaagaacctggaattgtgatgagggatttactatttgctctggaaaacagaaaaaatggtgtccagactatcatctctaaaggttatgctaaaatcagggactaa

SEQ ID NO: 1950 - DNA, 540 bp, Saccharomyces pastorianus
atggttaaagtatacgttcacgacaacaagagcggcatcgattaccgcgaatctcacaattccggcacggagttttccctagatgagctagcgaaattgggagtgatctataaatattgtgcaaccgaagccgacgtgaacgagattgcaaaagagagacaatacagaaacagagacgtggtcgatattcaccaaggctctttcaagaacgaagcggatttcaacgaaaaactagccatgttttacaaagagcatttgcacgaagacgaagaaattaggtactgtctggaaggcactgggtattttgacgtcagagatgcttccacacctgaaaactgggtcaggtgccgggtagagccgggagatttactaattcttccgccgggtatctaccaccgtttcacgttgacgagtactaatcatatcaaggctttgaggctgttcaaagacgaacccaagtggcaggcgattaacaggtctacccaggcagacgctttgcccgttcgcaagcactatgtatcccgaattaatcagtactaa

SEQ ID NO: 1951 - DNA, 3843 bp, Saccharomyces pastorianus
atgagtgaagccaaagaagaagctagaaacgccaccgttaaagtgaccgttaaacttccaaaagaggatagccactctaacaataccaaacacgccaagaaggcttcaatttccaagaacaatgacatatcctttgaaattagcagaaaatctaaaattcaaacaattttggatgtattggctatgattcctagctccaaatacttaacaaacgttagtttaagagcaattgaagatggctcacagctaagtgaggaagtttctataaaggatatcgtaggtgaaaaaagcgacataaaacttcagttagtgatgaagccatatagtgcaagagaagctttgaaacatgtaattacagttcgcgacttcatagggtttgcccaagagacctcagatggtttgtctgaatttgccatttccaccggctcaaacttttcttctctaccgctaggtccaattaaggaagcatctaagcaagaagagaagaaagatgaaggaaatccagagggaaaaaaaagtacctttaaaaatgtttctgaaaacgaaaagcttgagttcaacacaatggtccatgaagttttctccagttttaagagttcttcagttaacgaacttctaacctctgaatccaacatcatcaccccgtgtgttagatctttgagttttgcagcttataatcctgtacctccattttatagaaccaaaggccatctattctatctgcaaattgtcactttagaaggtgaaaacttctatatcactgcaattccatcaggtttctacgtcaatggatctaattcaacaaaattcgatccttctccaaaggaaaataccgaggagaacgtcaacccatccttggttcactacagtttgtttgatttgatttcatctcgttcaaaaaaattcgtttctcatgttcaagcgtttgaaaagagattatcaactttggattccacaagctacgtgagaccaaacaatacgtttttacacaaaccgtggttcgtttcttctttaccagcgaatagcccggattatctaagattacaaacacctgccttggacactaccccagaaaggaactttaacgatgaattccaagctattaaagatttggcaacatcaactttacaggaccgtattgaaatggaaagattattcgccaaggtcgttcacgaattctctgttaccgcagcaaagggagcaatgtcgattttctatagcgacttcattgcaatgaacccagaatctccaattcaagatcaaatcttcttgaaagacaacatattttattcctttgtttctgatgttagtggcaattttaaaggtaagggtggcgatgaagctgctatcgctgcttctaaccaggatttgaagacaatcaatattttgaaccgtctacatatgcatgaagttcgttacctattaacaaccgtcgttgaatttgccggcagaagaatcttagctcaaactccagtacctggactattagctaccatgggtaacaaaattgtcaaagacgtcgaaactggtgaggaagttaccgaggattttgtcaatgatatcaacgtcaaatacggccttgatgaaggtttagaaaaatttgtttatgatgctgacttcgaagctgtcttggaaaaaaaatttgtcaaggccttccatttgaaaaagcacaaggtcgatgacaccgaattggtgttttcctctcaattaaagggtatcgtcggattcgacaagagacgctacattttggatttagccaacacataccccttggatattaactttgccagagaaaattttgacgaattcaaagcagatgatgtcaacaaccgttatccacacagacaaacattgttacgtccggaactagttgaaaaatggtggaatgaaaagattgagaaagaaggtattgaatttgaaaaagcctatgatgaaaacagattcagttacaaccctgatgcttaccaaatcgaaggtgttgaggaccctaccgttgatgaaatatcaacgtatttacaaaaggatgttatccctagcgtcattcaggattatttatccggtaatttgagcaccccttacaatggcgagcatttagccgacactttacataaaaatggtgtcaatattcgttatttgggtaaaatcattgaactttctcaaaaagaattagagtctcaaactgccaaatacgaagagaacttgaaaactgttgaacaagacaacaaagaatatgaagaatgggaaaagtcttatttgcaaaagattgaagccatgattaaggaaagacaggcaaagatcaacaagttagtacaggaaggtaaggatgttcctaaggaactaactgaagacctgaaattgaacgatgaagaaatcaaaaagccaactgatgggaaacctgtcgtcgttgcctatgatgaattattgccattgataaaaatcgccgaattagaaattgtttcgcgttctttgaaacacgttttgaaggacttaagtaaagatgtcccaatcgtattggtcccatctttagttgcttacgtcttcaatatgttggtcggtaccaactacaatgctaatccaaagccagaacctgtcgatgagttttatccagtcgataagtattcatttgctgaatggactcgttccgaattgttggaatctatttctaaacaagctgctttacgattccgtcatcatttaccatctggttggattgaaacttatatggaaaatccctttgccttaatcagaagcgtttcttacaaatttggtgttcaattactgaacaaggaatactttttcactaaagaacaattggaaagctacaagcaaagtttagacaagaaaattagaaacaaatacgttgaaccagtagccaccttcagtttaaacgacctgactatcatcccacgtgttaagttatcagagtatacttcttcagtcagtgaggaattttgggctcaaggtgcctcaatgataaacgaagacaaacaaactgctttgactttgcttgctcaatccattacagtcttagaagatgttaataacattttacaccctactgttgctgaaaaatacttatcgttatctgccatctacaataagttagcactatacccagaagccattgccttttgtcgtaaagcatgtaccatttatgaaagagttagcggtatcgattcttttgaaatgatgagagctttaactaatttggccgttctggaattttctaacgaaagtccgtataacgctgctgttatttataacaggctcgctgagattctaaaagtttatcaattacccaagattcatcatccagctccaacaagtattttcaaccatttagaacaactagctctgggtgttcaagatactaaattggccattgaagttttgggacaactaagttcatatgttgttgaactagaaggcaaggaatcattagcatatggttatactgaatcacgcctgggaaatttgtttgctgcgttaaaggatttccatcgtgctctagaacacatcactgtaactcaggggatctttaccaaacagttaggtatgaatcatacacattcagcacaatcaagacaatgggtcaatggtttgaactcattgatagtggatttgaaacaaaaaaaacaattagcacaggaccaaacgtcagcagctggaccaaagcctgctaacacagccactcagaagaaaaacaatcgtcaaaagaaagatgatgtcaaacctgaactagccgacaagtctgtggatgagttgttaacatttattgaaggcgactcttctaactctgcaaataacaaaagcaagaataagaagaagcacggtaagaaatag

SEQ ID NO: 1952 - DNA, 1560 bp, Saccharomyces pastorianus
atggtcgctataatacctcatgcttccttcattacaactgatctagtccggaaaacaaagggaagccaaataccatccaaggagggtcgtaagatcaatatgaggactcatgaagctgacctgagggagaatgctcgagaacttgagtggttttatccgaattttgttcagatagttatactgttcggcactttttattatggtattgaaaggcttcagccgtggtctacagatgtcactggcacgtcttataaaaaaatctttgtaaacgcttttgtggtggggttgataatgattggggtggtcttaatcaaatattggcaacacggctccagaagcatacccaagttcgacaccgtttacagtttttatttgcctttcatgatttcattattgtttgatacaccctctacaacgataaacaccatattgatcctttcggtaatgaattcctataaatgggacgttcaatttttggtgatattttcgcagttcagcctcatatatttcaattttgagactggtgacagattagaaaaaattattggcgttataataaactctttactgtcgtcgattctgaaacatatcgggcaattgaaaagtttggataatattgactctaatctttttagtatcctattgacgaacatactatatgtttctgaagcgaattccatacattttaggattttgaagggcattatcctcgccctgatgactacaatctcgaccaattatattctcaaaaaaatattacacgttaagccatttatgcagtcaatattgttcgctgttgggcttcctgttctttcaaagacattcattcatctagaagatggacaagatccgttatcatggctggtagggtatgtcgtagaatctaccactcgtcaaaagattttgtttgcttggttctctatactactgctatccgtaccaagtattttgatcgaaaaggacagtctatcgttaaatacctcccgaaaagtgtggcacttcattatattcttacttatagtgccatcattccaaatagattcaaattttgtgaaaattgcattgtctggaacaataccagtcttcttatcagttgaatatataaggtttcaaaacctaccgcctctaggatctctaattgaactacaacttagaaggtttgccgatgccagagaccatagtgggcccctgatcatatcctatctttatttattatttggaatatcgatacctttgttggtgaatgactcgcccatgggattaataggtttgggaattggcgattctctggcatctattatcggtaaaagatatggtcaaattcgttggcgaggtacccaaaagactatagagggaactcttgcgttcaccataacaagttttattgtttgtttggtattactttactttgataaagcaaccgtgttcagtcatttaaccgttttacaattgctttgtgtttgtacattaagcggggtattggaaggaaatagtgtgctaaatgataatattttgatacctgcatttatgatgatttgtgaaaaattgtttactctttga

SEQ ID NO: 1953 - DNA, 1557 bp, Saccharomyces pastorianus
atgccttctgaaaactccgtctcgatctataagctggatcaattggagtatcaatatcactacttgacgaactcattagagaaatttgaaccaagatatccaaaaactgcaaaactatacaattgtataggtagaaaaaacaagaaaaaagtggacaagctattgggctctttagaattaaaaactttaactgaagaactaggcgaaagttactcaaaactactaaataataagattcattactacgagacgcatctgtcaaaatgtataaaagagcaagtccaaaaactgtctcaaaagacttcaagtagaccgaaaaattctgaaaaaaaaaagacagcaactatagatttggagaaaatgcttgattcaaagatttcattagatgatttggcgctatacatgacgaggttcaagctgattaaaattttgaatcaaaggatcaaacaaaaaagcaaaaaaactgaagatgacacaaatgctaaaacatggttagataacaatgactacactgattacatcaacgataaaacaagtaaatggaacccaagtcatatttggaatgaagtcatcacaaaactaccaagctgtgaaaagtcaaatgcattaatcggtcaaaacaaaactattcaggatttaatcgaatccttcgatttgagtatttgtttcatttttggatttgacgtgagtgttatgaaagctaagaagtatgaagcagacgagaaaccactcaaatctactccactgcctaccgagattgagtataatgacgatgatgaaaacaacgccaacgataagacttcctatgtgactaaggaaagaaataaaagcaatatggaagtgacgtcagatgacgaagacctgttggtaaagcaatacgagggcatgctaggtaattcagatgaagaagaagaaggtagtggatacttgaatcctaatatcaattacgatgaagtgacagacgaagaacctagtggagaatcatccgatgaagagggtgattacgaacaagatagcggtgatgaagaaaatcaaccgaagaggaagaaggccaaggtacataacttgcctgaactgatggctggttattatagtggggatgatagtgaagaagaaagcagtgacaataatttgaacgagaatgataaagggaagaaaaagaacggtaaaacatccgatgatcgtacggctagagaacaaatgtcaaacgagccaaagaggaaaaacagacgtggtcaaagggcaagaagaaaaatctgggagaaaaaatacggctctgaggctaagcatgtgcaaaaagaattagagaaagaaatggaagagaggaaacaaagacaaattgattacgaagctagagtcgctaaacgtgaagctcaagcggaactatacgcttctagggaaaaagaacgcgaacgtgggcgtactgaagtgacctacaagaaagaaaaagaaccaactgccactggggaagagcatccttcttgggttgctaagagactagccgaagaaaagttacaaaaagctaaatttgaaggtaaaaagattaaatttgattga

SEQ ID NO: 1954 - DNA, 1617 bp, Saccharomyces pastorianus
atgagctctgtcgctgaaaacataatacatcaggccactaataattctacattacaccaattggctaagggtgggtcctccttcggtgtcactaaagccttcaacgtcctggatgcacttaagtcaatgtcatatttgaaaatctttgccactttgatctgtattcttttggtttgggaccaagtagcatatcaaattaaaaagggctccattgctggtccaaagttcaagttctggcccattattggtccatttttggaatccttggatccaaaatttgaagaatataaggcaaagtgggcatctggtccactttcatgtgtctctattttccacaaattcgtcgttatcgcatccactagagatttggcaagaaagatcttacaatcctccaagtttgttaaaccatgtgttgttgatgttgctgtgaaaatcttaagaccttgtaactgggtctttttggatggtaaggcccacactgactatagaaaatcattgaatggtcttttcactaaacaagctttggcccaatacttaccttcattagaagtaatcatggataaatatatggaaaaatttgttcgtttatcaaaggagaagaattatgaacctcaagtctttttccatgaaatgagagagattctttgcgccttatcattaaactctttctgtggtaactacatcactgaggatcaagtcagaaagattgccgatgattactatttagtcacagcagctttagaattagtcaactttccaattatcatccctttcagtaagacatggtacggtaagaaaaccgctgacatggctatgaagatttttgaaaactgtgctcaaatggcaaaggaccatattgccgctggtggtgaaccagtttgtgttatggatgcttggtgtaaattgatgcatgatgcaaagaacagtaacgatgatgatgccagaatatttcacagagaattcaccaacaaagaaatttcagaagctgttttcactttcctatttgcctctcaagatgcctcctcctctttggcttgttggttgttccaaattgtagctgatcgtccagatgttttagaaaagattagagaagaacaattggctgttcgtaacaacgatatgtctactgaattgactttggacgtgattgaaaaaatgaaatacactaacatggtcatcaaggaaactctacgttacagaccccctgtcttaatggttccatacgttgttaagaaaaatttcccagtttcttccaattacactgcaccaaaaggcgctatgttgattccaaccttgtaccctgctttacatgaccctgaagtttacgaaaatccagatgactttattcctgaaagatgggaagaaggctcaaaggctagtgaagcaaagaagaattggttggttttcggttgtggttcacacgtttgtttaggtcagacttatgtcatgatcactttcgctgccttattgggtaaatttgctctatccaccgatttccatcacaaagtaactccattaagtgaaaagatcaaggttttcgccaccattttccctaaagatgacttattgttgactttcaaaaagagagacccaattactggtgaagttttcgaataa

SEQ ID NO: 1955 - DNA, 1242 bp, Saccharomyces pastorianus
atgatcgtttttaatgggaataagtatgcgtgtgcatcgtgtatcagggggcaccgctcttccacgtgtaggcattcccacaggatgttgattaaagtgagaacgagaggaagaccatctcccatggctataagggatgccatcttggtggactcaacttccgagagtacagaatatgagaacgggtcgcaagttgaaggtaactgttgtagtggaatgaatcagcagccgatactgtttgtacgggcctctgctgttagaaaggcaagaatgataaacggtaaactacatatactaatggaggaaggttgtactgctcatgagcctaaagacatcagcacgtttactgatgacggtaataggtatataacggaaatggagtttctcaggaaacattctccaagggctccggcaataggaacagtctcccccgtatctaacaggtcgtcttcttcgaacgagaagaaagagagtagtcttgttcagcaggagcctatacgaaatgtatcaaactgctgtaagaaaatcaaagctgataattttgctttaaatgacaagataccgcctggtgatatttttaccccgtacggttccttagaaactgcatctactttccacgatattctacaagaaaattataccactactggtgcgtcacatgataactcggaaacactcactccgcggagcacaacaactgtatctgcgccccactcaaatgacctggcttcaaaagtcgaagttctgactcataagggcgtcttcttaagtacacaatgttcttgtgaagacgaaagctgtccatgtgtcaactgcctcatccatagaagcgaagaggaactaaactcgtatattgaacagagcggtgttcctttgaccaatataggtgaagctcaaattactgataagatgatggattatctggatgattgtaaatgctccaacaaggagtgcatatgtcctccggacaattgcacttgcgatggctgctttgcccacgctgcaagtattattccgtttgaaaaattcttcttttacggtattttaaatacaaggttaacaagaaaaactcaaataaaattcaaaggaaaattggtaccgtcaaaattctggtgggatttcctaaaactgcaagtccctttaatgacagatgctcaattggaattactcgatattcacgcgtggtttcaaaaactcgtctccaattacgcacctcatctaagcgatgccaacaattcatga

SEQ ID NO: 1956 - DNA, 498 bp, Saccharomyces pastorianus
atgtctaaaacagcccagaaacgtctgctcaaggagctacagcagctgatcaaagattccccaccgggcatagtggcgggtcccaaatcggaaaataacatcttcgtttgggattgtctcattcaagggcccccagatacgccatacgccgatggtattttcagtaccaaactggaattccccaaggactatcctttgtctccgcccaaactaacgttcacgccaagcattctacacccaaatatttacccaaacggtgaagtgtgcatatccattctgcactcccctggtgatgaccccaacatgtatgaactggctgaagaaagatggtctcctgtacagagcgtggaaaagattttgttaagcgtcatgagcatgttgagtgagcccaacatcgaaagtggtgccaacatcgacgcttgcattctttggagagacaatagacccgaattcgagagacaggtgaagttgtccattttgaagtctctggggttttga

SEQ ID NO: 1957 - DNA, 1206 bp, Saccharomyces pastorianus
atgagtttttattcgaatttgccatccgctggtcaacctgatcaaggatcccgaaccggtggtcgagatagggtggggctagagccattgtacccaactattttcgaaatagtatcgtcgcaagaaatcgattccttgctgcccacatcgatacggtatctgttaacaaaccactttgtggcgaactttcccaacaagtacactttacaattgaacaactactttcccgaatggtttcaagttgcaaaagggtttgttgaatggtatcatttaaagacatataattctacatttattgaccgcttttacggactgcaacttttcaactcaagagacaagaacttggctctgacgcaatgtttaaatccacaaagtgaaagttcatggccgcagggtctgcaactaacccagttgcaaaaaaaagtgaccttcctggagaagattattgtcccctacattacatccaagctcgatgagatttttgaaaaagcatcaatcagcggtatactgggtggtaatagtaatgatggtggaaatacatgggtcaaaagagtatttttgaaactgtacccttatatcaagaaactctttgcgctatccaatttacttatcaagctattgtttctaactaaaaaaacaggagctgtttcgttgttgcagtacttgtgtaacatagagtataccaccatgaaaccactttcaccagcactatctagcttcaaagagacaaaggggtccgatagtagattacagagaacaaacatgtcgtcagccgtggcacttttacaaaataaattatcggtcatactccggattttatctttcacgggttcgcaattcttcccaacttttatattcgtattgagagtttatcaatggtggaccacgcaggacatgactacaagattgaagaaaaaactgaatgacctagataaagatattccaagaccacctgtctcgtcaagtggtgaccaaaccaacgatgaaaatgaagccactgagttatgccctgtctgtgaaaaatccatacagaatccatgcgtattggaaactggatatgtggcatgttacccatgcgccatgagctatttggttaataatgagggccattgtcccgttacaaataagaaattgctgggttgtacgttcaataaagaaatgaataaatgggaagttatgacgggtatcagaaagctactgatttga

SEQ ID NO: 1958 - DNA, 1101 bp, Saccharomyces pastorianus
atggcttcaataacagaacggtataacgatattgttgacatatactctactaaattagaacattcatccttgaggcaagattcgcaagaatatcagaatttactactttccacaatcaagaaattattagacttgaaaacagcagtttatgataggctcgcgttattcagtgccaatgaaaccatagaggatgtttctacgacttcaatcaagtttctagcaattgattactatttggggctcttaatatcaagaagacaatctaatgattcaattatggctcaaaggcaaagtatgaagttactttatttaaataaaagtgttgaatcttttgtcaaatttttaactactttacaagattataagcttctggatcctttgattagtaaaagattagaaaattttaaggtccattataaaccacaactaaacgagttatatgcacaacctaagaacgacaaagatttatctggagcacaattgaaaaggcaggaaaaaattgagttatttcaacgcaataaagaaattggtgcaaagttataccatttagaatcacaactaaaaggcgatgatgaagaccttgatcatgatgaattactaagagaactatatctagtaaggctacaccaatttagtctgaacacattcaataacattgagcaaaatttatttgaatgtgaagtgctatccaatttcctcaaaaacgcaccacgtcaaactgagtcaccagggattcaagagcagaaggaattacatcgtaatgattctacgggcttcaccgacaaactggagaccataaacaagcctttgatagacaagaagggccaagttttaaggaacttcacgcttgttgacaagagacaacagcttcaacaagaagtgcgtgggtacgggcagtatggacccacaatgtcagtggaagaatttttggataaagagtttgaagacggtagagttcttcaaggtggcgaagaaccggaagaagtccgtgatgaagaagacatggactggcaagataaggaaacctataaagctcgtgactgggatgagtttaaggaaagccatgctaaaggtagtggtaatacaatgaacagaggatag

SEQ ID NO: 1959 - DNA, 1569 bp, Saccharomyces pastorianus
atggctgttaaccagacgcatgttcatccacattatacgttgcctggtgtaatgcattatttgcaaacagagttcaccaaaaatgaaagagatagaatcacatgggaactggaaaggtcggaaatgaaggcaaggattgccaagttggagggcgagaacagagatttgaagtaccaattgaacaacgtgcagtcgaaagctgcttttgttaaggacgaaggcgaaaaaagatctgtgtctgattcgctgttgaaatccaagttggctgttcaagaaaacgtcaaggagattatctatttgctgaagagccccaatgtggtcaatcagctggattcattgcatagcaaagactctgattcccatttgcacgatttggagaggctgaacataaatagctgcaaggagggcagtttcaacacaaatggaatggaccttttgaatagtgctctctctgataccaaacctaaacaggaaatttcaaccggatcatcctctactaaagtagaatctctgtttgctgttgccaaaaagcatgaagataaaggtgcagtatctaaaattcaatccgatttgccgagaattgatatcatcagctcttacggtgatcatatggctctttacgatgcagataccaaatcgttggaaatccacaaagtggatgccagcttgggtaccaagtctgtaaaaggaatggttatggagcaatgtggtgatattgtgaaaattttctgggtttcacccttaaaatttcttgccatcgataagagttttcacttgaaattattttcagtttctaatgcatctttggtttcggatttggatctgatgcaaggtttagacgaacctctttcatttggcgacgtcatcaatatagattttaagagtaaatttttattgatagccgctaacagcaaaccacatgttcatatttgggaactaaacaatatagacgctattggcgacgtcccaattgacataaaggaaacatacgtcataagacatgatgatgatgatgacgaagacggtgacggagacactactaatattttggattgcatattgggcataacagaaaaatctttaatcttgctgtcttcgaatccatatcaactggtcatacacaatttcgaaggtgtactgctacaaaaaattgatttgaagattgatgcgatattatcgtgtaagccgattggggaaaggtgtcatttgtttttgaatgagaaaacttctaaactattgattcaattaaacaatgaaacattgttggtttactcttttgatcaaaaaaaaatcatatcaaaagaaaaattggctccagcctcaacattgccaatgcagatcgacctgaacgacagcataatcaccatatcctatggtaatggagacttcggatttaaaaatttagaaaacctggaaccgttgattgatgaagttttcatagcgaatatcaacttgacagagaaagaagaacatgtaatattctcttcaaatctaatagtgagttctactccggtgctaattaccaggaataaaaataacgaaatcctcttacacaaaataaaaatctag

SEQ ID NO: 1960 - DNA, 1143 bp, Saccharomyces pastorianus
atgaacgactttaacccagaaatggggaaattcgccaccactgaagacctgccccaggacaataggagtatggaagatatagaaacgttgcctaatttgccctgcagccgtagtggtactccgaataaggggaaagatctggcgcccaacaagatggaaactccaagaatactcaatatgagcatggtaccagattacttgcaaaaagagaatctctccccagaactttcgtctgccactgtgtctgcagggtcatcgcctgtaaacgtagcccataaggagtaccttccaataggaatcgctggatcgagtaacataaagggctccaagtatgagatccagttgcagcaacagcaaatggttgacttcgctgaaaatgatatacgttcaccgtcttctagtatagcgagctttaaattagatatcatgaaaacactagagcttcccattcccaagagaagagatatcaaggggaaccatctatccaaattactgcttgccaaatctcccctaacaattaacacatattgccaattttatgaccccaacacgaagtccatatgcaaccaagaaatgatttggaaaaataagaatagtagagagaaacatggttcaaggaagtatcagaggcatttgagcaaaatccataacgccgaactgacaacagaaaacttcactcagctttttgaccataattctccactattccaaaaatactataattaccagtccatgctgatgaatgatctactcgctgaacctgagacaaagcccaaggagaaaaaaagaaagcaaacagaggatagcacaagaaatgattcagacaccaggcagaatcccaactactaccaagagcaacagcataacatcccggaacttcagtcgaaaatagccatgaacgacttgatagaacttctcattgatctgaacattccgttctctgtattagattacccaccagtgcgagattggcttaataagtattcaataattacaacagactctctaccagacgaggaattctttaaaacagactcaagcgtgcacgaattcgaacagaacagcgacggaaccactaacggtggtaattacaacaataacagcaatcccaataatcatgaccataaccaatacactcactaa

SEQ ID NO: 1961 - DNA, 2520 bp, Saccharomyces pastorianus
atgtctttaatttccgctgtagaagaaagagacatacctgttataggcaagaccctgtctggttcagggagtaggacttcgtcgataacttcgtcgaagaagaccctaaagcatgcttccaagactcaaaggaaaccgcgagtgtatcagacgactggcgaaccattgagcagagaggctctgtacaaggctaaactgaaatacggagtttaccaatccccggcgcaaagttactcaattggagtcaaagatgctcatgctgcctccgataaagctgccaacttagccaacgataatcaaactactgtggaggcatacaaacgtatgtttattgaccctgatgctactaaagctgcatccagagtcggagccaatgccactcgtagggattctgtcacttctgccacctccaaagcctcaaaggaatcgcaggttaagaggagagccaaagaatcatcaggggctgctgcatcgaaagcttattcgatgacagcggagtcccttagctcaggttcccaaaacggtaagtcttattctataacctcggccagttctgccttaagtggtgctaatagcatccaaactaataactcgactaacggtaatttcgttaactacaagcaaaaacctatgaatttgggaaaggtcatgaagggtgctgaaaagaaggctgaatctcgcatcaaagaaaggtgggaacctgaaaagggaaactttcattacggtatcaagaccgatgagcatggtagactaaaccagttcagtttttctaatgacatgatgagcaatatcatgtctaaagtggatgctccgagagcacaagatcttcaaaagacaaagagcgcccaagctgatcgagatgcctgctcgaagaggtatgctttaaatgccgctaatgctgtcaaggacatgcatcccggccaagatatcgataaaagtatcgctctaaaggcccaaaagagagatacctacttgaatcaattaacgtctcaacaagtgttggttatggcaagatccaacgtggacagacagttggaaattattgaaaagagcaatatgcacaaaaatctattcactaacacagactataacaaagccgctgtcgccgttgcccaatccaattaccaaaagaaaacggagttccataacaagattaacatgggcggtggtttattcttatcaccagaagacatcactaagatcgcctctgggctaatttctccagtacttggcgaggtcagtaagagagccgaagcacaacgtgctatggacgaagaaatcgctgaaagaaccgagtcttataaaaactccttgagtaaatgggaagccatggaacgctccatgaatttcaatgatactaaggtactaacaaacacagcaaataggcatcaaactgagaagaaaaccaccgaagaaaaagtcaaagccagctacgatactctagtggctagaatggatgcgaaagtcactgaaaaagaaactctacttgacgataccaagaccaaagaaattgattttaagaagcaaatgcaagaagagttaaaggatgaaaaagcccgcctggatcaagatttagaggaatggggtaaagactgtgaacaagatatcagtaatgcacgtaaagaacaagaggaactgttgaagccataccacgaagatttggaaaacgcggaaacagaacataatactttgcttgaagaacgtgatgctattaacgcagaaatttccagactacaaggtgctattgtcgatcataaaacgaagatttcgaactatgaaagtgaccttgacgcccaaaataacagaaacgttagagaagatgataaattggtggagttaggtcaaactaaggaatcactagaatctcatttgaatgataatgttatcattattgctaacaaggctaaagaacaagccgaattgtcaaccaaagaggctcgcttgaagcagttggaagtagactcattgatcaatgaacgtaagagcgaattgaatacaactgaaattgagctcaaaaaggaaaaactaaatttattggaggctatgaaagacgtcgcttctgcacgcggtgatgataatattgacgaagaaaaggttaagagtttgattggtatgacttctgaagaatatttggcacaaaacaaacatgtcaagaaaaacgttgaaattttgccaacccaacttgaagaagaagaagaaggaatagaaaacaatgaaactggaagcaaaagcttaactgctgacgaaggcccagtaaagaatatcgcagagccatctattgcagccggttctgaggctcaaacagattccgaaaagaaatccccagttaaggatgaactagccaacgatggtcaagcagccaaggctactaagaagacctccactttaaagaaggcaggagataagaaatccgcggaagttggccgtgatggattggaacatacattcagtgggttttcacaaggttcgtcgatcgaagaagaggaccatgatgtaattggtaatgaaaaagaaaagtag

SEQ ID NO: 1962 - DNA, 534 bp, Saccharomyces pastorianus
atgtttcaagcggaatcatcaagaagagttatacgcagtacgctaatagctttgtcatgggtacctgtattgttaacaataaataataatgtggtgcatattgcacagattagaggcacctcaatgcaacctacgttaaacccacatacagagacattggcgactgattgggtactgctttggaagctgggggtcaagaatccggctagtctatcaagagatgacgttattcttttcaaggccccgacaaaccctcgaaaagtttactgtaaaagggttaagggcttgccttttgataccatcgacacaaagttcccatatcctaagtcacaagtgaacctgccaaggggtcacgtatgggccgaaggagataatttatttcattcgattgatagcaacacattcggttccatttcaagtgggttggttatggggaaagtggtagcgattgtctggccaccgtccaggtgggggtcagatctcaaacttagtactggtagaaattgcatcgccagaagagctgttgcggagtaa

SEQ ID NO: 1963 - DNA, 2121 bp, Saccharomyces pastorianus
atgacgattgaacatgattttagtactgaagacattctattccctaccgaaagcatgaacactatgcatcatgcggacaatagttcttcaaacaacataaacaatgatatgaacccttattctttagatgtcaaaaacagtgtttttgatagtgtcgataccagtaacatacaaaaccaagaaactccattgacgatagggttccccccattatcctttgactctcccctaactgcaactgacacattatcctccactactgataataatctacacctgaagtccaatatcaacaagaactataacacgagtaacaacgtgaacgacaatgagaacgtcaacactagcaacacgaataccgctagttcaaaccagtacacgacgctcacatcgccatatcccatgagcgatcttttgtacaacatgaataactctttgcaatcaccgtcaccttcatcggtgcccccaaatccatccaataccaccgtaaacccgaagtcaaacaatgaaattaggccatcaccacaaatgtcaaacgggaatgaaaccctcatatcccctcgtgcccaacaacaaacttccattaacgatgaccacctgtcttttcccaatcctcctaatacaaatcttttcattgacacaaaccccaacaacttgaatgaaaaattacgaaaccaattaaactcaaacacaaattcatattccaactccacttccaactccaattccaattcaactggcaatttgaactccagttatttcaactcattaaacatagattcaatgctagatgattacgtatccagcgaactcctactgaatgatgatgaagataacgagttgtcacaacgaagatttagtgatgtcataactaatcagtttccggcaattacgaattctagaaactctatttctcactctttggacctatggaaccatccaaagataaattcgaataataaaaactcaagtacagataaaaaccttaataactccaactcaagttccaatgcaagtccaaatgctaccagcactaacacaaacacaaacacaaacacaggcaccactggaaacccaaacaacaatgacactgctatagacaatgaactgacgcagatcctcaatgaatataacatgaattttaatgataatttgggcacatcagatgctaataaaaataaatctgcttgtccagattcctttgatgctaataccatgacaaagataaacccaagccaacaactgcaacaacaaataaaccaatttcaacagcagcaattcacatcttcacataataacagtagcactaatatgaaatctttcaacagtgaccttaattcgaacagacaaagagcttctttacccataattgacgattcattgagttacgatttgatcaataaacaaaacgaagactccaaaaatatcgtactgccgaacactagttcatcttcgtcccaacaattcattaaaccatctatgattctctctgataatgcatctgtcattgccaaagtggcaaccacaggcttgggtaacgatatatcatttttgacagaacaggatgagcaaaatggcaatgataccccaaactttgatctatgcatgtctcaaatgaatatgaccccgtcatcgccgacctcatcatcttctgcctctcttgccacgaaccacttctatcatcattttccacaacaaaaccaccattctatgaactcgaaaattggatcttctattcgaagacgaaaatctgcggtgccgttaatgggcacagtgccgcttaccaaccaacaaaataatataagtagcagtagtgtcaatgcaaacggaaacggtgttggagtcacaaaggaaaggagaccaagttatagaaggaaatcaatgacgccatccaggagatcaagtgtcgtaatggaatcaacaaaggaacttgaagagaaaccgttccattgtcacatttgttccaagagtttcaaacggagtgaacatttaaagaggcatgtaagatcggttcattctaatgaacgtccatttgcatgccacatatgtgataagaaattcagtagaagcgacaatttgtcgcaacatatcaaaacccataaaaaacatggagacatctaa

SEQ ID NO: 1964 - DNA, 750 bp, Saccharomyces pastorianus
atgaccgtgaacaatacgtacgaagccacctatgcaattcccttgcattgtgagaattgcatcaacgacatcaagacatgtttgaaagatgtccccgggatcgattcgttgaattttgacatggaccagcaaatcatgagtgtggagagctcagtggccccctccaccatcatcaacactttgcaaagctgtggcaaggacgccatcataagaggtgccgggaagccaaactcgtccgctgtggccattttggagacgttccaaaactacactatcgatcagaaaaaggacactgccgtgagaggcctggcaagaatcgtccaagtcggggaagacaaaaccctttttgacatcactgtgaatggtgttcccgaagcaggccagtatcatgccagcatccatgagaacggggacatttccaagggtgtggagtccactgggaaagtctggcacaagttcgacgagcccatcaagtgtttcgacaaaagcgatctgggcaagaacctgtacagcgggaagaccttcttgagcgcccccttaccaacatggcagctcatcggtcgcagctttgttatctctaaggccctggaccacccagaaaacgagcgctcatccgccaatgactactcgtttctaggagtcatagccagaagtgcaggcgtgtgggaaaacaacaagcaggtgtgtgcatgcacgggaaagaccgtctgggaggagagaaaggacgccctagccaacaacatcaaatag

SEQ ID NO: 1965 - DNA, 915 bp, Saccharomyces pastorianus
atgtcatattacaacaggtataaaaacaagagaagaggcgatagtagtggtggtggaaatatgaataacaataacaacaataacagcaatggtggaatgccatctggcctttctgcctctgatgcaattttcgatttgggtaaaaacaaaagagttacagtgagacaattcagaaatataaacttaattgatatccgtgagtattatttggattcatccacaggtgaaatgaagcctgggaagaaaggtatctcgttgacggaagacctttacgacgaactgctaaagcacagattaaatatcgacgaagccttgagaaggctagggtccaagagaccaaaaacaaaaatggttaggctattatccgatgacgagtacgaagacgataacaataatgacagtaacgacaaggacaaaaacggaaacgataagaacagtcccagaaagaggagggacgataaatctaaatcatcgaatgaaattcacgattcagaaccacgttctaagaaaaagaagcctgctccacccactctgttgccacacgaagaaaacatgcaaaacgctgcaagagaagccaatgctaccttgattattccaggggcagccagcagaaaacagcaagaagaacgaaagcagaaggagaaggaagaggaggacgcaaatgcaaaggcaacggccgtagcaaaggcaaaggcaaaggcagaggcagaagcagaagcagaagcaaaggccaaaactaaggcaaacgagagtatgcctaagcctgcgcctgtacctacacttgagctcaagaaggaagacgctgcctccaatatagacgaggcgaaagatgcaaactccagcgatgaagaatttgcccagagcttggaggcggaaatgaacaaggccgacgatgacattagtgaagaagaataa

SEQ ID NO: 1966 - DNA, 846 bp, Saccharomyces pastorianus
atgtcggatatcgaagaaggtacccctaccaataacggccagcagaaggagagaagaaagatagaaatcaagtttattgagaataaaacaaggcgccatgtgactttttccaagaggaagcacggtatcatgaagaaggcgttcgagctgtctgtgctgacaggtacgcaggtgctgttgctggttgtctcagagacgggtttggtgtacactttcagtacgccaaagttcgagcctatagtcacccaacaagaaggcaggaatctcatccaagcctgtctaaatgcccctgatgatgaggaggaagacgatgaagaagacggcgacgatgacgatgaagaagatgatgatgatggtaatgatatgcagcgtcagcagcaccagcagcaccagcaaccgcagcaccagcaacaacaacaagtattgaatgctcaagcgaatagtttaggccacatgaatcaagatcaggtgccaccaggcgcactgaaacaggaagtaaaatctcaattgctaggtgccaatgctaatcagaccccgataatccaacagcaacaccatgctcagaatcctcaaacacaacagccacaacaacaacagcagcagcagcagcagcagcagcagcctcaaatggcgcagcatcctcaaccacaacaaggaataccccatccgcaacaatcgcagcagcagcagcaacagcaacatcagcaacagccacagcagcctctcaccggcattcaccagccccatcagcaggcttttgccaacgccgggtctccctacctgaacgccgaacaaaatgctgcgtaccagcagtacttccaggagccgcaacaaggccagtactaa

SEQ ID NO: 1967 - DNA, 1422 bp, Saccharomyces pastorianus
atgtctgaagtgatatttcagccaacggatatcgtccttgcaaaagttaagggcttttcagcatggcccgctatgatcatccctaatgaactcataccggataacattctaaagaataaaccagtgggtgtacacaagggcaagtctgccaatggcaaagaagcagaaattgaagagcaagaacagggcgacggcgacggcgaagaggagcaggaagaggttttcgatgatagtgaggctaatcctgaaaagtttataatatatacaccagtcctgaagtttcgtaaaaatgatacgttaaaaccagtatattgtgtcaaatttttctgcgatgattcatacatttgggtgaagcccatggatttgaaaattttgacaagtgaggaatgtcgtcaatggctaaacagtaaacagcgaaagaataagaaattaataccggcctatgagatggctatgaagggtaaggatgacattgatatttgggaattcgtggaatacgggtcttatggtaagccagatgaagaggaatacgtagaggaagaagaagaagaagaggaagagcgcaaaaaaactgcaaagaaacccactaggtcttctagtaggcaacgtcaaaaacgtgttcttaatacaaatgacgctgaagatggccagacaagcaagagaaaaagagtcactagatcaactagacagcaaaaggtggaggatatagaagaggaggaggaggaggaagaagatgatgaagaagaagaagaagaagaggttgtcagaaagaggccccagagaggcaaacccaagaaagctgtagcggcaaaagctaagccaaaaccaaagccaaaaccaaagaaagagaaacctaaaccacctaaggcgatcaagtaccattttgaagatgacgaagattggagcatagttggactgggtccacaagatttgtccattgaaaaaacaatggatccgattgcaaaaaaattatcacaaaagaaaaacttagacaagcatacagaaattaagctggatttggaagacaaactagcaggaatcaacaagctgttatgcgatgtcttatgttcagacattaaccaagtcgtttccatcaaagacgacttcgaaataatattagatgaattgcaaattgccctcaatacaagagggtccaaaaatgaattcataacaatcttccaatcagacaattccttactattgaactttagaatcttatttaacttgaaaaaagaggaactgggtaaatggaatttatgggatcgtttccaagaaattttcgagcatatttattcttatgaatttacgcctgatacgactgattggcaactggaacaagatacggaaatcgaagaagagcaacagatcaacgcaaatgcaaacgaacctgtgaaggaagaaggagctgaagtaggtgcataa

SEQ ID NO: 1968 - DNA, 615 bp, Saccharomyces pastorianus
atgaatagcgcaggcaacgatagttttgagtatcttcttcaattgactaaaacattaacaacagaatgccggtccaacaggcaagaaactgaccggatagaattattattaaaacgccttgccaaacaatcagggatatcttacgataaattgagcagaaatataattccagatcaatggaaagataatgaaactcaaacggtatcgactcccagcgaatcacaactgctcatttatgataatttcaagttgatatacgagattgaaaaacaagaatacttcaatgggaagattaatgcactgatcagcaatataaatgagcacttctcttatataaaaaactttattgacgaacaaaatgtaataagaggacgagatgtggccgtatttgcatcagataaacttgacgaaagaaatataaatttgcaacaaaattacaacctgctgaagacagaaaacgaggaaacaaaaaagaaattgcataccgttattgagcagttcgaaacgctactgaaagaaattgattgggagtctatacccacagactccagacactatactcgctttcaaaaacagttagaatatttgcaaaacgcataccaaatattaaaatag

SEQ ID NO: 1969 - DNA, 984 bp, Saccharomyces pastorianus
atggttaacggctgtgtacatttatggggtgagaacggcaagccatctttgatttcagctgaaagcgtcgcccttgtatggtttatcaaggcatgtcgttcagaacagacgaaggatttgattaagggactggaagtagtattctccaataatacagatttatcgccggacgggaaactaccagtgttgattttagatgatgggatgaaagttaccggctatgtgaacatcgttctatgcttaaagagaaatacacatactgccaaacatgaaaaaaacaaaaatgatgaagggtctttagtaattgttagtaaagaagaccgtcttttggagtatgcgttattgaattttattgactcagaaatagcaacactgaccgactaccagcttttcttaaacacaaaaaactacaatgagtataccaaaaaattattctcaaaactgttgtattttcctatgtggtataataccccattgcaactaagattgcaagcacgtgaaaattgccaagagatcataggctctataactctcgaggacgatgaagaatttatagaaagtaaagcactggagtctgcatcgcagttggctcaatcaaagactttcaagattacacatgagaataaagtgaagaataagcaagagctacagcaagttaagtataatctacaatttgataatagattacagaattgtatcaagcattggttggaggtccgcgagaaactagacgaatctatggtacttccttccgatattcttttccatgccaatatttacgtccaactaaatttgcctgatgggaatcgtatccgttcaaaattgaaacaaacgtttggagacgagtttatcaacaatacatcaaacaagatggaggaaattgctcagagttctgacgaagatctggggcaaagagatcctcacttcaaagaacaagggaatgttgtgatgtcattatacaatttagcctgtaaatacatataa

SEQ ID NO: 1970 - DNA, 1326 bp, Saccharomyces pastorianus
atgagaatatcaccagccttactacaacgctcgaaacagctcatagataagtacgcattgtatgtccctgagacaggtttcttccctaagggttttgaagtaggctgcattgcatccggagttaagaaaaatggtaacttggatctaggtgtcatcttgaacaccaacaaaccccgtccctccacagctgcagctgtcttcaccacgaacaaattcaaagcggctcctgttttaacctcaaaaaaggtcctcgaggctagcttgggtaagggcattaatgcgattgtggtcaattcaggctgtgccaactcagtcactggagatctcggtatgcaagatgctcagataatgactgacttggtcaacgagaagatcggtgagaaaaactcgactctggtcatgtctacaggtgtcattggacaacgattacaaatggacaagatcagtaatggtatcaataagattttcaacgaaaggaaatttggcagtgattttaactcttggttgagcgttgccaaatcaatctgtaccaccgataccttccctaaattagttacatctaaattcaaattgcccagtggtgccgagtataccttaacaggtatggccaaaggcgcaggtatgatttgccccaatatggccaccttactagggttcgtagttacagatctacctatcgaaaataaggcattacaaaaaatgctaacttttgctaccacccgttcatttaattgtgtttcagttgacggtgatatgagtactaacgataccatttgcatgctcgctaacggtgccgttgatactaaagaagtcaatgaaagctctgaagatttcgaacaagtgaaattgcaggtcactgaatttgcccaacgtttggcccagttagttgttcgtgatggtgaaggttcgacaaagttcgtcaccgtgaacgttaaaaacgcactgcatttcgaagacgctaagacaattgcagaatcaatttcgaactcgatgctggttaagactgcattatatggacaagacgctaattgggggagaatcctatgcgccattgggtatgctaagctgaatgatttgaagtcattggatatcgataagatcaacgttagttttatcgccactgataactcagaacctcgtgagctgaagcttgtttccaatggtgttccgcaactaaaaattgacgaagcaagagcctctgagatcttggctctgaatgatttagaagtatcggtcgacttgggcactggtaatgaagaggcccaattttggacttgtgatttatctcatgaatacgttaccattaatggtgattaccgttcgtaa

SEQ ID NO: 1971 - DNA, 720 bp, Saccharomyces pastorianus
atggtttgcatgatccatattgtggtttttttgctttcaatcacaaccgtctttgaagtattcccactgattaccgtgcccgtaacaaaacatctgtcgttatcatccttcaaaaaccattactacgggctatttggatggtgtgtgcgtggcaaaaaccaggagctgatgtgcacgaggaagaagataggctacgacagcacggatgtcgattcttcgggccatgtcttgtcactgccctccaactcgaaagtggttgtttcaaatttattagtggttcatccgatctcactggcattcacaagcacgctgctggtactaacagtgatcattatggtaacgcctttgggggattcgcctgagatgctgttgttcacggctcttttttcgctgccgacatttatgctatgtcttttatgcttcttggtggatattcttctttttatttccaagttagactggcccgggtggctaatgctagctgccacaatcagcgtggcgctttgctgttccatgctctgggtgatgagaagagttgtgtcagtcaaaaaatatgaatcacaacagtcaactgcgcacgtgcgatcaattgaacagtacccgatatcggacatttgctacagtaaacagggtactaatagctcagaattagagagcacgccgatgcatacagatatcctgctggctccagaagtcacatatagagggtttattgattaa

SEQ ID NO: 1972 - DNA, 1251 bp, Saccharomyces pastorianus
atggcaacggttaccgtgaagtacaactttcagcttttcaaatgcaaagtatcgtccaattccacgttaaatgacgttttacatcaatctttacagttcttccaggtgcccgcctcttccaacgagtggacgttgctacatttaagcaagcccgtgccattggacctgccatggagattgctgaatctaccaatgggcgtcaatttagaactatcgaaaaactccaactttcgggtggcaaagaacgataaccacaacggtacgccctcaaagactattaagatacgatttcagattccaggaagggattcaacaatcaaagaggtttcgctaaatgaaccaattgccccaattttgcgaagtgttagcggctttacagaaggtgatttcaaaattcaagtcttctcccagatcgtagattataaaactattgaaaatgacagtttaaccctggaaaatctaggaatccaagagtcttcctcgatcagactacttatccccggttcgttgtctggaaatgccgagaacaatattagcaacaccgctactccacttaagcaagctttgtccccaatgacaactccagcaacagtagccgagccaccctcccacgaacttcataaaccttccgtattcttgccttcaaacgaaccgctaacggttgaccaaatggaggaagaagaagactacgaattgaccgtggaacaagcgagaaggtatcagcaaatgctatctatgaaagccggtactttaggtggtcctatcctaacgaaaaggctcagagaacaagcagcccacggtctatcaaaaaaaaacaagtctgtcaccgagtgcctactaagaataaagtttcctgatagaagccacattgaaatagcatttaaaccagatgaagatatgcataccgtttatgacatcgtttcacaatccttgctcgatgacaaaataaacttcacattaaaccaatcacaccctttcaaacccttagccaacgatgatcagaagctactggaggacttggagttcggttctaaaacaatgttactttttgaaactgattcaacttccactggtccattcttaaaacctcatttgctgaaagatgcgcaaaaaatctcacatcaagcaaccgtgaccccgtcactagagactaccgatagttctaacacacagagtcactctgataatgttccaaagatcaagaagactttgaataaagtacctaagtggctgaagttgagtaaaaaatag

SEQ ID NO: 1973 - DNA, 504 bp, Saccharomyces pastorianus
atggcgttaagtttaggacagttcattaacgtgggcggtatggtgaaggatctgaaaagcttcaattttagcgtatatggtagatggtttggatatatcaacataattctatgtattgcgctcggcatagcgaatctattccatgtgagcggggtgatagcgttcgggatcatcagtataatccaggggctcgtgattcttttcattgaaataccatttttactgaaaatctgtccccttagcgataatttcgttgaatttatcaagagatttgaaacgaatggatggaggtgtattttctatctagcgatggcgatcatccaatacgtgtcgattgcggtgatggccacgagtttgatcgtggtggcggtggggttaacgatatcctcgatcagctatgcggtggcatataccaagcatcaagagttccagaatacgaatatcctcaagaaccccacagacgatgacttccctcacgaggctgtagtcagagagatgttatag

SEQ ID NO: 1974 - DNA, 606 bp, Saccharomyces pastorianus
atgagtaatcgtagcgtgaacagggatggcaccgatccgaaactaaacatcaggttctcagtacctcaacggataaatgtaactcaaccgacaacatcatcaccgctacatatgcccgtatcaagatcagcgaggaaaccccttgtgaggactaagataaaattggatcccggacacagtgccctggactggcattcactgacctccgacccagaaaattatcattccaagttcatttcgctacagcttattcagggcttactcgatgatcccatcttccaaagagataattccaagtttccaccgtctcagttgagggcgcaactactactccagaagattcctctatataaaatgatgccaccattgaggataaacagagaaatcgttaatagacattgccaaggtgaggatgaattttggtgtgttataaatggcaaagtgtatgatatttccggctatttgaagttccatccaggtggaccgaaaatcttattaaggcaccgtgatagcgatgacttgattacgttatttaataagtatcaccagtgggtgaattatgaaaaactattacaagtttgcttcattggtcttgtatgcgaatga

SEQ ID NO: 1975 - DNA, 669 bp, Saccharomyces pastorianus
atgggccagaaaagtagcaaagtgcaaataactaagacggatagggcaattttagaagtcaaacgatctaaggatgaaattcacaaatttaccagaaggacagacagcttgatacaagtagaaaaataccaattgaaagagttgatacgagctcatcctaaaaactacaaatcgaatattaaggtgcggttcctattgaaaagaattcattatcaagagcacctgttgcaacaagcttcagatcagctcattaatttggaaaacatgatatcaacactagaattcaaaatggtggaaacacagtttatcaatgggctgagaaacggtaatgaaatactgaaaaaattgaacaaagaatttagcaacgttgatgaactaatggacgatgtgcaggaccaaatagcataccaaaatgaaattaatgaaacactatctagaagtattgttggagcaaatgactatgaagatgagttagataaagaattagatgcactagaaatggaggtcaatacaaaggaaaagaaggacaaggtagaagcagccaatttgccgtcaacagaagggttgccatcgcggtctaaagaagaacaaactgaccataaagaaagggaagagcttattcaagataggaagggaaacagcaaggaacctgtagcattattgtcctag

SEQ ID NO: 1976 - DNA, 2217 bp, Saccharomyces pastorianus
atggtcgataccgtaccgcacattggttcgttagggagaagctcactttttgatacgggagatggagaggtggcttctagtgctgacacaattggtgtaaaccaagaagacattgacgcgtttgtatcgagtaatggcgaaacggttaaattgaagaagaagtctgcgaaattggccacgggaaatataagtttgtacaccaatcctgacactgtttggagatcagatgatacgtacggcatcaatatcaactacttactagacaggattgatgcatcgagcggagaccgttctaatagttccaagacatctaccatggctagcaaagtagataataactctctgtgggtggagaaatggcgtcccaaaaaattcttggacttagtggggaacgaaaagataaataggagaatattaggttggctaagacagtggacccccgctgtgtttaaagaacaattgcccaaattacccaatgaaaaggaggaaaatgaagcggaaccagatccgttgaaaagaccatataagaggattttgctactgcatggtccacccggaatagggaaaacatcagtggcgcacgttattgccaaacaatcaggcttttctgtctcagagataaatgcaagcgatgaaagggctggccctatggtgaaggagaaaattcataatcttttatttaatcatactttcaatgtcaacccggtatgtttagttgcagatgagattgatggaagcgctgaaggcggatttattagaatattagttgacattatccaaaacgacatgaaagctactaataaactattatttagtcaaccggataagaaaaacaagaagggtaaaagtagaaggtcagctctacttatacggcctataatttgtatttgcaataatttgtacgcaccttctttagaaaaactaaaaccgttttgtgagattgtttctgtgaaaagaccttctgataccacactacaagaaagactgaacctcatctgccataaagaaaacatgagcattcctctaaagacaatcaatgacttaattgatctggctcaaggtgatgtaaggaattgtataaacaatctacaatttttagcttcaagtatcgatggaaaaagcagtaataacctggatgaacccaactccaacaaaagcacatgggggtcatccaacaaagattcgccgatatcctggtttaaaatcgtaaaccaactctttagaagagatccacatcgcgaaattaaagatcaattttacgaattgttacatcaagtggagctcaatggtaactcagataaaatagtgcaagggtgctttaatatttttcctcacgtgaaatattctcataatggtataaggaaaccagcaaatatctcagattggctgtttttccacgacttgatgtacaaatcaatgtatgagcataatggcgagctgttgcgatactccgctcttgtacctttagtattcttccaaacattcggtgatattgcaaacaaagacgacattagaatgaaaaacagcgagtatgaacaaagagaattgaaaagagccaattcagatatagttgattcgattgtcagacacatctcggtagaatcaccattgatggccagctttacaaatagaaactctctggtatttcaaatacttccatacttggattctatgatctcttctaacttaaacaaagtgaaaaatttgaaattcaaacaaacgattattgaaacattagtccaggtgatgaaaagctttcaactaagtttgatggagaatcattcagacggatttgatgtaagaggtggtttggcaatcgatccgcctatcgacaaagttgtgttgctagatccaaaacatatcaatgaagtccaacataagaggccaaataatttgaatttcctcctggccaaaattgaggagaacaaagttaaaaagaggcatattgaccaagtaacaaatgagagattgcagtcgcaggaaattcatactaaaaaaaccaagacggcgccaaattcctcctccagtacaatcgacttctttaaaaatcagtaccgaataataaatcaagccccggaagcttctggggaaaggaaaaatgctggctcaggtaaacctgatgataacaccaaggaggttaaaatatgggtaaaatataaagaagggttttccaacgcagtaagaaagaatgtaacctggaatagcttatgggagtaa

SEQ ID NO: 1977 - DNA, 1128 bp, Saccharomyces pastorianus
atgctaagaacatcaacggtgttcacaagacgtgttcaaccaagtctacttgctagaaatatcctcagattgcaatccaccgcagcaattccccaaactcaaaagggtgtcattttttatgagaataacgggaaattacattacaaggacattccagtcccagaaccaaagccaaatgaaatcttgattaacgttaagtattccggtgtttgtcataccgatttacacgcatggcacggggattggccattgcccgtcaagctaccattagtgggtggtcatgaaggtgccggtgttgttgtcaaattaggttccaatgtcaaaggctggaaagttggcgatttggcaggtatcaagtggttgaacggctcttgtatgacttgtgaattttgtgagtctggccacgaatctaactgtccagacgctgacctgtctggttacacacatgacggttccttccagcaattcgctaccgctgatgctatacaagctgccaagatccaacaaggtactgacttagctgaagtggccccaatactatgtgccggtgttactgtatataaagcactaaaagaagcaaatttaaaagccggtgaatgggttgccatttctggtgctgcaggtgggttaggttctctagccgttcaatatgctacagcaatgggctacagagttttaggaattgatgcaggcgcagagaaagaaaagcttttcaagcaacttggaggtgaagtgtttattgattttaccaagactaaggatatggtctccgacatccaagaagctactaaaggtggccctcaaggtgtcatcaacgtttctgtttcggaagccgccatctctttatccacgcaatacgtgagaccaaccggtactgtcgtcttggttggtttgccagccaatgcctacgtcaagtccgaggtcttttctcatgttatcaagtcgatcaatatcaagggttcctatgttggtaacagagctgatacgagagaggccttagacttctttagcagaggcttgatcaaatcaccaattaaggttgttggattgtctgaattaccaatggtttatgatttgatggaaaagggtaagattttgggtagatacgttgtcgatactagtaaataa

SEQ ID NO: 1978 - DNA, 684 bp, Saccharomyces pastorianus
atgtcccccttaaaagtcgcagtcgttggtgccaacggtaaagttggccgtctgttgttaaatcagttaaagaatagtagcagtttctcaacacctttagccattgttagaacgcaggaacaggttgagcattttaaggacaaggtgggtgtcgatgcaatcttgacagatatagaaaatgcctccgtcaatgagattgctgatgccatcaagggttacgacgccgtggtatttagtgcaggcgcgggcggtaaaggtgttgaaagaatcttcactgtagacctagatggttgtatcaaggtggttgaagcctgtgaaagtgctggcgtcaagagatttgttgttgtttcggctcttaaggcagaagatagagatttttggtggaatttgaagggtctgcgtgcgtactacatcgcaaagagatcagctgaccgtgaagtaaggaggtctaaactggattacactatcttgcaaccaggttcactggaattaagcgaaggcacaggcttgttgcaacccttggacaaattagaagaaaaggcctctgctttttactctattaatagggaagatgtagcttcttttattacacaaagtttgctacatccagatgccactgtgggaaagactataccgttggcgaatggagatgaaccaatcggaaaattcattcaaagcttgtag

SEQ ID NO: 1979 - DNA, 684 bp, Saccharomyces pastorianus
atgtcccccctaagagtcgcagtcgttggtgccaatggtagagttggtcgcctgctgttaaaccagttgaaaaacagtagcagtttcgcaacaccattagcgattgtcagaaagcaggatcaagtcgattatttcaagaacgaagcgggtgttgatgcgagcttgacagatatagaaacttcctccgctagtgagattgctgccgccatcaagggttacgacgccgtggtctttagtgcaggcgcaggttacgatggcgttgagagaatcttcactgtagacctagacggctgtatcaaggtggtcgaagcttgtgaaaatgcgggtgtcaagagatttgttgttgtttcggctctcagagcagaggatagagatttttggtggaatttggagggtttgcgtgagtactacatcgcaaagagatcggccgatcgtgaaataagaagctccaagttagattacaccatcttgcaaccaggcacgctggagtcaaacgagggcaccggtttgttccgacccttggacaaattagacgaaaaggcctctggtctttactctatcaacaacgaagatgtggcttctttcatcacacaaactttgctacatccagatgtgactgtggggaagactatacctttggtcaacggtaatgaatcaattgaaagttttattcaaagtttgtaa

SEQ ID NO: 1980 - DNA, 1851 bp, Saccharomyces pastorianus
atgccatcgatcgacctacaggaaatcataccacctcaaccttcgacgcagcgtaattttaccacgcacttgtcatacgactctaccactaacgcaattgcctacccatgtggtaagtctgcctttgtgcgttgtttggatgacaagaccaaggagctacctgcggtgatccagtttacaggccatggctcttcagtggtgacaaccgtgaaattttctcctattaagggttctcagtatttatgctctggtgatgaatccgggaaagtgattgtctggggttgggcttttgacaaagaaaataactctgttgaagtaaatattaagtctaagttccaagtcctagctggtccgattagtgatatctcctgggactttgaaggtcggagactttgtgttgtaggggaaggtcgcgacaactttggtgttttcatatcctgggactctggtaattcccttggtgaaatctcaggtcactcacagcgcattaacgcctgtcatttgaaacaatctagacctatgagatccatgacagtcggagatgacgggtccgttgtattttaccaaggacctccattcaagtttgcttctagtgacagagtccatcacaaacaaggttccttcgtcagagacgtcgaattctcgccgggcaccggtgaatttgtggtcacggtaggatccgacaggaagatttcctgctttgatggtaaaacaggtgagtttgtgaaatatatagaggatgatcaagagccaatccaaggtggtatatttgcgttgtcttggcttgattcccaaaagtttgccactgtaggagctgacgctgccattagggtgtgggacgtaacaacttccaagtgcgttcaaagatggacattagacaaggaacaactggggaaccaacaagttggtgttgtcgcaacaggaaataaaaatgtcatctcactttcattggatggtacgttgaatttctatgaacttggaaacgataaaattttgaagagtattagcggtcataacaaaggtattaccgctttagcagtagatccactaatcagtggttcatacgatggtcgggtcgtggaatggtctaattcgggcccttccatgcatcaagatcacttcaatttggtggtatcattggacaacagtaaaccgcaagaatactcaagtatttcttgggacgatactttgaaagtcaatggtgtcactaaacatgactttgcgtcgcaaccaaaggttgctagcgtaaatgatgattgtttcacagcaatcatcacaaatgatgatgatttgttggtattgaattcgttcaccggagagatattaaagaccgtaaggttgaagtcaccaggttctgcagttagcttgagtcaaaatcatgttgcggttggtctggaagaaaccaatgtcattcaggtgttcaaattatcagacttggaggttaatttcgaattaaaaactcctctccgtgcaaagccttcctacgtatcgatttcaccatccgaaaagtacattgctgctggtgatgtaatgggaaagatattgctgtatgatttagaaacaagagatgttaaaacgtcgagatgggctttccataccagtaaaattaacgcaatttcatggagacctgccgctaacacaggtgaagacgaatgcgaggaagaccttgttgccactggctccctagataccaatattttcatctactctgtcaagagacccatgaagattattaagtcattgaacgcacataaggacggggtcaataatcttttgtgggagaccgagtctgatttggtcagcgcaggtgcagacgcttgtatcaagaagtggaaggtagaatttgaataa

SEQ ID NO: 1981 - DNA, 1446 bp, Saccharomyces pastorianus
atgtcctcgttcaacccagttagatttttgaatctaccggttagtattagaaaggaggtctactttcatttggacggaaatttttgcggagcacatccatgtcccatagatatattatacacatctaataatgtagaactaccggtaaaaccaaggtgcaagagatctaagagatctaagaaattgctgaaatacatgtatcctgtttttgcctcttatttaaatattttcgaatactcaccacaactaattgaaaaatggcttgaatatgcgttttggttacgttatgactgcttagtactggactgtttgaaagtaaaccatctttatggaggatcacttattggtccgttggagtggacgtaccttgacaatgagcttcgattggcttattttaataaggctagtatgctagaagtttggtatacttttaaagaatataagaaatgggtaatagaagttgctgcttatgacgaccttggcgtaactcacatagattacattcaattcaatattgaaaatttgacctcacagaaggtagataaatgtctatttttgttggaacaaaaagatttgttgacaacagtcagtgaattacaatttggacaagatgaagaagtaggaggagaagaagaagagcaaggagaagaagacgatgaagacgatgaagctgattctgatgaaactgcgaaatctaaagtgacaagtaagaaaagaacggcttcaaaaagcttgggtaatgacagtgtgagaaaaaatcgaaagcatttaacggatacgtccgttatcaggacaattaaaagcacagaactcatgaaaaatttgcgaaagatttctgtacgaggggaacaattatatgagttgctaataaatttccacgggttcagagataatccagggaaaacgattagttacatagtgaaacgcagaataaatgagatacagttatcacgaacggatcggatttccaggacaggattggcagattttacaagatgggataatttgcaaatccttgcattagatagaatggtttacgtagatttaaacaagatcgtctttcccaagaatcttaagtccttgacgatgaagcatataagtcagattaagtggtgggacatcgaggagaacataataaatgagttgaaaatggataaaaaaacgtttaaatcatcttatacaagggaaaagaataacagctttacaagatttttgagtcgtaaccagataaatataatggaacttgacaaaagcgaaattgaccaaatgacttttttccgttgtcaagcattagtttggcagtccgttggggctttaaaccacattagactagaaagtgtatcaaaagtttgtaacggtaacgttattgtaccaagagcattattctatagtaaacgaatagagatttttcaatgtaaagaaatctctgaagttatggtaatatag

SEQ ID NO: 1982 - DNA, 894 bp, Saccharomyces pastorianus
atgtctggagaaaatttcaagatcaagagtgggctcgcccaaatgctgaagggtggtgtcatcatggatgtcgttacgccagaacaggctaaaatagccgaaaaggcaggtgcatgtgcggtaatggctttggagtgcattccagcagatatgcgcaagtcagggaaggtttgccgtatgtccgaccctaaaatgattaaagacatcatgaatgccgtgtccattcccgtcatggcaaaagtaagaatcggtcattttgtggaagctcaaattattgaagctttagaagccgactatattgacgaaagtgaagtcttaactcctgctgattggactcatcacattgaaaagagcaaattcaaagttccatttgtatgtggtgcaaaggacttgggtgaagctttgagaagaattaatgaaggtgctgctatgattcgtaccaagggtgaagccgggactggtgatgtctctgaagcggtcaagcatattaccaggatcacagaacagataaaaacttatcaacagctgaaaggtgaagacgaaattgcaaaggctgctgaggaaatgagggtgccagtttccttgttgaaagatgttttagaaagaggtaaattgccggtggtgaatttcgcagctggcggtgtagctactccggcagatgctgcacttttgatgcagctaggctgtgacggtgtatttgtcggttcaggaatcttcaaatcatctaaccctgcaaagttggccactgccgtggttgaagctaccacccatttcgataatcccgccaaattactggaagtgtccagtgacttaggagagttgatgggcggtgtatctatcgaatccattaatcatgattcgaagggtgtgaggctttccgaagttggttggtaa

SEQ ID NO: 1983 - DNA, 1110 bp, Saccharomyces pastorianus
atgtatatgaatgtaagggtgggtagaagattcacttctaacgtaccgtcttttataccaagatataagtttcccaaatacaatatggctcttaccgattttaagggacatcaactcaaagctcttagaagatttgagagattggtaccccaaatgaacatgataatagaactacgtgatattcgggctccaatatcgacacgaaatgtaattttcgatcgcattgcaagaaaggaacacaatatgttgaagttagtggtatatactagaaaagatcttatgcctggcaacaaaacttatgtagataggttaatgcaatggcatgaggagctaggggaaaagtttgttttactagattgtcgggacaaaactgacgtcaagaacttattaaagattctagaatggcaaaattacgagctagaaaaagaaggtggctacttgcccatggggtaccgagcactgattactggtatgcccaatgttgggaagtctactttgataaacagtttaagagcgatctttcacgagcatgatcgagatagtacgggagggaaacacagaaaagtggcaagaactggtgctgaagctggtgttacaagaagcacaagtgaagtcattagagtagcttcgaggacggccgaatccaaaaatgaaatttatcttatagacaccccaggtatcggtgttcctggccgagtttcagatcataacagaatgcttggtctagcattatgtggtagtgttaagaacaatttaatagacccgatattccaggcagactatcttctatatctaatgaatttacagaacttctatgaaaggaaaaaggaactctatcccggaagcaatgattcacctacgaacgatatatatgaggtcttgcagagacttcaagtaaataagaaccagaacgagaaatcaatagctattgaatggactaataaatggagactacaaggaaaaggtatcatattcgaccctgaggcactgttgggtaacgatgagttttcgtataaaaagtatgtagatagccagttggaaaagctaggcgagctctcatacgaagggttatctgacagactaaggggaaaccccaatcaaatattttag

SEQ ID NO: 1984 - DNA, 894 bp, Saccharomyces pastorianus
atgcctgtcaaagaaactgatagagaggttgtcctaacccgtcctgatgacgaaactaccagcgtcaccattttgaagtacggtgctacagtttattcttggaagttgaaatctgaagaacaattgtggctgtctactgcagctaaactggatggctctaagcccgtaagaggtggtatacctttagtctttcctgtttttgggaaaaataccactgatgagtatctgagtaaattgccccaacatggtcttgcaagaaattccacttgggaattcttgggccaaactaagagtgacccaccaacggttcaatttggtttgaagcccgaaatcgccaatccggagttgaccaagttatggccaatggattttcttttgattttaaccgttgaattgggtgttgattctttaaaaaccgcaatagaagtggagaacacttccacttccaaggaactaaaattcaactggttgttccatacttatttcagaattgaagacatcgaaggaacgatggtctccaacttggctggtatgaaactttacgaccaactgttgaaggagtcatacttggataaacacccggtggtcactttccatcaagaaaccgatgtcatttatcagaatgtcagtcctgaacgtgccattcaaatcgtcgacaagggtgtgcaagttcatactttgaaaagatataatttgcctgatactgttgtttggaatccatgggttgagaagtctcaaggaatggctgatttcgaaccaaaaactggctacgaacaaatgatatgtattgaacctggtcacgttcatgatttcatcactttggctcctggtaagaaatggaacgctcatcaattgctttgcaaggatgaattgaactaccaagctatccaataa

SEQ ID NO: 1985 - DNA, 1869 bp, Saccharomyces pastorianus
atgagagattctaaccatcgatcactgacgctgaataaacctatagtaacgataacgtccaccgtgtatgaccgaagagcacttgacatcaactccagtatcccgctaataaattcactaaactacttaacgtacctaacttcgaattcatcaaaagttagagaaacggtagccaatgacggagccctggaaagattggtgtcaatattgagaaattgtcatttgagtttgtttgaattactggatttggatttagaagatttcagtgaacatgataacattaagaacctatggaaggagaaaaaacttgcgttatgtgcatggaaatggaccctaacctttcagtgtctagtgttaacaggcactagaggaacagaacaaattcgaaaaaaagtagtaatgtctggcgtcttatctgtgctggtcacagtgttggataattatttattatatcataaaaactatgacttcgtcaaagaccaaaccatgaatttcgactttaagggaataaccacagaaacgatgtacaagtttttgagaaaggacgaaaatgaaacgtatcaacaatatatagagttcatcacaggtcaggataaattgaaattatcaaatgataaaacttttttaaacgaacgattagtggcaccatctatgacaatcccgacggattttagtgatacctgggttgattttgcacatctagctagcaattttgatactcacactcaccacaaaaaaaatgacgacgatactgacatcgacaccgatcgaaacaatacaaatttcaatgcatatgaagaattcttctcccaaccggacgttaataaacctaccatctccacgccacgtgaattctttttaggaagaatcgtgcccaaacaagacgacgttatttggtctcttcaattgttagctttcgtttctaaatacacatacatgaagtctaccctacaaaatgttgaactggtggaatctttatcattcagaagcatggctactcgagtgaaacaacgaatttcggaggatgatgacatagaagaacaagaaagaaatgtcaccgtaaaattttccacactatacccctatctatcaaaaacttctaaaaataatcccgatcataaaaattcggattctagtaaagataatccattctttgaagagttgaaaaaactttcaaacaaatgtcagcaaaaggaacaagagcgaatgtccaatattcgctgtccggttttaaatttattcgaacgttatcgtgtgcccaaacccaatgataataatgttaataatacagacaaggaaagaattattttaagaaaaaagctatcggagaaatttgaaagaaattggaactatgagaaaatgaagaaaaaatcaactaacagcattaacgactttaaatcactatcaaacattgtaaacatatttcctttggtagaaaaatatactgtgaatacagaaaacacgcatgatattatctactggagttcagtcattatgagaaattcatgtcgaaagaatgagatcttaggcgtacgccaatgtgccaatttctcatgcggcaaatgggaagactttccaagacaatttgccaagtgccgtcgatgtaaaagaacgaaatattgctcaaggaaatgccaattaaaagcgtggggttatcatagatattggtgccatgaagttggatcaagtcatttaagatccactaacactaccacaggcgtcaatactccaaatgaaccgggctccttaaacactactgccacgacggcagctgacgtttcaaattctaccagcactttcgctccgaatatttctaccaccgtgcctgatgaaataggcaacgccgacgataacagtatacctgaataa

SEQ ID NO: 1986 - DNA, 1710 bp, Saccharomyces pastorianus
atgtcattccaaatcgagacagttcctaccaaaccttaccaagatcaaaagcccggtacctctgggttgcgtaagaagacaaaggtctttaaagatcaacctcattacaccgagaatttcattcagtcggtcctagatgctattcctgaaggctccaagggtgccactcttgttgtcggcggtgatggtcgttactacaatgatgttattcttcacaaaattgctgctattagtgctgccaacggggtcaaaaagctagttattggccaaaacggtctcttatctacaccagccgcttctcacattatgagaacttatgaggacaaatgcaccggcggtattatcttgactgcttcacacaacccaggtggtccagaaaatgatatgggtatcaagtacaatttatccaacgggggcccagctcctgagtctgtcacaaatgctatttgggaaatatccaaaaagttaactagctataaaactatcaaagatttcccagaactagacttgcagacgataggcaaggatacgaaatacggtccattattaatcgatattatcgacattacaaaagcctatgttgagttcttgaaggaaatctttgacttcgacctaatcaagaagtttatcgataaccagcgctctactaagaactggaagctactgttcgatagcatgaatggtgtcactggcccatacggaaaggctattttcgttgacgaattcggcttaccagccgatgaagtcctacaaaactggcatccttctccggactttggtggtatgcatccagatccaaacttgacttatgctagttcattagtgaaaagggttgatcgtgaaaagattgaatttggtgctgcctctgatggtgatggtgatagaaacatgatctacggttatggcccatcctttgtctctccaggtgactcagtggccattattgctgaatatgctgctgaaattccatattttgctaagcaaggtatttacggtttggcacgttcattccctacctcagcagctattgatcgtgtcgccaaggctcacggcctaaactgttatgaagttccaaccggttggaagtttttctgtgctttgttcgatgccaaaaagttatccatctgcggtgaagaatcttttggtacgggttctaatcatgtaagagaaaaagatggtgtttgggccgtcatggcgtggttgaacatcttggccatttacaacaagcaccacccagaaaaggaagcttccattaagactatacaagacgaattttgggctaaatacggtcgtactttcttcactcgttatgattttgagaaggtagagagtgaaaaagctaacaagattgttgaccaactggaagcttttgtctccaaatctggtgtgattaactcccccttcccaactgaagaatccgtgaatgttaccgactgtggtgatttttcgtacacagatttggacggttctgtgtccgaccatcaaggtttgtatgtcaagctatctaatggtgcaagattcgttctaagattgtctggtacaggttcttcgggcgctacgattagattgtacattgaaaagtattgcgatgataaatcacagtaccacaaaactgccgaagaatatttaaagccaattataaactcggtcattaaatttttgaacttcaaggaagtattgggaactgacgaaccaactgttcgtacctaa

SEQ ID NO: 1987 - DNA, 354 bp, Saccharomyces pastorianus
atgggtggattttgggacgcatttgcagtatacgacaagaaaaaacatggtgatccaagtttgtacggcgggaatcatatgaacatcggggagagtaagacacaagttatgttctcacaagaatatcgggcacccaagacggagcagcctatgccggagaacatgcagaatatgagacggtcttctatgtcttcggtggacagctccgatgtggaggccgtcaaggagggcagattacccgcagacatagaaataccaaaaaatgttgacatatctaacatgtctcaaggcgagtttctgaggctttataagagtttaaggaagggcgaacctgacaacaaggtcaacaggtaa

SEQ ID NO: 1988 - DNA, 2064 bp, Saccharomyces pastorianus
atgatcagacagtccacactcaagaacttcgctattaagcgttgcttccaacaaatggcataccgtaacacacctgctatgagatcagtcgccctcgcgcaacgcttttatagttcatcttcccgttattatagtgcgtctccattgccagcttccaatagaccggaaccagccccaagtttcaacgtcgagccagtggcacaggtgcccgagccttctaaactggccaagagactacgcactgagcctgacatggacacatcctttgtcggcttaactggtggtcaaatattcaatgaaatgatgtctagacataatgtcgacactgtatttggctatccaggtggtgctatcttgcctgtgtatgatgccatccacaacagtgacaaatttactttcgtcttaccaagacacgaacaaggtgctggccacatggccgaaggttatgccagagcctctggtaaaccaggtgttgtcttggtgacctccggtccaggtgctactaacgtcattactccaatggcagatgccttcgcagacggtattccaatggtcgtttttacagggcaagtgccaactagtgccatcggtaccgatgccttccaagaagccgatgttgtcggtatttccagatcctgtaccaagtggaatgtcatggcaaaaaccgtggaagaattgccattgcgtatcaacgaagcttttgaaattgccactagtggtagaccaggtcccgtcttggttgacttaccaaaggacgtcacagcggccattttaagaaacccaattccaacaaaaactactttgccatcaaatgcgctaaaccaattaactagtcgtacacaggatgagttcgttttgcaaaacatcaatagagcagcagatttgattaatttggcaaagaagcctgttttatacgtcggtgcaggtattttaaaccatgctgatggtccaagattactaaaagagttaagtgaccgtgcacaaatacccgttacaactactttgcaaggtttgggtgctttcgaccaagacgatccaaaatcccttgatatgttaggtatgcatggctgtgccactgctaacttggcggtacaaaatgcggatttgctaattgctgtaggtgctagattcgatgatcgtgtcaccttgaatatcgctaaatttgcaccagaggcccgtcgtgctgctgctgaaggcagaggtggtattatccattttgaagttagccccaaaaacataaacaaggtcgtggagactcaaatagcggtggaaggtgacgctactgggaatttggataaaatgatgccaaaaatctttccagtaaaggagagatcagagtggtttggtcaaataaacgaatggaagaagaaatacccatacgcttacatgatggaaactccaggatctaaaataaaaccacaaacagtcataacaaaactatccaagatcgccaacgacacaggaagacatgttatagtcacaaccggtgtcgggcaacatcaaatgtgggctgcccaacactggacatggaaaaccccacgtaccttcatcacatcaggtggtttaggtacaatgggttacggtcttccagccgccatcggcgctcaagtcgctaaaccagattctttggttattgacattgatggtgatgcatctttcaacatgaccttgaccgaattgagttctgccgtccaagctggtactccagtgaagatcttggttttgaacaatgaagaacaaggtatggttactcaatggcaatcactattttacgagaatcgttattctcacacacatcagttgaaccctgatttcataaaactagccgacgctatgggtctaaagggtttaagagtcaaaaagcaagaagaattagatgctaaattgaaagaatttgtttccacaaagggccctgtcttgcttgaagtggaagttgacaaaaaagttcctgttttgccaatggttccagcaggcaagggtctagatgagttcatatactttgatccagaggttgaaagacaacaaaatgaattacgtcacaagcgtaccaatggtaagcattga

SEQ ID NO: 1989 - DNA, 1086 bp, Saccharomyces pastorianus
atgtgcggccggtttgcccttgcttacgatagcggggatttgtttagattgttagaggaatggaatatacccgtgaatacacccaaggacacctcatcgaatgatcgacgttcacaagacgaggagatcactccaaatcaggctgttgacaatcacgacattttcgaagcttcttacaatattgcacccaccaaatactccgcagtataccgttccgataccaaagccattcaatttatgagatggggcctagttcccttttggaccaaagatgtttcgcagtttaagacgtatcgtaccttcaacgcccgtttagagaatctacaggaaagcaagatgtggatgagaccttgtgagaaaaaacggtgtgccgtactaatgagcggatattttgaatggaaaactgttggaaagaagaagaccccttattttatttcaagaagagatggtaagttgatgtttgtagcaggaatgtatgattacttggaaaaagaagatctgtatacatttaccatagttacagcaggaggacccgaagagttagaatggctgcatgaaagaatgccctgcgttctggaacctggcaccaagagttgggatgcttggatggatgtgactaagacggagtggagtactgaagagttgctaaagctattgaagccggagtacgatgaatcaaagttacaattttatcaagtcacagacgatgtggggaagactagcaacaccggagaacggttaattaaaccgatttttaaagaagatacagacatgtttagtgtgaagacagaaaaaaaaggcactgggtttaaaactgataatgaaggagagattaatgatgctaaagataatgctgaagcagtgaaaagcgaagataatcaagatggaaaggaatatttaaaatatgctaaaaaggaagagcacgagagaacaattccagcagacgaaacaagtataggcgatcgagtaaataaggaaaaaaagaataaatcatcaaaggacaagggaacaaaaaggaagagaaatatagtggatatgctaggaaatcaaaaaaattttagaggcaagaaagaactgaagaagtga

SEQ ID NO: 1990 - DNA, 642 bp, Saccharomyces pastorianus
atgtcacaaaaggaaaacatgctcgagagtcctgccgaatttctgaaagaggtgagagaaagctttaatatacagcaggatattgatgccatgaaaagaatccgccacgatcttgatgtcataagagatgaaagtgaagcaagaattacttcagaaaactttaaagtatctgagtcgggcaaaaagctgaacacagagaggataaacatcgctaagttggaaggcgatttggaatatactaatgaagtaggcaatgagtttggcagcaaagaagagctggttagtctacttaaggatttggacgggctagaacgaaatatcgtttctcttcgtagtgagttggatgaaaagatgaaaatgtacattaaagatagcgaaattgtatctacggcagacggttccgaaataaatccaaagatgatcgaatccgagctggaagatcaaaataccatcactccagaggcaaacgaaaacattctaaaactaaaactgtacagatcgctaggggtaatattagatctagagaataatcaagtccttatcaataggaagaatgacggtaatatagacgttttacccttggatgacaacttgagtgactattataagaccaagtatatatgggaaagattaggggaatga

SEQ ID NO: 1991 - DNA, 582 bp, Saccharomyces pastorianus
atgaaagtgacagttcaaaaaataccctcttttttactcaggttcaataaaccgagtctacttgtgccaaaaatttcttctccattctttttgcacagtcaaatcttcagggataacacaagatatttctatgctggttgtgtatccaaattagaccttcggttgggcaatcgtgaagaggagcttttagtatcccagagaaaacaaagaccaatatccccacatctgaccatttacgagcctgaaatgagttggtacctctcttccttgcatcgtatatccggtgtcttattagctctcggattttacgctttcaccattactctgggtgttacgacactattggggatgcagacatcctttcaagacctaaataagtggtaccatgaaaagctacccaaatggtcccaatggctacttaaaggatcagcaggatacttgtttgcgttccactttggtaacggaattagacatctcgtctgggatatgggctacgagctaaccaatcccgcggttgtcaaaacaggatctgtcgttttagctggtacgctggtcttgggcacctatttactggcccaataa

SEQ ID NO: 1992 - DNA, 1893 bp, Saccharomyces pastorianus
atgaactcttcaaattcttctgacaatgtcttcatgagctcgtttagctatttgaatcaaacatcacagcgtataataccaggaaattctaccttcgcaaacactatcaacttcccgtataggctgggcctatcctttgtaggggctgtgagtttacaatacgatcaaaccgtcaagtctgaagaaatccctcctaccctaagatctgtttttgatacggtaggcttcttcttctgtccatatgccattttttgcttcataattgccattgttctcaacagattcgtggtgtactatgccgttctcacgaacggtgccagacgcactgtgccaacgtggttgatcaacgttttccacgtctcagcagtcgctgtgttagcctttgtatcattggggccactcatattgggtaaagattatagcatcttgggcagccctttgtttgccccagacaaaatactacagtatatattctacgcattcgcctattcttattgcgttgaaactatttttaccattatgcgtaactctagcccgctggagggtaccgactattctttgtttgaactatcgatccagttttatacaatgacgagaaatgacattacattaattggttcacccgatcacattatagattattcaatggctatttcaagcagaataataatccatctagtagaaatattcaggatcagaaattaccgcttgcttttcagtactatcctgaacctctgtcatatttattacttgggtataagagtcaagcaagatggatggaaaagccttccattttcagtaaaatttagacatttcccaaaaatattcgcgatctgcattatttgcatttctttgataatctttgaactatcatgcttaattaggtggaatccatttggaaagtctaacaatgcctgtgagcttttacagttttacccactcagtagaaactggaaaaagtatttgaattacacaggcgaagaagatttttcaggtatggccaccaagtttgccctgttattatgttctggaactgaactgatggaaaagggtatacggagagagcttcctgctgtgaacattccggataatgttaatgaaagattctatatcagcggctatttaaacgaacttacgcaatcaggcaaagatgacaaaacctctgactttttgaagcggggatcatcaatatcaaagccaaggttcttcttgatgctaccaaacttcatattatatataatgaagaagttggttggtcagttattctttgtcttcaaaaataaatggtttaccgacgaagacgacgacacctcttataaagagccattcaaagtgccgaatacagctgagaagaaccatgtgaataacgccaaaattgacagcagcgaccacggcgaagatttcgaattacttaacactaacaacgaggacctctctggagattacgaaccttctgaaattgagtcactctgggattccgatgacgagaatttggaagaagaaacccttatctgcaaagagacacatgacgccctgttggatttgttttctcctgaggaaactgaaactcctgtagattatgattggatcgtttcaactagtcatatccttcaacaaaaactactatcgaataaaacttcaacaagagcattcctctcaggttccacactaaatggaattagcgaaccgtccggtgaagactgtgactttgatctatcttgtgctgtgtgcaaagtcaatgagagaaatacaatactatggccttgtcgatgctttgccctgtgcgaagattgtagaatttctttaggtttacgtggatttagcacttgtgtgtgttgtaggggtaaagtccatggatactgtaaggttcatccaatttcaagccataggtaa

SEQ ID NO: 1993 - DNA, 1779 bp, Saccharomyces pastorianus
atggccaactacacaaaaactgcaatactatcagtctacgacaagacaggtctacttgatttggccagaggtctaatcgaaaagaacgttcgtatcctcgcttctggtggaactgctcgtatgattcgtgatgcaggcttccccattgaagacgtgtccgctatcacacacgccccagaaatgttgggcggtagagtgaagactttgcatccagccgttcacggtggtatccttgccagaaacatcgatagcgatgagaaagacttaaaggaacaacacatcgaaaaagtcgacttcgttgtctgtaacttgtatcctttcaaggaaactgttgccaaagtgggtgtgactattcccgaagctgtcgaggaaattgacattggtggtgtcactctattaagagctgcggccaagaaccacactagagtcactatattatccgatccaaaggactactccgaatttctgggtgagctatccaacaacggtgaaatttcccaagacttgaagaacagactagctttgaaagctttcgaacacacagctgattacgatgcagcaatttctgattttttcagaaagcaatactctgaagggcaagcccagatcactttacgttacggtgccaacccacatcaaaagccagctcaagcctacgtcagcgaacaagatagcttgcctttcaaagtgctatgtggctccccaggatacattaatttgttagatgctctaaactcatggccattagtcaaagagttatctgcttcgttgaatttgccagctgcagcctctttcaagcacgtttcaccagctggtgccgccgtaggtatcccattgtctgatgtggaaaagcaagtttattttgtcgctgacattgaaaatttgtctccattggcatgtgcctacgcaagagctcgtggtgctgatagaatgtcttcattcggtgactggatcgctctttccaatatagttgatgtaccaaccgccaagattatctcaagggaggtctccgacggtgtcattgcccctggttatgaacctgaagctttagccattttgtccaagaagaagggtggtaagtactgtgttctacagatcgatccaaactatgttgcaggctctgtcgaaagaagacaagtatacggtgttactttggaacaaaagagaaatgacgctataatcaatcaatctactttcaaagaaattgtttcccaaaacaaaaacctaaccgagcaggcggtaattgacttgacagttgctaccatcgctttgaaatatactcaatccaactcagtatgttacgcaagaaatggtatggttgtcggattgggtgctggtcaacaatccagaatccactgtacaagattggctggtgagaaggccgataattggtggttcagacaacatccaagagttttggaaatcaaatgggctaaaggtgtgaaaagaccagaaaaatcaaacgctattgatttattcgtaactggtcagattccaactgaagaaccagaaaaatctgaatatgaatctaagtttgaagaacttccaaaaccatttacttcagaagaaagaaaagattggtcgagtaaattaaccaatgtatcgctatcttcagatgcgtttttcccattccctgataacgtttacagagccgtcaaatctggtgtcaaatacattgctgctccatctggctcagtcatggacaaagtcgtcttttcagctgccgattcatttgatttggtttacgttgaaaatccaattcgtttgttccaccactag

SEQ ID NO: 1994 - DNA, 615 bp, Saccharomyces pastorianus
atgggtgcctacaaatatttggaagaattgcaaagaaagaagcaatctgatgttttgagattcttgcaaagagtcagagtctgggaatacagacaaaagaatgtcattcacagagccgctagaccaactagaccagacaaggctagaagattgggttacaaagctaagcaaggtttcgttatctaccgtgtcagagttagacgtggtaacagaaagagacctgttccaaagggtgctacttacggtaagccaactaaccaaggtgtcaatgaattgaaataccaaagatccttgagagctaccgctgaagaaagagttggtcgtcgtgctgctaacttgagagtcttgaactcctactgggttaaccaagattctacttacaagtacttcgaagttatcttggtcgaccctcaacacaaggctatcagaagagatgctcgttacaactggatctgtaacccagttcacaaacaccgtgaagccagaggtttgactgccactggtaagaaatccagaggtatcaacaagggtcacagattcaacaacaccaaggccggtagaagaaagacctggaagaagcataacactttgtccctatggagatacagaaaataa

SEQ ID NO: 1995 - DNA, 246 bp, Saccharomyces pastorianus
atggccagctcttcatccgtttcctcttcctctgtccagaccaacagtgctctagtcaacaacagtgccgtagctgcctcttctgtctctgccagtgctagtgccagcgccaactcctccggtaacagcactacctcttccaagaacgccgccccaggtatggttgccaacccagtctcctggaagtacggtgccgtcatggctgccatcgccgccggctctttcgtcctaggtgccggtatctaa

SEQ ID NO: 1996 - DNA, 2895 bp, Saccharomyces pastorianus
atggatgcaggtatttcagccatggctccacgaaacggccagccttctgcaagagcacaattaaggaataatttactgaatagcgatataggaaacattgacattcgagaagaaactcccatttcaggccaggaaaaaaatagcagtaacatcagcaaccagtccttccccatgccacaacaacagcaacagcaacaccagatcccccaacaatactatcgcaacaattccaatgaagctccgatgccagttccagtgcaatatccgcaaatgcctacgcaaatgcatccgcagcagcagcagcagcagcaatatgactttgggtactccgatccatcgacgaatggaataccagtaatacagcataattttcctaaaccaacaccaagcaataatcggaacagtactaataccagaaagtcatcctctctaactcaaagttcattttccaatttcttcaagcataaacatcaatttggtaagtccaagaaaaaaacaaaaggcggagctggagatggtgacgatgatgacgacgtgatcatggaagattctaccagtgcagacttaactttcaatgatatccagacgtttggccacaaaggtggcgacaagtacggatacggcggtgactctacacctatcatccccactttagtgactaaagatcgcgggaatatgactaatactgaatataggaagtacctcacgaatcaaagaaaaattgcaatgaacgccatggcaaagcaaacccaaaatgtcggggcagactcgttgccgcctagagcaatgtctttgcaaagtttcccgaacggtaatcctatggtgcaagctcccactccacatccgttattccaaccgaacaacacgatgaatcctaataactcaaggtcaaattcattaatgagtgggcctcctcgacaatttcagcagcagcagcagcaacaaagaggacctccgttgaatcaatataataaccgaccaggacaatttcagaatccttctcaaccggttatgcgtcctggccaacaaccacctcaacaaccgcgtgctatgtcattaaccaactcgccaagatactcgcctcaaaatgctagaccattcgtgcctcaacagcagataccgcaaagacagcaacaactccagcagcagataccgcaaagacaacaacaacaacaacaacaacagatgtctcagaattaccgtgcaatgtcattacaagctcaaaacttacctcaagggccgaaccgagggaacctaattgacggtgatcgtagagcaatacctgctaatcaatcaataggtccatcctcaatttcctcacgaaataattcagcttattcaataccaaatgtaaaaaacaaaccaccaaccgcatcttcttctttctctactacttctacttcctcctttgtagatggtacagcagtacctgatttggcaacccaaaagtcttcacctttacggaagcaaattaacaacaacctagcaattgaaaacaagggcaagctaaacgttttgcagttgtctgctcctcagcaagatgaactaaaggaaaaggaaagagaattagcagaaatggagaactccttacgtgaaagggagctattaatagcgcaaaaagaaagggcaaaaatcgaaactgagaccaaggaatcgaaggaaaccttgcgagaagaagatgatttaaacctaaggcctacaagtgcactagaaaccggcttaagggacctttcattggaaggtgaaaatgcggtggctaataggtcgtctttagtcaccttttcatccacattcagtgattctccctccaagcaaaaaatttttaatgccagaactggtatgtacaaattagaaaattctaccgatattaatgaatacgttacagctcaagaatttcctccacctggacaaaatgatgccaatacagataacgttgaagccaaaacaatggatgaaagcaggtcaggttacaatgatagcaacagaacttatttattgcaatctataccggaaagggacccaaaaagaaacatcccagtgggtactatcaagcagggtcaagccagtagccatgacaaaagactaagcaatgttaacatatctatgaatcaagaaaatattaacaatgacactttcctgtatagaaagaacgaccgcgatggtcacttatcggcggtttcctatatgtccggctcctctcgtagatcgtacatatcaaatacacagccattgaatattgaccccactccagaacctgataatttcatgcccaatatggacggttcacctttaaaaagaagcattgctccaattgccaaaatcaatgataatgatgatgatgatgatggtgatgcgaatgatgctcaagaagatttcagctttgataatactctggctaagtcgtatgaaccatcttatgctaaaagagaaattgcttctaccgcgttaaacggtagagaaagcggttctcagtccaagatgataactatatcaggagaacaattaaacttgataacggaaaacaaagaactgatgagcgaactgactcttgtctccacagaattagctgaatcgataaagagagaaactgaattggaggagaaaatacggttatacgaaactaataactcaacaccgaacttcgatgacacttcatgcgtatccttttctgattttgagaaggaactaaggaaaaaatctagtaaaattgtgcaattgattcagcaactaaacgatgagagattgaagagatttattgcggaggaacaactattactacaagaaaatggcatcaagcccagttctatagaattggtggcaaagatcgaaaacttgaacaaactcattgacgaaaaggattcagaaatcgaaatgcttaaaagccatctgcaatag

SEQ ID NO: 1997 - DNA, 1029 bp, Saccharomyces pastorianus
atgtctgggctagcgaaactgaagtcgtggctgtataagggttccctctttatatcattgatacttttgattgggttttcagtagtattgcctatagattccattgcacaggcttctaaatcagagaacaatgctttcaacacatttattgttgttggtgccttagttgtttttggtgttgtttgtatcgttattattattggaagagtgctatttcacaaaagctgtctaaaggatattccaagaagatatattccaatcacaccagctgatcttccgcatcttgcgagtcgagaagcagtattgaaaaacatggaaaggtctaaggaattaactattctgctaaaaaaaccaaaggatcctgttatccatgatggactggaacctccaaagcgatgtgattttccatcaaatgaaaaattatttccagaatacctaaattatgctgattgtataaaaagtctaacggatagattgaaataccatgggttgtttctgaacaacctagatgttaggatgaaactggaggacacttttgctgatgtggtgaattctcagtttgttaaccgcaatactaacaaggttcaattgcaaaaggctaaagattttattgacttgtatgaaacgataagattttcaggcaaagatgtcacaagagaccaatttatactgtttgttgagctgtgtctttattttggggaggtgtcactaacaagggatacgtcatttgcaaatttccagaattttaaatataatgccagttcaaataatggcggaacaaatgaatcgaaatattcaataaaccggttcgatgaaaacgaatacgctcaggaagatatgcattactttcctgaaccgcctacccatttggttagagagagtagcagaagcacagtggcacggcatatttcatctggtggagatttacctaattctgaagagcatcctttagaagacgattctgattgtaatgggcttaatgacaaacttgcagaagttcacagttatagaagcgtaattcgtcattaa

SEQ ID NO: 1998 - DNA, 1017 bp, Saccharomyces pastorianus
atggctggatcaatagaccaatcactcataacaagtacacaacaacttaaaggaaaaaaaaatggcgagaaagataagaataagtcctctgtcaacttgaaaaaagaccgcaaagagatgctatatggcatattaaacgaaagaaacataaggcaaattcagtttggtgtgagtaaaagattccctacgtggtatgggagcgcggtttattttgatccagaaacaaaaagattaggatgctctgagtccaggagtcaggttcactccggatccaacaaccaatactggctagataccctgtttgtttgtgaatactgttttaaatataccgacgatcagacagtgtttatagcacatgccgcagcttgtccatttcagaaacatgctccaggcaaaataaaatacaagagtcccgaatacacaatcagacgagtgaaaggatccaaatatcaactgttttgccaatgtctttgtctttttacgaagttatttttagacaacaaatccatgtactttaaagtagatcattacgagttttacgtagtttatgaaactggatcaacaaagccaatggggtttttttctaaggatttggtttcgtatcaacaaaacaacctagcatgcatattaacactgccaccatatcagagacgtggattaggctcattacttattgagttctcatataaattatctcaattagaaggcgttatatcagggccagaagtgccgttatcgcccttcggattgattgggtacctgaaatattggtcacgaatactctattggcatctcattgaaggagatctcgcacattttgataaagtgagcttggaagatctttctattgtgactggaatgagagtcagtgatattattctgactttgaagcacttaaactgtattggtgaaaataatcaaatttacttgcaatccttgaatacttggttcaagtcaaatggagccaaaggcaactggtttaagctgcaagatgaatacttgcttatagatgactag

SEQ ID NO: 1999 - DNA, 909 bp, Saccharomyces pastorianus
atgacgtatccaaaaagaatacccttaaatgcatggtctgatgccctgaaggcagccaaaccactaattattacttttgatgcgtacaatacgttgtacgctacaaaactgccggtaatggaacaatattgtatagttggacataaatacggtatcaaagccaaccctttgacgttaactaagaacttcccgcatgtcttcaagaaactaaaagaaaactatcctcagtatggaaaattttctaatattgggcctgaagaatggtggtccagtttgataaagaatgtttttgcaccaatcgaaattcccgatgagatggtgagtgaaatattgctgcggtttgagggttttgattcatattttgtttatccagatttgatcagtttcttgaagaatgtaaaggcaagataccctaatattattctaggaataataagcaatactgatccaatcttttacaaattactgaaaaacattgggttgtatgaaacattcgccgataatatttatttatcatatgagcttgacctggcaaaacctgataaggccatatttgaatatgcattcaacgatattatagataagcgtcctgatttgctgaaggtgtactctaaggaagaaatttgccagcactgtttccacatcggagatgaactaaaaaacgatcttgaaggtgcagaaggtgccggttggactggaattctgttggatagaaatgacaaatacggatatctatcggagtcacttgacaagactgtcagagatgagtataagctatcacttgacaaaatagataaccattctataaagacttgggaaacaagtagcaaacaaacagacactatacagttgaataaaaaaaaatatgttgtttcaaaccttgaggttttagaagagctatttccttaa

SEQ ID NO: 2000 - DNA, 1536 bp, Saccharomyces pastorianus
atgtcaaaaaggtctattgatattgatgagcaagagagagttgtctccgctaagactgattctcattcagtccctgctgttgctccatcaggagagcaagatgctcccatggacgagctggaagaacaattgagtgatgagttcgatagtgatggtgagatcattgaaattgatggagatgatgaaatcaatgacgaagacgacctcaaaaaaaggcaagaacaagctgaaactttagtgcagaaagaccaatctgaaggcaacgaagagaagatccaagaactatacttgccccacaagtctcgccccctaggtccggatgaagttctcgaggccgatcctactgtttatgaaatgctacataatgttaacatgccatggccatgtttgacattggatgtaattccggatacgttaggtactgaacgtagaaactatccgcagtctattttattaactacagcgactcaatcatcgagaaaaaaggaaaacgaattgatggttttagctctttccaacttaacaaaaactcttttaaaagatgataatgaagaagaagatgatgaagaaggagaagacgaagaagacgtggatccaataattgagaatgaaaacataccattaagagatacaactaatagactaaaagtttctccgtttgccgcttctaatcaagaggtattaactgccacaatgagtgaaaatggagatgtttatatatatgatttagccgcacaaagtaaagctttctctacaccaggttatcaaatcccaaagtccgctaaaagacctattcatactgtcaaaaatcatgggaatgttgaaggctatgggttagactggtcaccattgatcaagactggcgctttattatcaggtgattgctcaggtcaaatttatctcacacaaagacacacttccagatgggtgactgataaacaaccatttaccgtttcgaacaatgaatctatagaagacattcagtggtctcggacagaatccaccgtttttgcgacagctgcttgtgacggatatataaggatttgggacacaagatcaaagaaacataagccagccatctctgtcaaagcctctaataccgatgtaaatgttataagttggagtgacaaaattggctatttgcttgcaagcggtgatgataatggtacttggggagtctgggatttgagacagtttacaccaagcaatgccgacaccgttcaaccagtcgctcagtatgacttccataagggtgccattacttctattgcatttaacccattggatgaatctattgttgcggtgggttcagaagataacaccgtaaccttgtgggatttatctgtagaagctgatgatgaagaaattaagcaacaggcggctgaaacaaaggagctacaagacatcccaccccagttattatttgttcactggcaaagggaagttaaggatgttaaatggcacaagcaaattccaggttgtttggtaagtaccggtactgacggtttaaacgtctggaaaacaatcagtgtttaa

SEQ ID NO: 2001 - DNA, 714 bp, Saccharomyces pastorianus
atgtcattgaaagatagctatctagagctcgagtcaaaattaataaaaaaattacaagaattaccatatgttcatcagtttgtccacgatcgaataagcggtagaatcactctttttttaatggtagtcggtacgcttgcatttttcaacgaactttatataaccattgagatgagtcttttacaaaaaaatacatccgaggaactagagcgcggaagaatcgatgaaggtttaaagcttcacaggatgctagtcagtgatgaatatcacggtaaagagtacaaagacgaaaaaagcgggattatcattgaagagtttgaggaccgcgataagttttttgcgaagcctgtgtttgtttcagagctagatgtgaattgtaatgttattgtaggtggcaaagaaattttgtccactccattgaaattccatgtggagttttcaccagaagattacgaaaatgaaaaaagaccggaatttggaactagtctgcatgtgttaagactaagattgtatcattattttaaagattgtgaaatataccgtgatctgattagggataaaggtattgatgagacaagaaagttcacaatttccaacggtgttaaaatctacaaccacaaagatgaactactgccattgaatattgatgatattcagttgtgttttctgaagatcgatacgggaaatacgataaaatgtgagtttgtattatga

SEQ ID NO: 2002 - DNA, 1404 bp, Saccharomyces pastorianus
atgactatttctacgctgagcaacgatggtgccaaccgcagttctggtggcaacaccaagaaggacggggccgcggcgaaggagtgtacctactggaagaagtgcttcaccagggaggagtggaaggagcaggtggcgaagtactcgtccatgggcgagttgtacgcgaacaagaccattcactatccgctgaagatccagcctgacagcaccggcggtgccggtgctggtgctggttccggagccggggacgaggggttctctagcgtacagaccatgccgattgagcccacgctgccgcggcttctgctgaactactttgtctcgatggcctatgaggactcgagcatcaggatggccaaggagctcgggttcatacgcaacaataaggatattgcgctcttcaacgacctgtacaagatcaaagagcgcttccacatcaaacatctcatcaagctgggacacattaacaaggcgatggacgagataaactcgatattcgggctggaggtgctggaggagactttcaacgccacggaaagcgatgcgggcagcacgggaaacgagcagcagcagcagcagcagttcgatatagacggggacttgcatttcaaactgttgctgctgaacctgatcgagatgataagaagtcaccacgaacaaaagaatggtgccgaagactcgaacgatttcatcctcaatctcatccagtactcccaaaagaagctcgccataaaggcctcgtccagcatcaaaaaaatgcaggaactagaactggcaatgactctgctgcttttccctttatccgattccgtcgatagcagcagcatcaaactccccaagtcgttacagaatctgtactcgataaccttaagggccaagattgcaaacttggtcaatgagaaactgctcaaattcattcacccgaagatccagttcgagatccataacaacaactcgaagtttcccgatcttttaaactccgacaagaaaatcatcacgcagaacttcaccgtgtacaacaacaacctcatcaatggttcaaatggcacgaaaataaattacatctcttccaaccaacccattagcgacaaaatggcaagcagcgacacgaccgctaccagcaattcggtttggttaaaccaccaagacaccaaccatggaacaaacacaagcgcgaccaccttcaagaatttggaaaacaaaaactactggaaccaagcgtccgaattgttaaccgccagcgctgcttcgaacacaaagacaaagaacttgcagttcaacaactactcctcttctgaattcccctatgaaccaagattgacgcaaatattgaaactgtggtcctggtgcgaaaaccagcttcaccgcaaccaaataggcgtgcctaggatgaaaaattaa

SEQ ID NO: 2003 - DNA, 1710 bp, Saccharomyces pastorianus
atgcaggctcctaatgtttaccccttccctcaaccgcaattacaacagctgcccaggtttcagtacgctcccacgcaactcgtgcttgaccagtctgctccgcgggtagatcctctgcaagcgggagtagctgtaaatcccgcgttaccgatgcagcactataatattcacagcacgcgtagcagtgataacataaataactacgcgtattattaccatcatcccgataataacgataacactacgagtacgacgactcccactaataacatcaataataataacaaccctactcttcctgttactggcattccggtgcccaatagctctctttatagaaatacaaaccaatttccttctgctcctcagcgcttgcttagtattataccggaccctcatatggcacccaacatttctcattatcaaccaaataatattcgtcctcaaatgcgtgtctctattcctcataatattcattttcaacaaatacccacctataacaacactaataatagcaacgataaccctgtaggctcgaatgaaaatgagttgctggacaacatcaacgagcgttaccatcacgagctaaacaagatggcttcattttccaagaatttcgaaaacaatgaactcacaaccactcccagcaattcaaatatccaatccaccattgacgaactgacaaaactgaagtatctgtcgagttcttcccattttaagcagaacatcgccatacaaaattactattctcttcagaatcacatcgctactattgaaaaccgtttgactggcttgctcaatgatagacagcagcagcagcagcagcagcagcagcaacaacaacaacaacagcagcaacaacaacaacaacaacaacagatacccgaaaactctaactctacatcaccatctaataagataaaactaccttccctacaggaactaactaaatctatatccacccaacatcccacaaccacatatgtcaataaaagacatgcttcagattcagatacaaagctaacaactacccatcatccattataccatcgtcacacctttctctccgcctcgtcatcctcgccttctccctctgccggttcagtgcccctccagaagctacaggttccaagactggacgaaccaagtgacgcaaaaagtaacttatcatcgtctcccttcaatttgattacctacataccgagtactaccttgtctcccaccgtgcaaacacagttgaaaaacaatactacgtccagcaaaatcacaaagaagaaaaacaacagaggtagaccaagagctattcaaaggcagccaacgctcactacctctactcatttcataaacaactccggcactgccgccgctgtgactccaaacgctgcccccgcaactaataaccatgaaaaggaaaccagccccaaaaaaataatcgaattctgtttccactgtggagaaactgaaactccagaatggagaaaaggtccatacggtacaagaaccctttgtaatgcgtgcgggctattttacagaaaggttaccaagaaatttggttcgaaaagcagcaatttactactaaggtacagaagagccattgattcagccaacgatcgtagaattcctgatttcatcaccattccaaacagattcatccatgatatggataaggaccaaacgttagattctgaatataatacaatattacaatag

SEQ ID NO: 2004 - DNA, 2004 bp, Saccharomyces pastorianus
atgccaagaaggtctatagtacagataaagaggtccgaggtaaaacgaaagcgaagtggcgttgattatactgcaaataataagacccatcataagacacatcataaaaatacacatgcgtccaccaaaaggcaaaggactttgactgaattcaacattccaacttcctcgaacttgcccgttcgttcgagttcacgttcgtctccaagggtcggtcattccgcgtctaatacaagtatagagccgatagttattgatgataacgatcaaaacagtacttgttctgacagcactgagaaagttgaaattgtcttattcacagatgaggaagagaatctggtagagctggacgatgaaaaaataaaacccgagatagaccgtcaagcaagggatggaacagaagaccgaataagagtagaaatcgaggagcacataaatgttgaaatctctacaaatgtgattagatgtcctatttgctgtttgaatctttctcacctagagctgtacgagagagagacacactgcgaaatgtgcgtaggaagtgcacgtagtaaccagggatcacccaaaaggaatgttaagattccgatccctaaaccgtcatctgccataaaaccaaaaaaggactcaactccattaaagagaccagtcagggttaaacctagtttaccaagcttcaaaataatcaagttcagcaacgatcacaaagtagtcgttgatggtttcaactataaagctgacgaaactatctctcaatacttcttatcacatttccatgccgaccactacatgggtcttaaaaaatcatggaacaatccggatgagaatccaatcaaaaagactctttactgttctaagatcacagcaattttagtaaacttaaaatttaaaattcccatggacgagatccaaatcttaccaattaacaaacgattttggataacggacacaatctccgttattccattagacgctaatcattgccctggtgccacaataatgcttttccaagagttccctgcaaaatttcatgataagcctatcagacaagttttgcatacgggggatttccgaagcgatgctcaaatgattaagacagttcaggagtggttaatcgagacggcgaatgacacaatcgatcaagtttatttagatacaacgtatcttactatgggctacaattttcctccacagcagtctgtatgcaacaccgttgcacagttcactttgcaacttcttaagcaaggtaaaaacaagacgttcggtgattcacaaaggaacttgttccatttcagaaaaaaaatgtcactaacatctcaacgacacaaatttttgtttcttgtgggtacatacaccattgggaaagagaaattagccatcagaatttgtgaattactgaacacgaaattatttgtgatgccaagctcggttaaatttcaaatgatgcaaatcgttttgcaaaacaacgaaaacgagagcgacaaatgggacgaaaatttactcactggcgacatgagcgaatcgtttgttcacttggtacccattagagtgctgaagagtcaagaaacaattgaagcgtacttgaaaagtttgaaggagttggatgccaactgcttaaaggacgtcgatgacgtggttgggtttataccaacgggatggagtcataactttggcctaaaataccagcaaaataatgataatgataatgaaatggatggtaataccgaatattgtttggaattaatgaagcatgaaggagatgacgggaaggagtttgagatatccagtatattaaggcagtacaaaaaatacaacaagttccaagtcttcaatgtgccgtattccgagcacagtagttttgatgacttggtgaaatttggttgtaagttgaattggtccgagatgatacctactgtgaacttacataatttatggaaagtgaaatatatgacaaattggtttaaatgctgggaaaacatacgaaagatgcgggcggctaaatga

SEQ ID NO: 2005 - DNA, 1113 bp, Saccharomyces pastorianus
atgaacattcaaagtagcaatcctccgaatctcagcggtaacatagtgtctaaacaggtttactacgcccaccccccgccaacgatagatccgaacgatccggtgcagatatcttttcccactacagaggtagtagggcatggttcgtttggcgtggtatttgcaactattattcaagagacaagtgaaaaggttgccattaaaaaagtcttacaagataaacggttcaagaatagagaactagaaataatgaagatgcttagccatactaatataatagatttaaagtactttttctatgagagagattcccaagatgagatttatttgaacttgattttggagtacatgccgcaatccctgtatcaaagattacgccatttcgtccatcaacgtacgccgatgtcaagattagagataaaatactacatgttccaattattcaagtcgctgaactatttacatcattttgctaacgtttgtcatagagatattaagccgcaaaatctgttagtagaccctgaaacctggtctttaaaactgtgtgattttggcagtgcaaagcagttgaaacctacggaacccaacgtttcttatatttgttcacggtattacagagcaccggaactaatttttggcgccaccaactataccaaccaaatcgatatatggtcttctgggtgcgtgatggcggaattgttgctaggccaaccaatgttcccgggtgaaagcgggattgatcaattagtggaaattattaaaatcttaggcaccccatcaaagcaagaaatatgctctatgaacccaaactacatggaacataagttccctcaaattaaaccaataccattgtcgcgtgtttttaagaaagaggacgatcaaacagtggaatttttgactaacgttttaaaatacgatccttcggaaagattcaatgctttgcaatgtttatgtagcccatattttgatgaacttaaacttgatgatggtaaaattgaccaaataactaccgatttaaaattactggaatttgatgaacatattgaactaggtcatttatcgcctgatgagttatcttccgtaaaaagaaaactcttccccaagtccaaataa

SEQ ID NO: 2006 - DNA, 1464 bp, Saccharomyces pastorianus
atgggtaacgtaccagggaaacttgatcaagaagacggctataatgattctagaccgaattcatcgaataacgttacatcgctcagtaccgacaaacaatatgacgatgagatgtcttcccgggctaggacaagacacacaacgtctttggtcaataacattttgagtggcaacaatacccgttcaagagctagctcaaatatatctggtactagtagaagaaagacatcacgagaaaaggagctagctaaagaagcacacgccaagcaattggtcgtaaggtgtaatgaaaccgtggacggtggatttttagccccatttggttgctattcttttgaaaaattagactatgacacgaccgttattaaagacttaataaccaaaagaaaattagcacccttttacactcccctacaggatttcgatgaaagttggactagagacgagttaataaagataattgacggattgccattacacgatacgtttgatgaaaaattggaagagtttgaagatgtaccgataggtaatttgaggaagcctacatataatgatctaatagataaacctttgtccaaaaaggaacagaggagaatgcatgcgaaaatttttagagcaaggttatataaaaaaagaattctatggcaagaaaacgaaaatgagtcgtttctagagaaaaagttagagttgagacagcttggcgataatactaatagcgttggtgatggcaatagtagctgtctgaaaacaaattatcatctgccctcagatgatttaaagtatacgctttacaaaaatggatcagaatgtccgatttgttttctttatttccctgaacccttcaaccactctaaatgctgtcaacaacctatttgtaccgaatgtttcgtgcaaatcaagagagctgaacctcatttccctcatgatgaagtagaccctactaatccaccaacaaatgacagtgaaaaggaccctaatcttctaacttccgaaccagcaaattgtccttattgtgcaactgccgattttagcatcacttatcagcctcccacaaatcgtaaaactggactcggtggtatatcccctgatacttacgtgtatatggcctccaatacagagaaaacgaacggcaaccagttgccttcttcggtgatcacttcagatactattcgtccaagttgggaaactagactaaataaggaaaggtctagactggtaagaaggtccgccaacgctactgccatacatataagcaatagactgattgatccaaatcatagttcaagaagaagtacgggtcctagtggaacgcctattcaagaagaaagtacatcaaattcaagatcacctgaaccgacaataaatgaaatcgaagaccaaatggtcagagaggctatcagattaagtctcgaagaccaagataaccaaaaaaagtcaaagaataaatctattttacgaccatag

SEQ ID NO: 2007 - DNA, 1683 bp, Saccharomyces pastorianus
atgattaggcaatcattaatgaaaaccgtttgggctaactcctctaggtttagtctacatggcaagtcgggccttgtcgcctgcaccaaaagcagatcctttagcagtgctaggaatttgctacaggacaaaaaagttattctgcaaaaagttgcacccactaccagtgtggttgcgaagcagtcctttttcagaaggtcaggaaagttcactttgaagttgctgttgtattcagccttggctggtaccgcctacgtctcctattcgctttatagagaggccaatccctccgcacaaattcctcagtcggatactttccccaacgggtccaagaggaagacattgatcatcctgggctccggctggggatctgtgtctcttttaaaaaacctggacacctctttgtataatgtcattgttgtttcgccaagaaactatttccttttcactccgttattgccatctaccccagtgggtaccattgaattgaaatccatcgtcgagcccgtcagaaccatcgctagaagatctcatggtgaagtccattattacgaagccgaggcttacgacgttgaccctgaaaagaaaacaatcaaagtcaaatcttctgcgaagaacaacgactacgatttggatttgaaatacgattatttagttgtcggcgtgggtgctcaaccaaacacttttggtaccccaggtgtttacgaatattcttcctttttgaaggaaatctccgatgctcaagaaattagagtaaaaatcatgtctagtattgaaaaagccgcctctttgtctccaaacgatcctgagagatcaagattattgagctttgttgtcgttggtggtggccccaccggcgttgaatttgccgctgaactaagagattacgttgaccaagatttgaaaaagtggatgcccgaattgagtaaagaaatcaaagtcactttggtggaagctttgccaaatattttaaacatgttcgataagtatcttgttgattatgcccaagatttgttcaagcaggaaaaaattgacttgaagttgaaaacaatggttaagaaagtcgatgctaccactataaccgccaagactggtgaaaatgacgttgaaagtattccatatggtgtcttagtttgggctaccggtaatgctccaagagaagtcgctacgaacctaatgtccaaactggaggaacaagattccagacgtgggttactaatagacaaaaaactacatctattgggtgctcaagactctattttcgccatcggtgattgtacattccaccccggtttatttcctactgctcaagtcgcccatcaagagggtgaatacttagctcaatgtttcaagaagacttacaaaatcgaccaattaaactggaaaatagccaatactaacgacgattcagaagccgctagattgaagaatcaaataattaaaatcgactcccaaattgaagacttcaaatataaccacaagggtgccttggcctacattggttcagataaagccatcgctgatcttgctgttggtgaagccaaatacagattggctggttcattcactttcttattctggaagtcctcttatttagcaatgtgtttgtcctttagaaatagaatccttgtcgctatggattgggctaaagtttatttcttgggtagagattcatctgtctga

SEQ ID NO: 2008 - DNA, 1044 bp, Saccharomyces pastorianus
atgaaggctattaaattgacaggtcacgaacgtccattaacccaggtcaaattcaataaggaaggtgatttactattttcatgttcgaaagatagttcagccagtgtttggtactcgctaaacggtgagagattgggtactttggatggccataccggtactatctggtctatcgatgtcgaccgcttcaccaagtactgtgttacagggagtgctgattatagtatcaaattatgggatgtatctactggtcaaagtattgccacatggaaatcgcctgttcctgtgaagagagtagaattttccccatgcggtaacttcttcctggctattttggacaatgtcatgaaaaacccaggttccattaacatatacgaaatcgaaagggactccaccactcatgaaatgacaaaggtctctgaagaaccaatccataagatcaccacccatgaaggcttggacgctgccaccgtggcaggatggtccactgagggcaagtacatcattgcgggtcacaaagatggtaaggtcagtaaatacgatgtgactaacaactacgaatacgtggattccatcgacttgcacgaaaagtccatcagtgacatgcaattctcccccgacttaacatatttcatcacatcatccagagacaccagctcgttcttggtcgacgtgtccaccctacaagtcctgaagaaatacgaaacggattgtccattaaacaccgctgtcatcacaccactgaaggaatttatcattctcggcggtggtcaagaagccaaggatgtcaccaccaccggcgccaacgaaggtaagttcgaagccagattctaccacaagatcttcgaagaagagatcggcagagtgcaaggccatttcggtcccttgaacaccgtcgcagtcagtccacaaggcacaagttacgcctccggtggggaagatgggttcatacgtctacatcacttcgaaaaatcgtacttcgatttcaaatacgatgtagagaaggctgccgaggccaaggaacacatgcaagaagctaattga

SEQ ID NO: 2009 - DNA, 456 bp, Saccharomyces pastorianus
atggtttccgtcgctacatttttctttttcgtctacttactactatttgtagtgatcgggtttttctcctcattgttcataattcccttactaggcatatcatttgtatttgctatcggtgtggtatcgtttggcttctgcagcaatatgagtttcaaaatggcgcaacttgtatacattcgagcagatgccttcttgaaaaaagtactagatagaatggcttcacaaacacaacccacacaaccacaagagccacaagaaccacaagagctaccagcaacactaaggccagtaagcaatccaacgattccaagcccactgagacaaacagcacgtccctcaaagttcgtcactgaagaagatgtcatctttgaacccgttagcgctcaaagcgccattgctcgttctttagagaccaccgctaaaaaagcgggtaacaggttccagctgtcttga

SEQ ID NO: 2010 - DNA, 861 bp, Saccharomyces pastorianus
atgcaatttttcaaacagcttgtggttttcgtggcgtgcataacctttgccctcgcttacgtggctcaagatgttcatatttcattccccactactaagggcaagaatagcatgatgattggtaaaatcagccccgggctcggaaaggacgatgtcgctccaacatcaatcacagtagataacgctaatgaagtcattgaagtaaatttcgccattgactccagcgacaagcctttccaaaactctctattggttggcctacctgataacaacctagaaatggtttttgaacctgaaatcaagaataacggtaagttgtccatgtacaagtacaagatagatctagccacgttagattctgccttgttacaacaagctttcaagtcactggagccaatacaggcaactttgatcttagcatcctctacagccaaaccgaaagataatttgttccggagggttttccagctggacttggattttgaattcgatcattctgatctatctctcgctggcaagttcgacattcaacctgaaattcgtcacgtcttccacactgagccaaaaagagttgccaagccaatagcccgaattttcgttgtaattatcttcttcactattttgtcgttgctcgtcacctgggtgaattcttgcgctgctgcatttgataatatccccactggcgccaatgccctgtatttcttaggtttcgtcgcgactatcattgggtttgaaattatcttcgccagatattatttgggtacaagcattttcgaaaccttattttcctctttgtacttgggcgccccaggcttgttggcgtctaccaaatttctgagatattttggtcaaacaatctaa

SEQ ID NO: 2011 - DNA, 570 bp, Saccharomyces pastorianus
atgactgttggtgcactgcctatttggtcaaagactttctcttatgcaattagatcattatgcctactgcatataattcacacgtatgcgtacgagtttactgagacaaggggagagtctatgctgccaacgctatcagccacgaatgattatgtgcatgtcctgaagcatttccaaaacggcaaaggcataaagatgggggattgtgtagtggcgttgaagcccaccgaccctaatcatagaatatgtaagaggattaccggcatgcctggtgacatggtgctcgtcgaccccagcaccaaagtaaatcatatcggggatgtgttggttgatgaagagaggtttagtacttatattaaagtacccgagggccatgtttgggtaacaggagataatctttctcattcattagactcaagaacgtacaacgcattacccatgggtttgatcatggggaagattgtggcggctaataattttgataagccattctgggattcaagacgcaatatttgggggtttaaatggatcaacaacgccttcgtggatgcaagtggtgagagcaattga

SEQ ID NO: 2012 - DNA, 1098 bp, Saccharomyces pastorianus
atgtcggacgaagtggtgactaatcgagctgttacttacgctaacaatacaacacctgctacaattacgtcttcgaagctggatttaaaaacctgttataaaaataatgaacttgtgatcgaggtccatgctgctgctttgaacccgattgactttattactcaccagctctgcaactcttatatatttggaaactatccaaagacctactcaagggattacagtggcgtaatagttaaggtgggcaaaaatgttgataagtgttggaaagttggcgacaaggtgaacggtgtgtatggccatatctacggtaagcgcggttctttgtcccattttttaatacttgaccctgctaaaaatgtcgccatcactcatatggtagaggttcctaagggcgaaaacgacccttatgacgactttgtatatgcagccgcctggcccttaacttttgggactgcttattcggtcttgcacaattacaagaaaaaatggagccctgattcaaaggtcttggtcatcggcgcctcgacatccgtgtcatatgctttcgtccatattgcaaagaactactttaatatcggtactgtagctggtatttgtagcaaaaattccattgaacgcaacaagaagttaggttatgactacttggtgccatacgatgaaggaaccattgttgataacgtcaaggcattaagaaaaagcaaattggaaagcgaaaaatttgattttattttcgattcagttggcaatcatgattttttttctgttatgaaccgatttttgaaacctaaggcggatgattccttttacgttaccattgtagggaatgaaaaggccaattatgaaaatatatcttggaaaagttttatctccttgggaagcatatcagcagcccttaatccgttcaaaagtttcaactggcgttttgcttcgccaacgccctccaacaacttcattgaagttggtaatgaaatgattaaaaacggtacctataaaccacctattgattctgtttacgagttcgaaaaattccaagatgctattgacagaataaagtctaataaagcgaagggcaaagtcgtcattaaaatgaaatga

SEQ ID NO: 2013 - DNA, 1530 bp, Saccharomyces pastorianus
atgacagtccttcaaaatccagaaaacagtagccgatttactaatgtgtctgttattgcacctgaatcgcaagggcaacaacaaggacaacaacaacaagaacaacagcaacagccacaaccgcagcagcagcagctgctgctgcaaaagcaggtgcaggaccaatcgcagcaaccgcaaccgcagcagcaggaaccgcaaaaacagtcaacaggaacacttaagactttaaatggcttttcaagtgtacagcaaccaatattcacagcaaacacaccttctacgccctccgcagatttgagcgacaatccagcatggttcaataatccaaagaaaagggctataccaagctcgatactcaaaagatcaaccggccagtctttgagcccggtacgcgatactgcagatgcgtctgttacgttgtccaagcccaacgggttcaacaatgttacatttggctctaaaaaggacccacgtattcctaacaatgtctttcaaaatgacggcagtaacaacaccaccaacaacagtcacaatcacgatttaaatgctatagtttttgattccaatgaggctccacccaaagcttctctggcggattggcaaaaagaggatggcatacttgcgattgatagtgacaatatcgaagatcctaatttaactgccaacatgacacttgatcagaaactaacaactcctttttcacccttcaagcagacagaaaaaaaagctagattatttaacctgttcgacaaaactacaaaagtgccaccaaataatgagccactaaataacagattagatgatattacggttaataataatacagaagcttcaccggatgtagacaataatgcagttatcattttcggatatccagaatcgattgctaactctataattctccattttgctaactttggcgagatcttagaagacttcaaaataataagagacttcagaaaaccaaacttgaaaaataagccatctagtcaaacacacaccgcacaaaaacgtcccatatacactggcgatggttgggtaaaattgacttacgattctcaagtttctaaaaatcgcgccctgcaagagaatgggctcataatgaacggtacattgatcggctgtgtttcatatagtcgagctgctctcaagcaattagcgtctttaaacaattcggaaaacataacaggtgatattacaggtctagaaagtagtttaagttcaaatggcttcagcaactataaacaaacagaaggattcttcgaaaatgctaagacaacaacagctacttctagagctcgtaattcagaattcaaagtttccaaaaattctagttcttttaaaaattcacgtaaactagaaataaaggatggtaggtcattatttttgaggaatagagggaagattcatagtggcgtgttaagctctatcgaatccgacttgaaaaaacgggaacaggaaggtagacataagaaaggctggttaaataggttgaataattggttatttggatggaatgatctttaa

SEQ ID NO: 2014 - DNA, 765 bp, Saccharomyces pastorianus
atgctgagacatctgagtaaaaatttactggcaagcagccggcgtggtccgtatattaacgccagctcgatgaagcgattgcccctctcatccgcatcgcttctgaaagctcgatattcatccaccaagagcccgaccacgaagaccaataagccagctaaaatagatgcccctgggttcaagaaaatcttccttgttgctatcatcggtacattgatttttgtcaagacagtgcagtccctagaaaagaataaaccaaaaacatcgttatcggaagaagaattcgacaacgtcgttaatggattgaaaagacgtatggctattttcccacaaggtgacgttgatataaagttttctttattccccacggttgaggaaactaaaaaaacgttacggaaaacacaaagtaacgacacaagtgaaccacagtttgtagatccagtcagtgtcgtcgactactttagaactttgaaagatgacaggtatgaagctttattgaatgaatattataatgaatatgggccggatacgtatgttgacaatctaccggcaggtatgctagtcatgcttttaggtaggtatttgaaagaaaactgcaaggccggtgataaactgattgtggttaatttcccacattcaattaccgatgcaacaaaatttgaaaatgagatatctgtagttaccacaattcttgttccaaaggaacttgaagactcaaatatctgtaaatactatgaaactgtggggaaggcagacgtcatttga

SEQ ID NO: 2015 - DNA, 468 bp, Saccharomyces pastorianus
atgtcattagtcaagcttgcaaacacatgtgcccatctacagaattgctcgaaagtcagagtggctttaacatcgatcccatacacgaaattacagttacagtttgcatataacctttaccaacaagggtttttgtcgtctttgcaaaaggggtcaacgatgggcccagacaaagaatatgttgaagtaacaccggataacatatctaccagaagactttgggtaggattgaaatacagagacaacaaacccgtgcttagtaactgtcgcttgatttctaaaccgaattctagaatatatttaccgatggaagacatgaaaaagttgtgttcaggtgtaacaattagaaacatcaaacctttgcagccaggggaactgattcttgttcgcgctgagaatagtatcatggagattaatgaagccattgctaagaggttagacggagaagtattgtgtagagttaagtga

SEQ ID NO: 2016 - DNA, 4977 bp, Saccharomyces pastorianus
atgggaattactgatggacagagaagaaggtcttcatcgctacgaacgcaaatgttcaataaacatttgtatgacaaatatcgtgggaaaactgatgatgagatagaattggaagatattagtgaaaacaaggcaacttctaatagcgacaataatgacaaagatgacagggacgaggctaacggaaattatgctactgaagtggagtatgaagaagagggatacaacgaccaagatgcgtcctataacataattactagaatacttgacactatcctagatcgaaggagaacgttccattcaaaagacggtagacatattccaattatattagatcataacgcaatcgaatacaagcgagcctctactaaaaaagatggtcatctaatagatgaaagattcaataagccctactgtgacaatcaaataacatcgtcaagatacacgttttattctttctttccaagacagttatacgcgcaattttcaaagttagccaatacttattttttcattgtggcagtgctacaaatggtacctggatggtccacaactggtacttatactaccattattccattatgtgtgtttatgggtatatctatgacaagagaggcatgggacgattttagaaggcatcgtttagataaagaagagaataataaaccagtggatgtcttagccaaagatgagattcatggtgcgcaagatgtatacgcattaccaaatagtgttatgtcttcgactgcatacctcaccaaaccaaacgctgcggaaggtggcccacctgctttaaacgacgatcagaattcgacacaagggctctccttaggcactcacttcaataattttgaacttcttggaaacaagtacaatgttcacgtccaacaaaaaaaatgggaaaaacttcgtgtgggtgactttgtacttcttacccaggacgattggatacctgcagatttgcttttattgacgtgcgatggcgaaaataacgagtgttttgttgaaacgatggcgctagatggtgaaacaaacttgaaaagtaagcaacctcatccagaattaaacaaattgaccaaagccgcgtcaggtttagcgaatataaatgcccaagtaaccgtggaagatcctaatattgacttgtacaatttcgagggtaatttagaactaaagaactcgcataatgataccataatgaagtatccactaggccctgacaacgtgatttatcgtgggagcattttgaggaatactcaaaatgtcgttggtatggtcatttttagtggtgaagaaacaaaaattagaatgaatgctttaaaaaacccgagaacaaaggcgcctaagttacaaaggaaaatcaatgtaataattgtgtttatggtgtttgttgttgcaacaatatctttgttttcgtattttgggcacgtcttacgtaagagaaagtatatcgaccaaaatcaggcatggtatctatttcagacagatgctggtgtagcgcctacgataatgtcttttatcattatgtataatacgattattccgttgtccttatacgtgacaatggaaattatcaaggcagtccagagcaaaatgatggaatgggatatcgacatgtatcatgcagaaacaaacacaccatgtgaatctagaactgcgacaatcttggaagaattagggcaagtctcatatatctttagtgataaaacgggaacattaacagacaataaaatgatatttcgcaaattttctctgtgtggatcttcttggatgcataatgtagattccagtgactctgaagatgttgcggacgaaggcgttaaagataatccaagctatatgaggtcgccacccaaagctcataacggttctagcgtagatgtcgtttcgattgaagatcaaaatgttcttggccgactagggctttcgagagcatcgattgagacggggcctcggccgtctttagacgattttcctaaacctaggaattctgttgagtataaaggaaattcatcggctacttatacaggtcgtcccagcatgagagcactttttggcaaagaaactccagctgaagaaatgaataatcaggcttcaaatatttcactgcctgaggtttttgcggataatattaaaagctcgtttgatttaattcagtttattcagagacatccgaccgccctgttttctcagaaggccaaattttttattttatcactagccctttgtcatagttgtcttcctaaaaagacacataatgcgtccatggaagaagactctattgagtaccaatcttcgtccccagatgaactagcgcttgtaactgctgctagagacttaggttatattgtattaaatagaaatgcccaaattttgactattaaaacctttcccgatgggtttgagagggatgcaatattggaagactatgaaatcttagagtacattgatttcaattctcaaagaaaaagaatgtcagttcttgtacgtatgccaaatcaaccaaatcaagtacttttgatttgcaaaggggctgacaatgttattatggaacttttacatgatcatgaactagctgcgaagaaaatggcggatataagcatcaacactaaacaacgtaaagacgccgaagcagaactggttcttcaacaaagaaagtctctggaaagaatggtagatgaagaatctttggccaggaactctttgagaaattctttatccagtgcaccaaaggcaagtttatcattgcaggcagtgagaaggagtctttctattaaaaatagtagacgtcgtgatccggagaaacaaattgactccatcgatcagtttttggaaactgtgaaaaaatctgatcaggaaattggcagtgtcgtgaataaaagtagaaagtctcttcataagcaacaaattgagaaatatggtccccgaatttctatagatgagacactttctccgaagaataacctagtaatagattcaaggaatgaaggatcgcaatatgactatgatacagaactattggagtatataggcaatgacgagttgatcctaaatgaagaatatgtaattgaaagaacgttgcaggctattgacgagttttcaactgaaggtttaagaactttggtgtatggttacaaatggattgatattgggaactatgagaattggaataaacgctaccatcaagccaaaacttctttgactgatagaaaactgaaaatcgacgaaattggcgcagaaatcgagaacggtttaagtcttttgggtgtaaccgcaattgaagataagttacaagacggtgtatcggaggccatcgaaaagattagaagggcaggtataaaaatgtggatgttgacaggtgacaaaagagaaacggccataaatattgggtatttttgtatgttgattaaggattactctactgtagtaattctaactactacggatgataacattatctcaaaaatgaatgcagtttctcaagaagttgattccggaaatatcgcacactgtgtggttgtcattgatggtgcaacattggctatgtttgagggaaatccaacttacatgtcagttttcattgaactatgtaccaaaacagactcggtgatttgttgtcgtgcctcaccttctcagaaggctcttatggtttccaatataaggaacactgacccgaacttagtgacgctagccataggtgatggtgcaaatgatattgccatgatacagtcagctgatataggggttggaatagcgggtaaagagggcctgcaagcatctagagtatctgattactctattggacagttcaggttcattttaaaattattactagttcatggccgttacaactatattcgcacctccaaatttatgctgtgcacgttttacaaagagattaccttttactttacgcaactaatataccagagatatacgatgttttcaggttcgtcgttatatgaaccatggtcattgtctatgtttaatactcttttcacatcattgccggttttatgtattggtatgttcgaaaaggacctgaagccgatgactttactgaccgttccagaattatattcttatggacgtctttcgcaaggttttaatttattgatgttcatggaatgggttgttttggcgactgcaaattctttaattattacatttttgaatgtagtaatgtggggtatgggttccctctctgacaatactatgtatccgctagggcttatcaactttacggctattgttgtattgatcaacgttaaatcacaatttgttgaaatgcataatagaaattggttagctttcacttctgtcatcctgtcctgtggaggctggttagtgtggtgctgtgcactcccaattctgaacaaaactgaccaaatttatgacgtagcatacggattttataaccagtttggtaaagatattacattctggtgtactagcttggtgttggcgctattgcctatcactatggatatagtgtacaaaacgttcaaagtcatgatgtggccatctgattcggatatatttgcagaattggaacaaaaaaatgatattagaaagagattggaattaggcgcttacagtgaaatgagacagggatggacatgggataaagatcctagcactttggcgcgctacacggataaggttctttcaagatcgagaactaattcgcgtacaagtacgcttactaaaggcattaacccgatggagaatgtcagtatagactattcattgaaaaataatgtatgccgaaattccactaaaaacaactccaagcgatatgaagtattgcccagtggtaagctgatcaagcggccatccctaaaaccacagactagtaaagataaaatcggtgacaatataactactaaaatcacaaagaaactaaagcttccatcgagaaatgcgaaaaaagaggatgtaagacagattattcaagcaagattaaaggatttggagtga

SEQ ID NO: 2017 - DNA, 2130 bp, Saccharomyces pastorianus
atggcaagaagctctcgtccacctcttttacaggttcctggtttacagattttttcgaagctgaaatcagatgaagaggatggatttatgagctccagttcaactcttgatagagataccattgtggggatcagcgaaagcaaccatcaggaattttattctacatggcgaaagccatctcaactaagcaaccggagcgtactacatgaatactcaccaacagttatcggatcaaatggtcgcatcttcacacctttaagttttaaaattccagctaggcacttcaattgggatgatattatttcaaagattttcctgcaaccaccatttggtttgatacataaattcttcgaagaataccaatattcaatcattacttcccatttcctaaacgatctgaaccgttataggctatcattacatattaatcagtcaattatgaatttccgtgagggctcagttatactaaagaaggtcccgctcaattctggagcctttatggccacaaaatatggtaagttggcggtagtggaggaaaaaaagatgtactttaaacgaacttttgattatatttccgtgatgctcacctcttataaactcctcagacagctaaaaaaatgttgtaaagaaaaaagtgacccaagtttgaaaagagttgtaactccaatactcgccgcgatatatttatcattgcaacaagagtactttcgaaaccatttgatttgctataaaactttagtagaggtacaaaaaatgctaagatctctacagcaagttgatgtaatgattcacaaatatcatttacgatacaaagaaataaaaaattctagggtcacatctaaagtagctcttattccagacaccgaagggtactcatctatgatagaagaacttttaatattctcaagcgacgcgctattctataaactcaaaacggttatcggtgatattgtcatctcaagtgataccagcgagctttcgaaatactgtgaaatatatggtattgacgtatcaagtctttaccataatacaactctcacaattaaagatcttgatggtaaactttgccgactaaagatgttgaagaagttcatgctttgttgtttactctctttggatacgacagggagcaatagtctttcaaattcaagtatccaaaatgcattaaacaaaatttttcctgactacctggtgaaactacagcaaaaaaaaaaaactaacttaatagacacatttcagaacataaccaaccttttaaaagatttgcatccgctactttcggcagttttaatgtcattaaacgaccataaacatacattgtatcctctttcggaagaattattaccaaatgatggtggagaagaaagcgatttgtactcttgtccaaaaagtgatcaaacacttcaagcgttaaaccacttgaaagcgattgagaacgatatactggctatcaacgttcaaaacggaataacaaaaaatgataagaaaaccattcaaaacaaattggaagagctaatagccttctggaaagcctcgaacatatctacaaataatgatatcgagagtggaaaaaaggtaccagtaactaacatatccaaccatggttttcatctggatatcttcaaagggagaaaggtttcatcttcttctttatcggtacggaggcttaatttagaaaggaaagtcgagtttatagatgtcaatgaatcggaaaatgaatcgtttgaaaatgacacagaattagaaaacagcgaagattacgcttccgacgagagatcttatgaggctcgtgtagatttaaaccacccagtagactttactggaactttgacttgcaagaggacagacttcaaacaactctctgacaatgaactgagacgtaaactggatgaaagaattctaaaactagcccgggaaaaccgtgaaggcagggaaagactacgaactgcaaaatctttcgagctattaagaaatacccgatcttccattgaaacggaattaggctttcaagaatcgctaaaaaaaaaagtcgtcttagagagcgggtctctcagtaagtacaaattatcatcagaagaaactattccctttttatatgaactggagcaactaataggaaaaaattcataa

SEQ ID NO: 2018 - DNA, 2325 bp, Saccharomyces pastorianus
atgtctctcaaaataaaggcgttagatgcatcggtggtcaataaaattgcagccggtgaaattatcatatcgcctgtaaatgctcttaaagaaatgatggagaattcgatcgatgccaatgcgacaatgatcgatattctagtcaaggaagggggcatcaaagtgcttcaaattacagataatggctctggtatcgacaaggccgatctccctattttatgcgagcggttcacaacttccaaattgcaaaaattcgaagatttaagtcagatccaaacttatggattcagaggggaagctttagccagtatatctcatgtggcaagggtcacagtgacaaccaaggttaaggaagatagatgtgcatggagggttttgtattcagaagggaagatgttggaagcccccaagcctgtcgccggcaaagatggtaccactatcctggtcgaagatttattcttcaatattccatcgcgattaagggctttgaggtctcaaaacgacgaatactccaaaatattggatgttgttgggcgatatgctattcattcaaaagaaattggattttcttgtaaaaagtttggagatcctaattattctttagcagtcaaaccgtcctactctgtccaggataggattagaactgtattcagcaattctgtggcttctaacttgacacctttacatatcgacaagattaaagagttggacgtggagaacgttgatggaaaagtgtgtaatctgaatttcatatccaaaaagtcaatttctccaattttcttcatcaataataggttagtgacatgcgatcctctaagaagagctcttaacggcgtttattccagttatcttccaaaaggtaataggccctttatttatttgggagttctcatagatccagcttcggtggatgtcaacgttcatccaacaaagagagaagtacgtttcttgaatcaggatgaaataatagaaaggatcgccaatcagctacatattgaattgtctgccatagatacttcgcggacattcaaagcttcatcaatctcaacaagcaaaccaggatcattactctcatcgaatagtccgactgataatggagataagagaaggaccctccgacaagctcaggtggtagaaaattcgtattccacaaccaataatacattaggaaatgttaaaaggcaagaaaacaaactggttagaacagattcttcgcaagcgaaaatcacatcatttttatcctcaagtcaacagtttaacttcaatgaggcgtctgcaaaacggcaatcaagccagctcaaagtaaacgcgaggagctctctgattccagataaagaggaaattcgagaagaaggagtggctgatgaaatcgaacaattgcatgataccgttccaaacagcgatactgaattggaagatttgcctaggaagaaaccaaaagttagtgcagatcttacatcaaatatcaaagatagtaagagctccgtgcctccaatttcaaaggatgggtatagaatagtcaccaaagaacgggttaacgtaaaccttacaagtatcaaaaaattgcgtgaaaaggtagatgattcgttacatcgagaactaacagacatttttgcaaacttaaactacgttggagttgttgacgaggaaagaagattggcagcaattcagcacgatttgaagctatttttaatagactacgggtccgtgtgctatgaactattttatcaaattggattaacagacttcgcaaactttggtaagatcaatttgcagagtacagatgtgtcggatgacataaatctatatgaccttctatcggaatttgagggattggatgaagatacctcaaaagaaaaaataattagtagaatatgggatataaatggtatgttaaatgagtactattccatagagttggtaaatgacagtccagatggtagttttgaagctatcaaactgaaaactttacctttgcttttgaaaggctacattccgtctatggcgaaactaccattttttatttatcgcctaggtaaagaagtgaactgggacgatgaacaagaatgcctagatggaattttgagagaaatcgcattactatatataccggacatgattcctaaagtagatgcgtctgatgtaacgctatcagaagatgaaagggctcaatttgtagacaaaaaggaacacttatcttcactattagagcatatactctttccttgtatcaaaagaaggtttttggcgcctaggcatattctcaaggacgttgtcgaaatagcaaaccttcctggtttatacaaggttttcgaaagatgttga

SEQ ID NO: 2019 - DNA, 1827 bp, Saccharomyces pastorianus
atgttcaatcgtaccacccaattgaaatacaagcatccttgttcggtttgtacaaagcggaaggtcaaatgtgaccgtatggtaccatgtgggaactgtaggaagaggggacaggactccgaatgtatcaaatcctcaaaactaatagcgccctcatcttcaaaggaataccttcctgatctattattattttggcagagttatgagtactgggtaacaaacattggcctatttaaaatgaaaacaagagatctcactagagtaccgactactttggacacagatttcgaagaatgcgatttctggatggattatctcggaaaagatcaatcgtttcaattgatgaacttcgcaatggaaaatctgggtgttttatattttggatccataggagacatcagtgaactatacctcagagtagagcagtactgggataggagaagagatgatacatctagtgtggatagtcagtactgggatgcattaatatggtctgtatttaccatgtgcatttactatatgccagtccacaaactatcgaacgttttttctgcaaaccccctttctgagcattttggcactggtaaagagctgagttgggatgacggccttcagctagccatgttcaagaattttacacgttgcacactattacaactgaaaaaatgtgacttcatggcccatcctgatataagatttattcaaacatatctgattctagcaaccacaaactttccatacgaggagccattattggcgaattcgttattaacacagtgcgttcatacttttaaaaatttccatattgaagactttagaccgttacttaatgacgatcctgttgaaagcatagcaaaggtaaccttgggaagaatattttaccgattatgtggatgtgattacactcagtcggggccacgaaaaccaatcgaacttcacacggaagtatcttctctgctacaacatgcagcatacttacaggatttgcctactgtggatatatatagagaagaaaacagtatagaagtactgtattggaaaatcatgtccttagatagagatttagatcagtatctgaacaagacgttcaaaccacccctgaaaacattagaagccatcaggagggaacttgacattttccggtacaaagtagattcgttagaggaagactctagatcgaataatactaaatttgaaaaatttattgccactttccaaatatctactgtctcatggaagttattcaaaatgtacctaatatattacgactcctcagattcgctaccaaaaattatacattattctaaaataattatcagccttatagttaagaactttcaagagaaaagtgagttttttaataaacatccaatggtgttgccaaccgtcacaagagtggtatcctttatgtcgttttatcagatatttatagaatcaaatgccatccaagaacttttagtggactttactgaacttattgcaaatttgcctctgatattcggcctaaaattagataagctaggatatttgatcgataggttcaataaattgaaacaattatgggaaaaagtacgactatcagattcaggtgactcatttcatcatcccgtattcaaaattctacagaatgatgttaagataattgaattaaaaaacagtgaaatgtcttctctcataaagggacttgggtctttggtcccactgaacaggtttagaggagaatctctgctggaggaagacgacgaggaaagtaaagagtcgacagagtttagagatatcgtagaaggattccaatccgaatataatattaccaatgtactttcctaa

SEQ ID NO: 2020 - DNA, 1521 bp, Saccharomyces pastorianus
atgccgaagttatataccgatctcaaaatcccacaattgaaaatctctgttaaacaaccacttgggttgttcatcaacaacgaattttgcccttcatcagacggtaaaacaatcgaaactgtaaatccaagtaccggggaggttataacctctttccaagccgccagcgaaaaggatgttgataaggcggtcatagcagccagaaatgcttttgagaatgtctggtcaaagacatctgctgaacaacgtggcatatatctctcaaaactattgaaactcattgaagaagaacaggatacgttggctgctttggaaactatagactctggtaaacctttccattctaatgctaagcaagatatagccgaaatcatagaactcacaagatactatgcaggatcagtcgacaaattcaataggggcgaaactattccactgaattctgaaaagcttgcttacactttgaaggttccgttcggggtcgttgctcagattgttccatggaattatcctctagccatggcatctagaaaattgcaaggcgctctagccgcaggtaacactgttctgattaaaccagctgaaaatacttctttgtccctcctttatttcgctacattgatcaaaaaggctggcttcccaccaggtgtcgtaaatgttgtcccaggttatggttctatagtagggaaagctttaggaacacacatggacatagacaagatatctttcacaggaagcaccaaggttggtgggtccgtgttggaagcctccggccaatccaaccttaaggacgttacgttagaatgtggtggtaaatctcctgccctagtatttgaagacgctgaccttgacaaggctgttgactggatagcagctggtatattctacaattcaggacaagtctgtactgcaaactcaagagtctatgtccaaagttcaatttacgataagtttgtcaagaagttcaaggaaattgcaaagaaagactgggacgtgtcaggaaactttgatccctttgatgagaagtgtctcgttggtccagtcatatcaagtactcaatacgaccgtatcaaagaattcatcgaactcggtaaaaaagaagaaaaattgagcatgtttcaaactactgaattccccattgagcaaaccaaaggttactttatcccaccaacaatttttactgatgttccacaatcatcgaagctattgaagaatgaaatcttcggaccggtcgtggttgtcagtaagttcgaaaactacgatgatgctatgaaactagccaatgacacttgctacgggcttgcctctgctatctttactagagacgtgaagaaggcacacatgtttgctcgtgacatcaaggcaggaactgtttgggtcaactcatccaacgacgaagaggttaaggttccttttggtgggtttaaaatgagcggtattggtagagaatcaggcgaaagcggtgtcgacaactaccttcaaacgaaatctgtccatgttaatatttccttggataaataa

SEQ ID NO: 2021 - DNA, 204 bp, Saccharomyces pastorianus
atgaatacagatcaacaaaaagtaagcgaaatattccagagctcaaaggaaaaattgcaaggtgatgcaaaggtggtaagcgatgcttttaaagagatggctaataaggacaaaaacagcgacagcaatggcgacagcagtcacaaacccgattaccaggagcaatacaataaattaaaaggggccgtgaagagggaagagtag

SEQ ID NO: 2022 - DNA, 255 bp, Saccharomyces pastorianus
atgtctaacatgatgaataaattcgcagaaaaacttcaaggtaaagacgattcccagcagaaggataaaaatgccagaaacatgaagaccagatcttccaataaggaaagggatgatatggacatgaacatgaacatgggccaggatcaatctgaaggaaaaatgaaaatgggtcaagatcaatctgaagggaaaatgaatgccggtagaggaattgcaaatgactggaagacgtatgaaaatatgaaaaaatag

SEQ ID NO: 2023 - DNA, 4251 bp, Saccharomyces pastorianus
atgagtgaccatgattcagttacaaaaatatcgcatatccttaatgaaccgatcacagaaaacgtgatggtgcgagcaccaactagcgcaggctccacaatcaaagcagattcttcttctaaacaatcgaagtcaccagaaagcacggcatcttccaattctagtcaccatactaatccattcctctacacgcagttcaaatctcgtgctacagcaccatttgatcctgaatcaataaagggcgtgaaaataacaaccccaccagaggatattcctgccagagtgtttcacgaaaagaccggtttattctaccaaatatcttcatgctctatcccaacatttactgtggcaaagaaggaacttccagatccaataagattttacgaatcagtgcaagatttagggacaatctacggttgtgtcaaactaaaaattctacctgatattgaccgacccattgaaaagtttgctcaacttaatgtcaacatagatcgcttttggtttaaagccagaaaacaattttttgattcaaaggagttagaaagagcccaaataattgattttcatgcaaagctttataatttccatagtaaaattaaaaagaaaagttttctaacgagaatcccaagcattgacaaacgtactttgaatttatatagactgagaagttgtgttgacttaaggggagggttcgatgcagtttgcgagaagaaactatgggctcaaataggaagggaattaggatattcaggaagaattatgagctcactctcaacctccctaagatctgcttatgtgaaaatcttactggatttcgataaatatgaaaaagaacaacgcatgtgtaataacgaagaaaatgaaagaccattgtctcctaagtttcatcatacagatcaaaaaaaaagggatggggaagaaatttcacttaaagacgaatcttttcacaaaagagtcaaaatagatggtggtaacccaaaagtatttagagctgggtcaattaatcacgaatttaaaagaatgaaagacataaagcgcataaaggggtttccgacttattttgattcgctaactgaatataagttaggctttacagattttacaggggctactttaccagactatgacttcactttttgggagaatggtatggaaatatacgataaaagctcttttgaaacgagaacttctccagtgtataatttgagacaatattatgaaaaaagtcaggcagttttcaatgctatgatggcgagatataagagtgactacccaagtctattcgcaaaccaaacaacgctcccacaagtagaatttgaaaagttatttttccaattactctcgacgcactttatagattttgaaattgatacaggccttggtctaaccgcatcgatacgatcttcaggaaatgactcatttgatgacaagttcgccattaaaaccatactagatcattggaatctagacaacatccctctcagtgaactatcgcttttaaagcatcttgatttagatatggctgattttacgagaacaaattttgatgttggaatgttattctcttgcaggggttggtctgtttcagaccattttctaccttcaattgattataatcatctgggttccactaaattggtatatagtattgcaccaaaagatatggaaaaatttgaaggtctcatgactcaagcaaaaaaggagtgggatgcacatcaatcaagaccgcgttacttcacctcggatggagaatggacgggtttctcagaaactgacttctttaagtcattcttagaggcagaacaatcaaatgatcattttagcacagggaacgctgcaagaaatgtgacttcagaaaatgtgctattagcaaattctttaggtgatggtcttcaaagcgacttacaatttgaacctagtttcattacagctaacggcataaaactatataaaactacacaggagcaaggttcgtacattttcaagtttccaaaggccttcacatgttgtatcggatcaggtttctatttatcacaaaattcagtttttgcaccaatttcatggctggagtcgagcttcgaggcggccaaatggatatctaagatgcggatactccctggtttggacgtgaatcaactaatgattaatattttgctaaactcagataatgcggctttgaaagggacttgccaaaacctggtaagagattgtgttcgtgaagaagtggtgaaccgcagaaagttaagagagttatttagtacagttgacgtagtctacaataaattagattacatttcggatattagtttgaaaccaacaggactttcaaaaattgtcgtgacattaggcgcactgcatcgtgttttctctttgaaagagttccttgcgctgctagataaatcaaaaaacggtacttataatatatgtggtatcccaatatgtgatcaagctggtagtctcaacatttgtttgcacttgtattttgataaagcgagcctaaagatagctcttgatggcctggatattccctcggatttttatttggctgctctggatgaaaattttgaaatgaaatgggacgctttaatgacttccacttttaagaatagatccgttccattgaacatcatacaatatttgctttctcatactgatagtaacactgagtttaatcgatcgttacgttctaatttttatgatgccttatcccttatcgaagaatgcaagaaaattatcacaagttgcatggaatcctctcgtagcattggaaacattgattttggtattgggtttaatctgcgtcatttaccacttgaattctctaacagcatgatcaataagttgaaaagcttatataaaagtgttcagaaatgttccattgatttcccggaaaggctggaaataattaggctataccaaatatctaggcagttccctattgataataaagatatcatcgagggaaataacttggtcttgctcaaggaattatatcagaaatcattaaatattccattgaaggcttcttattggactaatttgaccaggaaaatttgtaggcttgaatggctgtcagtttatgaacgtgtatttattgaacggaatgatatcaaagacgaagattctgaaaattactcgcttccattgttgtattcctacttaaaattcggcctgaaatactgtagtgttgaagatatagataaaataggtcatgccaaagagctacttttgaaataccaagctatcatgcaaaaaattcgagtgttcctgaaaagggaagcgccttcaagaataccattgaccgatctagaaaatattctgttaggtatagaggtataccgcttacctatccaaagaaattttttcaatgagcttgattacatcatcagagaaatcgaacaagctaaaagaagcagcgatgtgagtattgtttatagtgccgacaatcttgataaaatagatgagcttattaggaagaacgatcctaagtttatggagtttgcagatcagtttaacagttcccgactggataagaggccacgaattggtgaaattcaagatcaaaagggaacaaaacaaaaactaaaagactacaaattatggactcgtcaattggcccgaatactgcataaaaataaacttgttgaactgctgcctttggcttacaaatgcttagacttggaatcggacaaatacattcctctggaggattgtgctagacttcaaacaaaatattgcttctgtagaaaagttgaagaaggcagtgccatggtcgaatgtgaaatttgtaaagagtggtaccatgtggattgtataaacaatggtaagtgggttctacctgacgatccaaatgttctatttgtctgtccaatatgcatgccatctaacgtttctatcaaggctactgaaagcgtgttgtatgaatttggtgagttaaaaagattattgataggttctttgaaattaaacacgattccaaaccctccaattttgaataatctgtttgatgtttttgcgttggccttaaacttcaaaaatcaaatggaagttgaactgttcaccaaaggatttataaataagttagtacctacgcacaagatcaagtactatctaagaaaggcggaaggctcggggtgtggctttactgacttgacaggtccgttgagacgatactgtcaagcgaaagatgcaaaggttataaaatcgctcaaagaaaatggaagaactgtaatcacaggatttccaaattag

SEQ ID NO: 2024 - DNA, 468 bp, Saccharomyces pastorianus
atgactccacttctacaagctgaagccaagatgaacacaagcctctatctcacggagagcaaccaacatcaacacgagttccaacttgtcagcccccagtcgctttattcttcctctgtgcccaacagtaataataactccggaatcttcagttataactccgccagcaatagcggtgtgtgctctaacgatgagtttgccaaccagcaagatggtatgaacaccataatgcataagaacaatatcagtaagactttcgaagacgatatcttttattgtccaagaagcttgctaactccagaagaacaagcggtataccaggaaattgacaagtattacatggaacaagccttattgacccaattacaaatccctccaacttattcctcttccactccgaaggaggagaagattgtcaagttcaatccctatacttcaaagagcttcagtcccgcttcctctaaataa

SEQ ID NO: 2025 - DNA, 891 bp, Saccharomyces pastorianus
atgagcaacgctaatccttacggaaataacaatccgtacgccgaaaactatgaaatgcaagaggagaactttaacaatgctcccacaggccacacagacggcagcgatgatttcgtcgggttcatgaacaagatcaacactatcaatgcaaacttatccaggtacgagaacatcatcaaccggattgatatgcagcacaaggacctgctgacccaggtgagcgaagaacaagaaatggaattgagacgctctttggatgactacatctcccaagccaccgacttgcagtaccaattgaaaacggatatcaaagacgcccagaaggacgggttgaaagactctaacaagcaggcccaagcggaaaattcaagacagaaattcttgaagctgattcaggattacaggattatcgattccaattacaaggaagaaagcaaagaacaagccaagagacaatacacaatcattcagccggaagccacagacgaagaggtggaagcagccatcaacgatgtcaacggccaacaaatcttttctcaagctctgctaaataccaataggcgtggtgaggccaagactgcgttggccgaagtgcaagctagacaccaagagttgctgaagttggagaggacaatggcagaactgacccaattattcaacgacatggaggaactggtcatcgaacaacaggagaacgtggatgtcatcgacaagaatgttgaagacgcccagcaggacgtagagcagggagtgggccacaccaacaaggccgtcaagagtgccagaaaagcaagaaagaacaagataagatgctacatcatctgcttcgtgatctttgccgttgtcgtggtggtcgttgtcgtcccctccgtcgtggaatcaagaaaataa

SEQ ID NO: 2026 - DNA, 2139 bp, Saccharomyces pastorianus
atggctggtgaaacttttgaatttcaagctgaaattactcagttgatgagtttaatcatcaacactgtttattctaacaaggaaattttcttgagagaactgatctccaatgcctctgatgctttggacaagatcagataccaagctttgtccaacccaaaggaattggaaactgaacctgaattattcattagaatcactccaagaccagaagaaaaagtcttggaaatcagggattccggtattggtatgaccaaggcggaattgatcaacaacttgggtaccatcgctaagtctggtaccaaggcctttatggaagctctttctgctggtgccgatgtctccatgatcggtcaattcggtgttggtttctactctttattcttggtcgctgatagagtccaagttatctctaagaacaacgaagatgaacaatacatttgggaatccaacgcaggtggttctttctctgttactttagacgaagtcaacgaaaagatcggtagaggtactgtcttgagattattcttgaaggatgaccaattggaatacttggaagaaaagaagattaaggaagtcatcaagagacactccgaattcgttgcttacccaatccaattgctagtcaccaaggaagttgaaaaggaagttccaatcccagaagaagaagaagaaaagaaagacgaagaaaagaaggatgaagaaaaaaaggatgaagatgacaagaaaccaaaattggaagaagtcgatgaagaagaagaggaaaagaagccaaagaccaagaaagtcaaggaagaagttcaagaattagaagaactaaacaagactaagcctctatggaccagaaacccatccgaaatcaccgaagaagaatacaatgccttctacaaatctatctccaacgactgggaagacccactatatgttaagcatttctccgttgaaggtcaattagaattcagagccatcttgtatattccaaagagagcaccatttgacttattcgaaagtaagaagaagaagaacaacatcaagttgtacgttcgtcgtgttttcatcaccgacgaagctgaagacttgattccagaatggatgtccttcgtcaagggtgttgttgactctgaagatttaccattgaacttgtccagagaaatgttacaacaaaacaagatcatgaaggttatcagaaagaacattgtcaagaaggtaattgaagccttcaacgaaattgctgaagactttgaacaattcgaaaagttctactctgccttcgctaaaaacatcaaattgggtgtccacgaagacactcaaaacagagctgccttggctaagttgctacgttacaactccaccaagtccgtcgacgaattaacttctttgaccgattacatcaccagaatgccagaacaccaaaagaacgtttactatatcacaggtgagtctctaaaggccgttgaaaaatccccattcttggacgctttgaaggctaagaactttgaagttttgttcttgactgatccaatcgatgaatacgctttcacccaattgaaggaattcgaaggtaagactttggtcgatatcaccaaggatttcgaactggaagaaactgacgaagaaaaagctgaaagagagaaggaagtcaaagaatacgaaccattgaccaaggccttgaaagaaatcttgggcgaacaagtcgaaaaggttgttgtctcttataaactagtggacgccccagctgccattagaaccggccaattcggttggtctgctaacatggaaagaattatgaaggctcaagccttgagagactcttccatgtcctcttacatgtcctccaagaagactttcgaaatctctccaagatctccaatcattaaggaattgaaaaagagagtcgacgaaggtggtgctcaagataagactgtcaaggatttgaccaacttattattcgaaaccgctttattgacttctggtttcagtttggaagaaccaacttctttcgcttcaagaatcaacagattgatctctttgggtttgaacatcgatgaagaagaagagactgaagctgctactgagactgctactgatgctccagtcgaagaagttccagctgacaccgaaatggaagaagttgattaa

SEQ ID NO: 2027 - DNA, 3105 bp, Saccharomyces pastorianus
atgtttagaacaaaagtggccgctattttacatagggctactgtcagaaccggtgcaagatgtgttcctctagtgagagccagaggctttcatcgtagctccattttgcttaaaccagccgttgctgacgtatcgtctacgcaatataagaagatttacaatccagacttgaagaatattgatagaccactggacacattccctagacgtcacttgggtccttctcccaatgatgtgaaaaaaatgctaaagacaatggactacgacgatttaaacgcatttgtagaagagcttgtcccacctaatattttgaagaagagatccttgaaactagaagctcctagtaagggatactgtgaacaagaaatgctgcagcatttggaagaaatcgccaataaaaactcctacaaagttaagaattttattggtaagggatactacggcacgattttgccgccagttattcaaagaaacctattggaaagcccagaatggtacacttcttatactccataccagcctgaaatatctcagggtagattggaagcattactaaacttccaaacagtagtttccgatttgactggtttgcctgtggcaaacgcctcattgttggatgaaggtaccgcggctggtgaagctatgctactgtcatttaatatttccagaaagaaaaagttaaaatatgtaattgataagaaattacatcagcaaacaaagagtgttcttcatacaagggccaaaccattcaatattgaacttatcgaaatcgactattccgataccaagaatgctgtggaagtcttgaagaaccctgatgtgtctggttgtttggtccaatatccagcaacagatggttcaatcttacctcctgatacaatgaagcaactctctgaagctttacactctcacaaatctttcttatccgtcgcctcagatttaatggctttaacactattaaaaccgccagcccaatacggtgctgacattgtcctgggttcttctcaaaggttcggtgttccaatgggttatggtggtcctcatgctgcctttttcgccgttattgataaactgaacagaaaaattcctggcagaattgttggtatctccaaggaccgcctaggtaatcctgccctacgtttagctttacaaactagagaacagcacattaaacgtgataaagcaacttcaaacatttgcaccgctcaagcccttttggctaatgttgcctcaagttactgtgtttatcacggccctaaaggtctgcaaaatatttccaggagaatattcaatttgacgtcgatcttagcaaatgccattaaaaatgggaattgtcctcaccaattgcttaacgaaacttggtttgatactttgaccataaaattgggcaacggtttatcttctgaacaattattggacaaagctctaaaagagttcaatattaatctattcgctgtcgataccactactgtttccttgtctcttgatgaagttactaccaaaagcgatattgaaaatctaatgaaagtatttgagattggtaattccgcagagtttctctcaaaggattattccaacagcttgccatcagaattccagcgtactgatgaaattttgaaaagcgaagtcttccataagcatcatagtgaaacagcaatgctaagatatttacataggttgcaatctcgtgatttgtctcttgctaattctatgattcccttaggttcctgtactatgaagttgaacagtactgtagaaatgatgcccatcacatggccccagtttgccaatattcatcctttccaaccatcgaaccaagttcaaggatacaaggaacttattagttctctggagaaggatttgtgcagcattacaggtttcgatggtatctctttacaaccaaattcaggtgctcaaggtgaatacactggtttgagagttattagatcatatctggaaagtaaaggtgaaaatcatcgtaacatttgtttgatccccgtatctgcccatggtacaaatccagcttctgccgctatggcaggtttgaaagtcgtacctgtcaactgtctacaagatggttctttggatttagtggatttaaagtccaaggctgaaaaatattcaaacgaattagcagctgtgatgattacttacccctccacgtacggcctatttgaaccaggtatccaagaagccattgatgctgttcattcgtttggcgggcaagtctacttggatggtgctaacatgaatgctcaagtcggtttaacttcacctggtgatctcggcgcagacgtctgccatttgaacctacacaagacgttttctattcctcacggtggtggtggtccagctggtgcccctatctgtgtcaaatcacacctaataccacatttacccaagcatgatgttgtagatatgatcactgaagttggtagcaaacattctatcgattcggtctcctctgctccatatggtaacgctttagtgttgccaatctcttatgcctacatcaaaatgatgggaaatgaatctttgccattttctagtgtcatttccatgttaaactcaaattatatgatgacgagattgaaggatcattataagattcttttcgtcaacgaattgagcactttaaaacattgtgctcatgaatttatcgtcgatttaagagactacaaagccaaaggtgtcgaagccattgatattgccaagagattgcaagattacggatttcatgctccaacgttagctttccctgttcctgggactttgatggtagaaccaacagaatcagaaaacttggaagaactggatagattctgtgatgctatgatatctataaggggagagattgatgcattagtgtctggccaaccaaagggacaaatcttaaagaatgcccctcattgtttggaagattttattacttcttctgattgggataccagaggttatacccgtgaagaagcggcttatccattgcctttcttgaagtacaacaagttctggccaactgttgctagattagatgatacacatggtgacatgaatttgatatgtacatgtccttctgtggaagaagttgcaagtgaaaataattaa

SEQ ID NO: 2028 - DNA, 777 bp, Saccharomyces pastorianus
atgcaacaacttctcagaccatttcagctgacaagaggatttactagtgctgtaaagaacttcaggcaatggagattaattgaaacaagaaacgttgcaaaacagccggactaccaagttggtgatgtcaagcctctgcacatgccaaaagagagaaagaagtttccagactataaatacggtgaatccaatatctttaaacaaagtaataaaggtttatatggtggatcttttattcaatatggtaacaatatttccgaaagtaaagccaaaacaagaaagaaatggttacccaatattgtgaaaaagggtttatggagtgaaactttgaatagaaagattagtatcaagatgactgccaaagtgctaaaaaccatcagcaaagaaggtgggattgataattatttgacaaaggagaaggccgcaagaattaaagaactaggacccacaggatggaagttgcgttatagagtcttgaaaagaaaagacgctatagagaactatccacataaggatgcccctattttagaaacggccgatggcaaaaatgtcaaagtatattatgatgaagtaattaacggcacgccaagaaagatatcagttggaagaaggaaactgttggcctttttatatcccttggaaaaactggaacacaagtctatcgggaaagatctagaccacaaaagatttgtggagctgtttgctaacgttccagttaaggatatcgtatcgaaattggaagagcatgactttgatttgtccacaatttccgtatag

SEQ ID NO: 2029 - DNA, 381 bp, Saccharomyces pastorianus
atgtctttgaactataccactcctcttgacgatgaggtcttcccgttgtcatttgccaaccaccaattgagcgagcacgtgtcgatgagccaggattactcactccgtctcacagacgaaaggaaaataaatacggccgactcttgcgcagtaccgagagacactgcgaagtgcgattttaatttgacttcgacgcaagacgaaacgctattctcattagagagtgctcaagaaagtaactacagataccaagcgttggctaatgtccaggactgccgcatggccgtttcgaccaggtctgctcagtcttgtgataaactgaccgatctttacgccaacgccgcccaacaaaattacaggctttggctttcctcattctaa

SEQ ID NO: 2030 - DNA, 3276 bp, Saccharomyces pastorianus
atgaacaagataagagacaagtttgtagactctactgtagaagaagaaagattacgcgagaaccgcgaccatgaaaagtactggtatcgttggggcccctacctcagtgagagaagctgggccacggtccgtgaagactactccttaaacggtgatgcttggtccaactttccctttgaacatgcaaatgcaagagtgttccggtggggtgaagatgggctattcggtgtttctgataacaagcaattggtctgtatgaacgtcgccctatggaacggtaaagatgagagactaaaggagcggctattcggcttaactggaccacaggggaaccatggtgaagacgtcaaggaactgtacttttacttggataacactcccactcattcatatatgaaagccttgtataagtatccttttaagaagccttttccttacgaggagctggtgcaaaagaacgctgagcggggatacgaagacaaagagttcgaagtttatgaaatagatgggttatatcatgacaatgagacagatgataacccttatttcgatgttttcttcgaaatggcaaaggatgacgaaaatgctggtgaactaaacttccggttgactattcataatcgaagtaaaattgactccggtgagctacacgtggctccccaaattttctatagaaacacctgggcttttgagggcactgggaaaaaggataaacctttgcttgagagggatccggaagctgcaaacttgataaatttgactcacaagaaatatggcaattgtcaaatggtcttccagccttctccaggtggattctcttctaacgcagacgaaggagaagaagaggatgacgacgaagaagtagaggatatcgatcccttgctgttgtttactgacaacgaatctaatttggtaaaattgtttaatgaagagaaaaacccttccgcctacacaaaggacgcctttgaagagtttcttgttaaggataaaagcgatgccgtaaatcctgaaaataaaggtacaaaggcgtgcgcggtctaccatttcaaaaatatcccgccaggtgagtacgttacggtgaggtataaattcacaaataatccagaaaactctatcttcaaagcacaagatctggccgtagtggatgaagatcagtttgattccgttttcgatatcagagaggaagaagctgataatttctattggagaatcacaccttcaccaatcagtgatgaactgaggagcgttcaaagacaagctttttcaggtttactctggaccaaacagttttacaatttcacctatgatgcttggttcaacggcgatgccaatatcaaaccacatcccccaccaaatagggctaatggtaggaataagaattggaagcatctttacatcgaagatatcttatccatgcctgataagtgggaatacccattttttgcttcgtgggacactgctttccattgtattcctttggctatgattgatccagaatttgccaagcgacaattggatttattaacaagggagtggtacatgcatcctaacggtcaaatacccgcatacgaatggaacttcaatgatgtcaaccccccagttcacgcatgggcggtatatcgtgtcttcaagatcgaaagaaacatgtataaccgtgaagatcgtacatttctggaacgtgtcttccaaaaacttttattaaatttcacttggtgggtcaacaggaaggatactgaagggaaaaacgtttttgaaggtggtttcttgggtcttgataatattggtgttttcaataggtcagagccattgcctactggaggtaccctagaacaagccgattccacaggttggatggccttttttagtttgcaaatgttaaatattgcattagaattggccaaagaaaacccagtatacgaagatattgcctctaaattttttgaacatttcatcctaatcagtgattctatgtcgtttgaatatgccacagacatcacgggggaaaaatgcaaagatgtcatgaaacagaacttgtggaatgagactgacaaattttattacgatgccatttcatggggcgatcacaaagaacagttaccaattagatctcttgtgggtttaattccgctatatgcttccatgactctcgaaccaagtatcataaaacaattcccaggcttcaagaagagggttgattggtttgtggacaaccgcccagaaatcttcgatagaaatattgcttccatgtctaaaaaaggtgttggtgaaagactattactatctctagttaccaaagagagattaaccgccatactaacacggttgttagacgagactgagtttttatcaccatatggtatcagatcactttctaagtaccatgaaaagcacccttttgaaatgaacgtaaatggtgtggagtatacggtcaaatatttaccaggtgaatccgactcaggtatgtttggtggtaattcgaattggagggggccgatatggttcccaaccagtttcttaattatggaatcattacagagattctacttgtactacggttctgattttaaggtcgagtgtccggtaggttcgggtgattatttaaatctagcagaagttgccgaagaacttgggtatcgtatgattcacttgtttgtaccagatgaaaatggcgagcgtgccgttcattatggtgatcactctaaattcttatccactgatccatatttcaaggattatgtaccattctttgaatacttcgatggtgactcaggaagaggccttggtgcttctcaccagtgtggttggactgctcttgtggctaaatggatcagtgatgtaggaatatcctgtgtgaggttgcctcgtactccaagatcatctgtagccaccactgcgtccacggaaagctctgaacaagaacataaaatgaaaagaatggcaagacgcaagagtgcaaaatccttagtaaactacactgccactattttggacttaactgaagaagaaaagcgccatcacagaataggaggaacccattctggattgacgccacaaagtagtatttcaagtgataaggcaaaaaaactcatggaggaaatgaatgatgaggaaggtattcatgaagttgtggtgcgagaagatcgtcatgaattcgaaacaaaattgataagcaagctaaaggttaaagtgaaaaatatgaaggtaagcgataagactaaagacgaagatattgatccaatggatccaatgtgtccgttgaataaagatttatcttga

SEQ ID NO: 2031 - DNA, 654 bp, Saccharomyces pastorianus
atgagctccttattaacatcttatgaatctgattttaaaacaacactagagcaagccaaagcgggcttatcagaagcgccctcgcagcagatatctcagaggaattccactttgaagcaggtggagcaacaacaagatgaactattcgacttgttagatcagatggatgtggaggtaaacaacagtataagcgatgcctcggaacgtgctacgtataaggcaaaattaagagaatggaaaaagacaatacaaattgatatcaagaggccactgcagtctcttgtggactcaggtgatcgtgatagactcttcggagaccttaatacatctaatcttgacgaagaccaaagacaacagctgttaagcaaccatgcgattttacaaaaatctggagataaattaaaggatgccaacaggatagcaaatgaaactgaaggaatagggtcccaaatcatgatggacctgaggtcacagagagagaccttagaaaacgcaaggcataccctgtttcaagcagattcatacgtcgataagagtataaaaacactaaaaacaatgaccagaagattggttgctaataaattcataagttatgccattattgctgtgctaatattattgatccttttggttttgttttcaaaatttaaataa

SEQ ID NO: 2032 - DNA, 1791 bp, Saccharomyces pastorianus
atgaacaattccagaatacccaaactttcctttcatagtggtcccaacggtactattcgtgaattttctaagaccaagaggcaaaaagtccagaaaagagacatggatacggtactggcgcctaataacaacaaactaaatatactacagggatctggactaggtatacgacgtagtttcacaaatgattcctccgtcatgcacaaaaaaaagttgaccttcgggggagaccccaaggtaattgagagagtgaagaacaatgagcgcagagtcagaaaagatatcgattcgttattaaatgccatttcagaaattgaaaaagaatccgttcgtgttcatagtagagaactacctacaatagcatcagagttagatgccaaagtcagagcatgcaaagaactgcaaaacgaaatcaataggctatcaacggagatggatctgaaggataatcaatgcgatttgcaacgaaaaaatatcgaattatcgtccaaaaatatcgtttctatgcatgccgtgaccgtacaagagtttgaaaacgacttagaagaagagatatcgaatgccaaaagggaatggacatataaattaatggaggtggaaaatctgaaaccagatgaaaagctaactgatgaaatgcgacagcttaaagcagaatttgaagaaatcagtagggaatggtatattttacaaaacgaaaatgacaaaaagcgtaaagaatatgaaaatgaattgcacaaggaacttgagttatacaagaaaactaagaacgatgctaaactcgagctagatcaagagcaagaaaggctcttgagggagctcgaagagttacagaacactaacgatagattacaagaaaacgtcaagggatgtgtcgatgaatttaatggactcgaacaaaggattaaagactcagaaacaaacttgcatgaaatggaacatgccgtcgttcccctgaggaaagaacttattctcacatcacaaactttgactcaagtgctggatgtgaaaaagcaaattgaaggaaaggcgaatagttggaagaagaagtatgacaatgaactagataaagtccaacaggaacaattcacacgacaaaacctggccacttcaatagaacaaatcaaagggtatgcgcgatgctttgcatacgccaatgagcgggaaatgcccgatgagttccatatcaactacgtggaccaaagcatttgccaggagggtggccacaaacgtgtacaagtgtttgatagaataatcctcgaagagattcataaggatcacaagcggttattcaatgagtgtgccccatttttaaagaaatatatcagcaaattggtcaattgcagtatcgttgtcgtatcccagcaacttgcagcacctattaagattacctttttggaacagctattcaaacagtacggcgagggatataacatgacattgagaactgtgcgtttcgacgggaacaccgaagacgaaagcgatgacgttaaactgaacgacctgtcatcaatcaaaaacctgtcacaagatgaagaatgcatgtgcgtcctaagtttagacaccagactgaagaactatgaaaagtctcattcgatgaatatatatatcggaaatatgaccgctttgcaactgagtaaaaggctcgacgagcctccctcagcgttttcacaggtgctcactaaaactaagcagtgttttattttcaagattaacgcatgcgaaaacatcgagaagacgctagccctagcgggaaatctaaagagaacaatacgattacctcagctagattga

SEQ ID NO: 2033 - DNA, 792 bp, Saccharomyces pastorianus
atgtggtccaaaaaatttaccttgagaaaactgatcttgggcagttgtctgttcatacaaaagattcgttgtgaagatagtgacagctctttatatggtacttggtcatccaaatctaaccaagtcttcacaggaccaggattttatgatcccatagacgaactattgatagagccttcattacctggtattagttactcattcaccgaagatggttggtacgaagaagccagttaccaggtcagtggaaatcctcgtgacccaacttgccccatggcctcgttgattttccagcatggtaaatatgtcatctcagataacggtactttagttctgaatcctactgaagttgacggcagacagctgttcagcgatccatgcaaagatgacggaatatcgacatattctagatacaaccaaaccgaaacgtttaaagaattttccgttggtatagatccttaccatggtatctacactttacaactatatcaatttgatggtactccaatgcaaccgttatacttggcctaccggccaccaatgatgttaccaacggagaccttgaatcctacagacaccgctacaagcagtggggcgtccaactctgacgacacttcagcatcttctaagaagaaaagatcactaagaagtctggtaaggagaagcctagaaaacagacacaagacaaatgccgttaagagatccaacgcatcatttttaacctcgaatgctatttggtatatttctgcaggtatgttgggtgttggttcattattatttttagcattttag

SEQ ID NO: 2034 - DNA, 672 bp, Saccharomyces pastorianus
atgaagtttttcccaatccttttattgatcggtgtggtaggctacactttgaacctgctgttcaccacctggttgccaacccactacatgttcgatccaaagactctgaaccaaatatgtaacacggtcatcgccaaacatgacaccactgccgaagacttttctactgaagtcctgctacaggacgtcagagacgcacttgcctctcactacggggacgaatacatcaacaagtacgttcgtgaagaatgggtcttcaacaatgctggtggtgccatgggccaaatgatcatcctgcatgcatctatctcagagtacttgatcttatttggcacggctgtcggcacagaaggtcattccggtgtccacttcgccaacgactacttcaccatcttacatggtacccaaactgccgctttgccatatgccaccgatgccgaaatttacactcccggtatgacccaccacttgcaaaagggatatgccaagcaatacagtatgcctggcggctccttcgctttagaattggctcaaggctggattccatgcatgttgccattcggattcttggatactttctccagtactctcgatttatacactctatacagaactgtctacttgactgccagagatatgggtaagaacttgttgcaaaacaaaaagttctaa

SEQ ID NO: 2035 - DNA, 1164 bp, Saccharomyces pastorianus
atgtccgcacccaccccattagcagaggcctcccaagtgcccactatcccggccctttctcccttgactgcaaagcaatccaaggggaatttcttttcatcaaacccaatatctagctttgtcgtggatacgtataaacaattgcattctcacagacaatctttggacttgatcaacccaggtacggtggaaaatctgaataaggaagtttcccgtgatgtgtttttatcccagtactttttcacaggattaagagctgatttgaacaaggcattttccatgaatcctgccttccaaacttcacacactttctccatcggttcccaagccttgcccaaatacgccttttctgcattgttcgctaatgacaacctatttgctcaaggtaacattgacaacgacttatctgtctctggtagattgaactatggttgggataagaaaaacatttctaaagtcaacttgcaaatatcagatggtcaaccaacaatgtgccaattggaacaagactaccaagcttccgacttctctgtaaatttaaaaactttgaacccttcgttctctgaaaagggcgaattcacaggtgtcgctgttgcctctttcctacaaagtgttactccccaactagctctaggtttagaaaccttatactctagaactgatggtagtgctccaggtgatgcaggtgtctcatacttgactcgttatgtttccaaaaagcaagattggatcttgtctggtcaactacaagccaatggtgctctgatcgcatcattatggagaaaggtcgcaccaaacgtcgaagcaggtatcgaaaccacattacaagcaggcatggtcccaattactgacccattaatgggaactccaatcggcatccagccaactgtcgaaggatctactaccattggtgccaagtatgaatatagacaatcagtatatcgtggtacattagactctaatggtaaagttgcatgtttcttggaaagaaaagtcttgccaactttgtctgttttgttttgcggtgaaatcgaccatttcaaaaacgataccaagattggctgtggcttacaattcgaaaccgctggtaaccaagaattactgatgttacaacaaggtttagatgccgatggtaatccattgcaagctcttcctcaattgtaa

SEQ ID NO: 2036 - DNA, 1242 bp, Saccharomyces pastorianus
atggctttggccaagggagaaacgaagaaaaatattctgaaatcgacggcaaagcaagaaaagaagcctcagtcgacatttcaaacattaaagcagtcacttaaacttagtaatagcaataagaaaataaaacaaagcacagctcaaccatcaaatgagacaagcaagcctgtcaaagtacgaaatcgcgatctatccatgaagaaatctggggtacaaaggaaaagaatatcaacacaaagattttcattgtttacatataataatgttcaggtaatgaattcatttgttccaattcacaacgattctcaatacaacagcactattgttcgaagaaactctcaagtttctacaaataatgcatctaaagctagcaaagggtccttcaatgacgcactgagtcaggatagtcagaatactatcaaattgaaaccaacctcattaatggcaaagggaccaattgaaatatatcagatatgtacagggtttggcaatttgaaagaaaatgttgaacttattcagaagtccagtaaggatagtagtcacgatggccatgtggtgaattatttatcaataggaaggcatggcgatattgttcatccagtgttacccaaactacaaataacaagattgaacgggacaggttacaaatattttattagcttttacaatccagaacgatactgggaaattgaatttctacctatagataatcagactcgatcagacttggagaataaggctaaagattttgaaaacatcattagtaagatctgtcaattttcacaaatcagcgaagaagataccattggaaacaatgagtccttgagcgataagtttgcgacctcgtctacatcgattgttaagtcacctaatattgaaataggtggcgacgatggtgatggtgaggatgagctaaattatttactggatgaggaagacgaacccaataagacaaagagcgtatatccggtgccattcgatagttattcgaatataagcacaaagctcgactatcccaacggttctaccgataccatgtcaagttctattaacgaggctttcaaaaatgcgatgagaagaaccgcgcctatattgaatactccagtggcttcgagtatgcatttgcagcagaaaaacaaaagatacagttcgtattcttttgttaattcttccgtacctctgtcagataggcataggaggtttgaaagaaggtatatatctagactgggcgatctttga

SEQ ID NO: 2037 - DNA, 2880 bp, Saccharomyces pastorianus
atgactgttactgctccttttgtgaatggtacttcttattgtaccgtcactgcctattccgttcaatcttataaagctgccataaatttttacgccaagtttttgtcattggaaaaccgtgcttctcctgatgaaagctccactttgttgtctaatgattctatttctttgaagattttgcttcgccctgatgaaaaaacgaagaaaaacgtcgatgcacacctaaaggaattgagtagtatcactaagactcaagactggagatctcatgccactcaatccttggtgttcaacacctccaacatcttggcggtcaaggactccctaaacgccatgaacgctcctcttcaaggctacccaacagaacttttcccaatgcaattatacactctcgacccattgggaaacgttgttggtgtcacatccaccaagaacgccgtctccaccaagccaaccccaccacctgccccagagtcctctgctagatctggcctctcatccaaggctcattcttacactgatttggcttaccgcatgaaaactaccgacacttacccatctttgccaaaggcctcgaacaaacctcaaaaggccattgctgtcatgacttccggtggtgatgccccaggtatgaactctaacgtcagagccattgtgcgttccgctatcttcaagggctgtcgtgcctttgtcgtcatggaaggttacgaaggtttggtccgtggtggtccagaatacatcaaggaattccactgggaagacgtccgtggttggtccgccgaaggtggtaccaacattggtactgcccgttgtatggaattcaagaagcgtgaaggtagacttttgggtgcccaacatttgattgaagccggtgtcgatgctttgatcgtttgtggtggtgacggttctttaaccggtgccgatctattcagatccgaatggccttcgttgatcgatgaactattgaaaacaaatagaatctccaacgaacaatacgaaagaatgaagcacttgaatatttgtggtaccgtcggttctatcgataacgatatgtccactaccgatgctaccattggtgcttattccgccttggacagaatctgtaaggccatcgattacgttgaagccactgctaactctcactcgagagctttcgttgtcgaagtcatgggtagaaactgtggttggttggccctattggctggtatcgccacatctgctgactacatctttattccagaaaagcctgccacttccagtgaatggcaagaccaaatgtgtgacatcgtctccaagcatagatcgagaggtaagagaactaccatcgttgttgttgctgaaggtgccatttctgctgatttgactcctatctctccaagtgacgttcataaagttcttgttgacagattaggtttagacacaagaatcaccactttaggtcatgttcaaagaggtggtaccgctgttgcttacgaccgtatcttggctactttacaaggtcttgaagccgtcaacgccgtcttggaatctagtccagacactccatcacctttgattgccgttaacgaaaataagattgttcgtaaaccattgatggaatctgtcaaattgacaaaagcagttgctgaagccatccaagccaaggatttcaagagagctatgtcattaagagacactgagttcattgaacatttgaacaatttcatggctattaactctgctgaccacaacgaaccaaagttaccaaaggacaagagattgaaaattgccattgttaacgtcggtgccccagccggtggtatcaactccgccgtttactccatggcaacctactgtatgtctcaaggtcacagaccatatgccatttataatggttggtccggtttggcaagacatgaaagtgtccgttctttgaactggaaagacatgctaggatggcaatcccgtggtggttctgaaattggtaccaacagagtcaccccagaggaagccgatctaggtatgattgcttactacttccaaaaataccaatttgacggtttgatcattgtcggtggtttcgaggcttttgaatccttacatcaattagaaagagcaagagaaagttatccagcctttagaatcccaatggtcttgatacccgctactttgtccaacaatgttccaggtaccgaatactctttgggttccgataccgctttgaatgccttgatggaatactgtgatgtcgttaaacaatccgcttcttccactagaggcagagcttttgtcgtcgactgtcaaggtggtaactctggttacttggcaacttacgcttctttggctgtgggtgctcaagtctcctatgttccagaagaaggtatctcattagaacaattatccgaagatattgaatacttggccaaatctttcgaaaaggctgaaggtagaggtagatttggtaaattgatcttgaagagtacaaacgcttccaaagctttatctgccaccaaattggctgacgttatcactgctgaagccgatggtagattcgacgctaaaccagcttacccaggtcatgtccaacaaggtggtttaccatccccaattgatagaacaagagccactagaatggccattaaggctgttggcttcatcgaagacaaccaagctgttattgctcaagctcgtgctgctgaagaaaatttcaacgctgatgacaaggtcatttccgacactgctgctgttgtctgtgtcaagggttctcacgtcgtttacaattccgttagacaattatacgactatgagactgaactttctatgagaatgccaaaggtcatccactggcaagctaccagactcatcgctgaccatttggttggtagaaagagagttgattaa

SEQ ID NO: 2038 - DNA, 1332 bp, Saccharomyces pastorianus
atgtcactaccattccttacttctgctcccggcaaagtcatcatttttggtgaacactctgctgtgtacggcaaaccagctgtcgctgccagtgtgtctgctttaagaacttacttgctaataagcgagtcatccacccccaacactattgaactggactttccggatattgctttcaaccataaatggtccatcgacgatttcgatgctatcatcaaggatcaaatgaactctcaaaaattgtctaaggctcaacaagctacaggtgaattgtctcaggagcttgttgatgtcttacagcccttgctagctgaactgtccaaatcattccactaccatgctgccttttgtttcttatacatgtttgtttgcttatgtccgcatgccaagaatattaagttctctttaaagtccactttgcctattggtgctggattgggctcaagcgcatccatttctgtggcattggccttagctatggcctacttgggcggtttaattgagtccagtgacttggaaaaactatccgagagcgataaacatttagtgaaccaatgggcattcacaggtgaaaagtgtatccatggtacgccttcaggaatagataacgctgtggccacttacggaaatgctttgctgtttgaaaaggactctcgcaagggaacgataaacacaaataacttcaaattcttggacgaattcccaactatcccaatgatattaatttataccagaattccaagatccaccaaggatctagtgactaacgtacgtgtactagtaaccgaaaagttccctgaagtaatgaaaccgctcttggatgctatgggcgaatgtgctctacaagggctggatatcatgactcaattgagcaaatgtacaggctctgatgaagatgcttcagaaaaaaacaacatcctatatgagcagctgttggaactaataagaataaatcacgggttgcttgtttctattggcgtttctcatcctggattagaaatcataaaaaatttaagtgatgatttaagaattggctcaacaaaattgacaggtgctggtggaggcggttgttctttgactttacttcgtagagatattactcaagagcaaaccgatagtttcaaaacaaaactacaaactgattttggttatgaaacatttgaaaccggtttaggtggtaccggttgctgtttactgagggcagaagatttgaataaagatcttaaaatcaaaaaccgaatcattcaactttttgaagccaaggataccactaaacaacaaatcgatgatttgttgttaccaggaagtgcaaacttgccatggacttcataa

SEQ ID NO: 2039 - DNA, 1428 bp, Saccharomyces pastorianus
atgcacgaagttttaacgatatccgtttcgcagagagcaaaccatttaaccactcaattcttcaacatacaagagggctatttgaaactttccaaagaagaacaagttaatgactccaaaatattcttgaacccaatcgttgacaagttttcaaaaacagtttcatatacaccaagggctttactatgggacgcccgtacaggtaatggttcattgggaacatatcaatatgcagagacgaaagactatcattttggcaatgaggacgaatttaaaaatcaaacggttgtaaaaactcacccagcgatacccaaatctgaatatcaaatcgccttagattcagcaataccgcttccaaccttaactaaagagaataccaaatattggtccgattactctaaattaatttatggggcttcaagcttcaatacgttgaaggactggtaccatgacattgcaaacccaaaccaacctgactttcaaaacttaggggagcgaaaatttaacaaatactcaatcggttatgacgagtttactgaaaattacatgcaagaattctttgatggaaatttgcatacagaattggagaaatgcgacaccttacagggactaaatcttataactgatatcgagagtggatggggtggattttctagtgctttactattggaattgaaaaacgaacttccaaaaaaaactgttttttcttggggtttcaatgaagatgatccatttacagatgtgctttctataaagaggcttaccaagaaatggcttccaataatctcgaataaactaaggagtacaatgaatataatgcaagattctgatctttattttccgttatatgctcctactgggctaaccaattgggaaactgctggtaagacgtgcagaattctagattccgtgaacgcaacaatttcccagagtaatcctgaacaaagaaaaatgatggattatattactacggccgtcaccttaggagattcgtcaagaaatatggttactcaaatgcttgtcggtaataacgattattctttctgttcccgaatagtgccgtttaaaaatagccgtataaacaatgaatgccaggtattctccaacagctttatcaatagagaagagcaaatgcttcgagaaagccccgagtctgctcctcgaagtaaacggaatgaaatgtttacacataggtatttcccttctgatacaataccgacagagttttctaatgactgtgatttttgtttaaaactaacttcctccgaaaaaagtagagatatattcaagcattggaacgaatttgtgacaagatacttcaaaaacgataatgatagagaggaattgaagaatcaactctctgattacgctacagcgtacgaatctggatggtacgacgacgaggattctggtgatgatgatatgtaa

SEQ ID NO: 2040 - DNA, 2358 bp, Saccharomyces pastorianus
atgcaattgtctatgcggatgatgttcacaccaaagcaccagaaactggtcaatcaatgttatcctacggggaggactactgataagaagcctaagtcatcggagacttcatatttgctatattatgtcaactcgagacgtagcaaattggaaaaggtcagcacttacctaattaaaagatctacttctgatttgaaccatcgccgtataggaaatatagctgttacattggatttgatgaataagattgtgctgcattgcagagaaaacttaaacgtattcgttaaagattttttgtatattatgaacaaagttctctcgaacaacaatttcaacaatgatgtagccgtcgtggaattggtagaactggcattcagtagcatatgcctgaatttggatgacgtcttatgtaacggtgatatggaatttattcagttatatcaaagttttgtcgatctattctttaaaatagtcactgaaagaattcataatgatgatatgcttttaaaatgctgtattgatatatcgaacacaaacagcgtttcaagtaatcctcaattgaattattttgtctccaaatccgtaacatacactatttccaaatttcaagaaagaaatccaaaatttaaaacgctgtcattaggaccagttttagacggtaatttaggtaatttaggtaaacgactaagtcgaacacaaacccgcaccgttggattggataaaactgttgacgacaacaatgatatctctataagggctttacaatcatatttcaacacaactgagacagataaattaaacctatccatacgtactttgttacgttgtctgcaaaatacgccaaataaggaactgctagaatttatatgtaacggcatacctgttcagctgcgatacatcgttattcttcttttagtcagacaattaagcgacaaggataaaaatgtggatccggtcgtttctttgaaattgatgtcatcattgcttgtctctgacgttagtatagtaggcttaagtgtccttgatataatgagaaagcttttaaatttccaattgaagaacgtagccgataaagaagttgtggagcaatcctgtattactatgacagacttgaatcacaaaacttattacactgaacagacttcagatatgctttatgaactactcttaaaattgaagagtgataccactaaagacctagagaggaacgcagttgtggaagacgttgattatcttgttgagcacattacacaaccaagtattagtttggaactattcattgatttggcgcattacatgagaaatcaaattataagtttatttgccattgttgaaaccgaggttccgactggatttgtcttttcaaaactctattcattattgcgtgaactggattcacatggtgtgcaaaaagaaatgatggaagaaatttttgataagtatggaaaagtggcactattatccggtttgcattatttcttggagaacgtttctgaacctgaatacacctactattcgtatcatttacaagctgctgaatttttaaaattgaatgattacaaatcgcaaactgaatacaaaatgcaaactaagacactatttactaaggaagatttattgtcttactattccgatatgggatcgaacaaatacaccaatagaggcgcacaaattttgatgtctcgtgacaaccaaatttccacttctgatttactatcggatttccaagttcgtactacatctccagattacaggactgtgcctaatgtcgtcttaccaaacggtaattcaatgcccaataataaagatgttacaataaagcaaagcagattcgataaaagcatagatgacaaagtagacgaaggcaatgatactgttatttctgatgctaatgcaaagggtagtatctacaggtttgttgctgaagatgcgagatcatggaaaacaatgagagtcactgcgccaaaaattagtgacttgaaaaaagcaattaatgaaagaaaaaatccaaatgacatgaaaagagatggatctgttcgctgttctcaatcggtgaaatctcgcgttactaatattacgtttttgctaagtgaattaaaaaatttttcagaggacgcaaacaatgttaaagatcccgatgaggaaaatattgttggcttagataaaattgatgtggctagatctaattccctgcgacttgcaccaatatcgagtgtttccgatcggagtagtattggaaatagaaggtccttgatacaaaagacgcctgtcgttgaggatcaagacgacgactttaaagacgcaaacgaagatttacattctttaagttctagaggtaaaatattttcctccacttga

SEQ ID NO: 2041 - DNA, 1554 bp, Saccharomyces pastorianus
atgaaaatttctaaaagtgtgctattagcggcattaactgccaccccatctttggtgagtgccatgctgcccatccatatcaagaactacaggttcatcaagccatcctctgccacgaacagcgatgcagataacgaaatctttttcgttaagggtgtcgattaccaacctggtgggtcctccggctacgatgctgattcggatacagacattctttcagaccctgaaatttgtgctagagatgccttcacctttcaacaactcggcgtcaacacggtgagaatctactcattaaaccccgacctaaaccacgacaagtgcatgaccattttaaatgacgctggtatatatgccattttggacgtcaatagtggtaactacggtgagaatctaaaccgtgctgacccttccggtacctatgactcactgtacttgtcaagagtcttcaaattcatcgatgcttttaaaaattatccgaatgtgctagggttcttttctggtaacgaggtcattaatgatcaaaaagactatgccgaaatcgaccctccctacattcgtgctgttcaaagagatatgaagcagtatattgccaaacacgccaacaggagtattccagtcgggtattccgccgctgataataccgagttgagattagccactttcaagtatctgcaatgtaattctttagatggcaaaaaagtcaacgatgatttggacgtctctagatctgattttttcggtttgaatacttatggatggtgctccggtatttccgactggcagtcttctggctacgacatactaaactccacttttgacgatgctgtcattcctttaatgttttccgaatacggctgtaataccaaaactccaagaacttttgatgaagtctctaagggtttgtatggtggtttgaagaatatcttttcggggggattggtttacgaatatactgaggaagctaataattttgggctaattaaactcggtgacagtggctctttaacttataaggaagattttgttaatttagaggcccaactgaaaaacgttacgttaccaaccacaaaagaaaatgcgctttcttcagactccatttacaagtgtgatagtagtgtcattactaaaatttactctggattcgggaccgacaactttacgttgccttctcaaccggcagaggttgccaatatgattaaatatggtgttaatggtagcaacacaggtaaaatattgaccgactatgctgttccaacaacgtttaactatacaatcaaaaacactaacggtgacaccgttcctgccactatttactatgataaagctaacgcattgaacgaattagacgctacagctacagtagccgttaggtctgtgtccacatcacaatcatcttcttattctacagctacaagcaccaaagaatcgtccaccgttcaatcttcttcaacttcaagcagctctaaaagtaaaggtgcggccaacatcaacatttcagttgatcaatctggatactttgccttgttggcaggtgtagtctccactctcttataa

SEQ ID NO: 2042 - DNA, 2166 bp, Saccharomyces pastorianus
atgggctcatcgattaattatcccgggttcgtaacaagaagcagtcatacggccggttctggtacggacggaagcagtacgagcaaggacgcagcaggctcgcaggaaacgaagaagaatttcttccagagagattataacactatgaagaaggcacctgctccaacgaagtccaaattgtctttggctttgcagacctctaagtcgtcttttagcatcaatgggacgacatcggacagtattcccacgatgacagaggcattttctacaagtagtgtcaggaagcaacagcgcgaggacacagagtcgccggtctcgtttcaatccgatacagcgacgaactcagactcggatacggactcttctgtttcatcttgcgatgaaagaaatgaagagtctttgaaggattataggcccggcgggtatcaccccgcatttaaaggcgagccttacaaggattcacgttacatcttagtgagaaaattgggatgggggcatttctccacggtttggttggctaaggatacggcaaacagctcccacgtggccatgaagattgttaggagtgataaggtttacacagaggcagccgaagatgaaattaagctcttgcaaagagtaaatgatgctgataacacaaaggacgattccataggagttaaccatattttaaagctattggaccatttcaatcataaagggcccaatggtatccatgtggtcatggtattcgaagttctcggtgaaaatctattagctttgatcaaaaaatacgaacataggggcattcccttgatttatgtcaagcaaatctccaagcaactattgcttggtctagattatatgcatagacggtgtggtatcatacacacggacatcaagccggagaacgtattgatggagatcggagatgtggaaggcatagttcaaatggtcgaagcccttgacaaacaaaaaagagaagcgaagagactgcaaaggcatgtttcgcggtcatcggatgccactactaatgacatcagtgatgaaaaatgggccgaatgtcaaactactgtgccgttggtcccgaacgcgaactccaaatcccactctattgataaagacttatcgaaaagagcatgcttcagaaggtcaaggcgtcatacgatcatcacggggtcgcagccattaccttcccctattagctcctcaaatttttttgaaatgaggtcgcacttttctggcagtaaccaaaatagcttttcatcggtatccggaaatagaaccatgccatcttccatcaacaataaccatagcattggcacaaggaataacagcaacttcttaaattcaacaccacattctctcacaagaatgttcacaaatgaaagcaataacaatagcaataacaataatgacaatgatataatgaacacaccattgcatgaagagcaactggcagactctctttctacttttgatatttccaatatgtcacaatcctcagatacaaatagtccatacatctctaataccacggattcaacatcaaatgctagtaccaacacgaaccctccagagaacttgattcagatcaaaatagccgatttgggtaatgcttgttggtacgatgaacattatactaactctatacagacaagagaatacaggtcaccggaagtgcttttgggtgctccgtggggttgtggcgcagatatctggtccactgcgtgcttgatttttgaattaatcacaggtgattttcttttcgaacccgatgaaggccattcttacaccaaagatgacgaccacattgcacaaatcattgaacttttgggtgagttaccgtcatatctgctgaggaacggtaaatacacaagaactttcttcaattcacgagggcttctaagaaatatttcgaaattgaaattttggcctctaaaggatgttttaaccgaaaaatacaagttttctaaagatgaggcaaaggaaatatcagactttttgtcacctatgttacagctagatccaaggaaaagagcagacgcaggcggcttggttaatcatccatggctcaaggatactttaggtatggaagaaatccaagtagttgatagagagttgtatggaagcggctccgacattcctggatggtttgaagaagttcgcgaccataaaaagcattga

SEQ ID NO: 2043 - DNA, 1578 bp, Saccharomyces pastorianus
atggctgccgatgaacaagtttctaacatgtttgacactatcttagtgttagatttcggttctcaatactctcacttgattactagaagattgagagagttcaacatttacgccgaaatgttgccatgcactcaaaagatttctgaattgggctggactccaaagggtgtcattctctcaggtggtccatactctgtgtacgctgaagacgctcctcacgtcgaccatgccatcttcgatttgaacgtcccaattctgggtatctgttacggtatgcaagaactggcctggatcaacggtaagcaagtcggtcgtggtgacaagagagaatatggtccttccactttgaacgtgcttgacgatgccaaccctctatttaagggtatgaacaattctaccgtctggatgtctcacggtgataaactacatggtttaccaaccggttacaagaccattgcaacttccgataactccccattctgtggtgttgttcacgaaactaaaccaatctatggtatccaattccacccagaagttacacactccactcagggtaaaactctattgaaaaactttgccgtcgatttgtgtcatgccaagcaaaactggaccatggaaaacttcattgacactgaaatcaacagaatcagaaaattggttggtccaaccgctgaggtcattggtgccgtttccggtggtgttgactccaccgttgcttccaaattgatgaccgaagccatcggtgaaagattccatgccattttggttgacaacggtgtcttgagattaaacgaagctgccaacgttaagaagacccttgttgaaggtctgggcattaacttgaatgtcgtagatgcttccgaagaatttttgactaaattgaagggtgtcactgacccagaaaagaagagaaagatcattggtaacacttttattcatgtctttgaaagagaagctgaaaagatcaagccaaaggacggtaaggacattgaattcctgttgcaaggtactttgtatccagatgtcattgaatctatttctttcaagggtccttctcaaaccatcaaaactcatcacaacgtcggaggtctactagagaacatgaaattaaagttgattgaaccattgagagaactgttcaaagatgaagtcagacatttaggtgaattgttgggaatccctcacgatttggtctggagacaccctttccctggtccaggtattgctattcgtgttctaggtgaagttactaaggaacaagtcgagattgccagaaaggctgataacatttacatcgaagaaatcaagcaggctgggttatacaaccaaatctctcaagcctttgcttgtttattgcccgttaaatctgttggtgtgatgggtgaccaaagaacttatgaccaagttattgctttgagagccattgaaaccactgatttcatgaccgctgattggtttccttttgaacacagtttcttgaaaaaggtcgctgcgagaatcgttaacgaagttgacggtgttgcgagagttacttacgatatcacttctaagcctcctgccactgttgaatgggagtga

SEQ ID NO: 2044 - DNA, 3309 bp, Saccharomyces pastorianus
atgggtatagaggtgtattgtggatcagttcccgtaagctattttgacccgtttgacctattcgagagcctaaagccagagttccagcagatcttaccgttagacaatgtacactggaaagctccaaatggaactgtacgaacagttaacaagctgccaattgaattgattccggaagatagaggggatggggaaaaacctaatactgaacaaccgtttctcagattccttatagtaaactgtatttcgattgaccagtatagagcaaaagtacgccctctagtgaggcaatggttagcaagcctggaatcagtatcctcatcgacaggagagaaaatgatatataagcccattattctgctgtatgctaattccgaagtggtagattctaacctattcaaatctgtatctctaatggaaaaatttggtaaagattttccgcatatacaaactctggaagttcgatctgtctataggtctccgaaggatagacaagagttttggaaccagtttagccaacaaataaaggcttcggtgttggtcatcttccagcaacgattgacacatttacagcgttcgttggctactctgcaaaagggaaatgattttgaagagcaacttttaacaagagaaaaactgtatgagctgtatgtagcgtttaatattctagaagacgccaacctggaactacaaaaaattaaaagggagatacttcacaggaacatgaacatgcctgatgggcaacttcaaataccatttgagtcgtcctctaaatcggatgaatctttaagttctataataattgaaggtaccctagataaatttcagctgcataggtattttttcattagaaggctaagacttttgagattagaggaacaaactttagccgcgtttgtgggtgcatatcaactaataaagaactttattgagtctgtgtcaatagaatacaaaaaatctgcgagattattagagtttaagcatagttttttaaaatcgatgttatcatattttccacgtgagaacattggcaatgcgatattgtgtgagattaaagctgaattattgatgttaaagcgcgataactggatacaaggtgttatgatagcgagtgattttaggttaatggacaagtcttgtccaaatacaggtgtaccatataagtttgatctgttgaaagaaacgttttccgatgaaataacctttcaagataacttccttagtctcaccaaagaaatcctttctcttttcaacatgtgtgaaggtaagcgccagaggatagttgatatattatccatagagattgggttgctttaccaccaaagaaaagaatatgaacaggctgtttcccttttcctttcgtgttatgaatattatactcaaacgaactggaatgtcattggtctcaaaatcttgcaagtttttatagactccttaacacactgccccgagttagaaatcttaaagattgatggagaatcgatttctgcatcgactatcctaagtaatgcatttctcaacatattaaagttgtgcaaagatgatattgacaaggaagcttggtggaaaaagttcatcgatttacagctgaaaaatcaggccgacctgatttatcctttggatgggctgtttgaagtaaatttgattcccaaggttgacatcacaagggcaaatgtttatggccttgaagttgatttgaagaattatggatttcctgaagacattagtacaaaggccatgaaattgactttaaaaaatataatgggtgatatcattatatttgaaacaggtaatattcttttgaaaaaaggtaaaaataggccggtattagaatgtaaaggtatcatgtatggcgaattttctcctctgtcttttcaaattactgttggaggaattacttttgttaaggattttctagaaactcaagatgaaactgttgtaattccggaattgtactgtaaagaaaataccaaggtcttgatcaatcaggcgcgtgacttgaacctgggggaatatgcacttgaattaacaagtgtgtgccgtaatcatttagaatcattacaagtcgagattgaagtccaaaaaagtgcgagtaacgtgaagaatgtacctatcagtttttctgtggatgaaattcaagtcaagaggagattcaataacttgattgagaacaccagagtggagtattatttattagatcaaacaacggctttcgatttagtagtcaaaacatcattcaccaaaaaaaataaacaagacgtgtatagcgagactaaaaaagtacatattgaatgctacttgcagctatcagtttcagtcgaagatattttcaaaaaggatatatttttttttaagttcctgttaaactcttctataagggaagagccagtgattttgtacagctcgcaattatcaagtccagacacgcggaatgactacaaaatagagggcaactacattgccaccacacctgagttgattacattcgatgggaatgagagtttcataaactgttatcaaattacagccaatattaattttgactcaaaagatatctttaaccttaaagttagatataatacactgaaggaacagctagattgctttgtcactgacgcattacttattgagggcgatgttgaatggtttgttggctttgaaaagtggagaatgttttgggaattggaaatcttaaaagagttaaaatatgattatgatgcatttaaagaaaacagaataattaaatcactaaaagcttcaatagatttgaataaaatcaactctcgtttaataaaactgtcaatggaaaagaccgttctcgacaaaatgttgcgatgtttgaataaagtgggcaagggagttgcagtatgtaatacagatatggatgaatacgtgaggaatctggtaccgaagcaattaactgtccctgtacaattaccaggttttgaccaattctttcgcgtacggttccacccgatacaaaccgagaataccacatcggacaataccatggttactctaggctgtccaattcaatatgtggtagtcgtggagaatcttagtgaacaatggggacaagacgccataaatgatggcgggtatattcttgaaatattaagcagtaatgagtggttaatccatgggaaaaaacgaggcgcgataaaagagagacaaatggagtttgaagtttatttaattcccttgagaaagggttatctaagttttccgcacgttgaagtgacgaatatatatggtaaaacctgtagagttgatcattcaaatgcatttgagtcgatgttaatcttttag

SEQ ID NO: 2045 - DNA, 1422 bp, Saccharomyces pastorianus
atgagcacttgtccacatatacagcaagtatttcaaaatgaaaaatccaaagatggagttctaaaaacttgtaatgcagccagatacatcttaaatcattccacacctaaggaaaaattcttaaaaaccatgaaatgtggcacatgccatgaaataaactctggatcaacttttatgtgtctccaatgtgggtactgtggatgctggaaccattcccattttctctctcatagtaaacatatcggtcacatattcggtataaactcaaataacggccttttgttttgttttaaatgtgaggactatctaggtaacattgagctgatcaatgatgctattctgaccaagtactgggacgacgtttctactaaaaccgtggtcccgattatggagagaagagatggactttctggcctcatcaatatgggatccacttgctttatgagtagtatccttcaatgtctaattcataatccatactttatcaaacactccatgactcaatttcattttaacaaatgcaaagtgcgttctcctgataactgcttttcatgtgcactcgataaaatcgttcacgaactttatggggtcctgaatacagaccagccatcttcatcatcgtctgcaacaaatcggcaagctggttttatatacctcttaacatgtgcatggaagatcaatcagaacttagcaggctattcccagcaagatgcccatgaattttggcaatttataatcaaccaaatacaccaaaattacgttctcagcctacccagtaccaaggaagctgacaaagaaaataccaagcattgcgattgcatagtacatactgtttttgaaggttcgctggagagctctatagtgtgtccaagctgtcaaaacaattctaagacgaccattgatcccttcatggatctttctctagatattaaagacaaaaaaaaactctacgagtgtcttgacagtttccataaaaaggaactgttgaaagatttcaactatcattgtggagaatgtaacagtacacaagatgcaataaagcaattgggtatacacaagttgccatccgttttagttttgcaattgaaaagatttgaacacttactcaatggaagcaatagaaaactggatgattttattgaatttccaacctatttaaatatgaaaagttactgttctatcagggaaagtgaaagtgaaaagcatgtcgtaaacgataaagtaccagatattatctacgaattaattggtattgtttctcataaagggacagttaatgaagggcactatattgcattttgtaaaatttcgggtggacaatggttcaaatttaatgattctatggtctcctcaatttctcaagaagaggttttaaaggaacaagcatatttattattctacactattcgtcaagtaaattga

SEQ ID NO: 2046 - DNA, 2088 bp, Saccharomyces pastorianus
atggagtatcctgatccagatacaataaggatcctagtcaccaccgacaatcatgtgggctacaacgaaaacgatcccattacaggtgacgattcctggaaaactttccatgaagttatgatgctagctaagaacaacaacgtagacatggccttacagtcaggggaccttttccatgtaaataagccttccaagaaatcactgtatcaagtgctaaagagtttgagattatcttgcatgggtgacaaaccttgcgaactggaattattgagcgatccctcccaggttttccattatgacgagttcaccaacgttaattatgaagacccgaactttaatatctctattcctgtctttggcatatcaggtaatcatgatgatgcttcgggagactcactgttatgtcctatggatatactccatgctactggcctaatcaatcattttggtaaagttattgaatctgataaaataaaaatcgtgccattgttattccagaaggggtctaccaagctagcattgtacggactagctgctgttcgcgatgaaaggttattcagaacttttaaagatggtggcgtcactttcgaagtgccaactatgcgtgaaggtgaatggtttaatttgatgtgtgttcatcaaaatcacactggccacactaacactgcatttctacctgaacaatttcttcctgattttctggatctggtaatatggggccatgagcatgaatgtataccaaatcttgtacacaatccgatgaagggtttcgatgtcttacaacctggttcatctgtagccacatctctttgtgaagctgaagcacaacccaaatatgtgttcattctcgaaataaaatatggagaggcaccaaaaatgactcctattcctttagagactatacgtacattcaaaatgagatccatttcgttacaagatgttcctcatttgagacctcatgataaagatgtaacttccaaatacctcatcgaacaagtggaagaaatgatcgaggaagccaacgaggagaccaagcgtaaacttggagacgatgctgatggtgatatgatctccgaattacccaagccattgatcagattgcgtgttgactatagtgcacctcccaataaacagtctccaattgattaccaagttgaaaacccgcgcagatttagtaatcgctttgtagggcgtgtggctaatggtaataacgtcgttcagttttataaaagaagatctcctgctactagatcgaagaacctcggtctaaatggaacaaatattagtgatagagatgtagagaaactcctgaacgaaagcggtggcgaactggaagttcaaactttggtcaacgatctcttgaacaaaatgcagctatctctcttaccggaggttggtttaaatgaagcagtgaagaagtttgtagataaagatgaaaaaacagcattaaaagaatttatcagtcatgaaatatcaaatgaagtggatatattgtctacaaataatgaatttctacaaactgaagatacagaggagatgaaagcgcttataaaacaagtcaaacgtgctaattctgttaggccagccactcccatggaaaatgacgaggccagtctttcacttgataacaaccgactgagttcttttcaacccagtaatgaattacgccgggacaagccttcaagtactgctcaatctcatgttagtaaggaagcagaagtagaccgtacaaaagaatttgaaagtgttaaaccaacaaagaaaactaggtctacacgaaccgtaagaagaaaaaaaactgctgctccttcagactcgattgttatatccgatgcagaaaatgaattcgaagatgataatgatgctcgagtcgatgatgttgatgttaatgaagatgatataattatggtcagtactgacgaagaggatgcaagttacggcttgattagtggtaggaaaacaaaaagaaagagccgttcgcctgcaggtacgaaggcttcctccacgagaggtaaaggaagagcaaaagcgacaaggacgccaaaaacggatatccttggaagcctccttgctaaaaagaggaaatag

SEQ ID NO: 2047 - DNA, 804 bp, Saccharomyces pastorianus
atgtcccaaggtagaaaagctgcagaaagattggccggcaagacggtgctcatcacgggcgcttctgctggtattggtaaggcgaccgcgttggagtatttggaagcatccaatggaaacatgaaactgatcttggctgcaaggagattggagaagctagaggaactgaagaagaccatcgacgaggagtttcccaatgcaaaggtccatgtgggtcaactggacatcacacaggctgagaagatcaagcccttcattgaaaacttaccagaggcattcaaggatatcgacattttgataaacaatgccggcaaggctctgggttccgaacgtgtcggggaaatcgacacacaggacattcaggacgtgttcgacaccaacgtcaccgcgttgattaacatcacgcaagcagtgttgccaattttccaagccaagaactcaggggacatcgtgaacttgggctcggtggccggcagagacgcataccccacaggctccatctactgtgcctccaagtttgccgtcggtgcgttcactgacagtttgagaaaggaactgatcaacacgaagatcagagtcatcctgatcgccccagggctggtcgagaccgaattctcactggttagatacagaggtaacgaggaacaagccaagaacgtctacaaggacaccacgccgctgatggccgatgacgtggctgacttaatcgtatattccacttccagaaaacaaaacaccgtggttgccgacagcttgatctttcccaccaaccaagcctcgccccaccacatcttccgcggttga

SEQ ID NO: 2048 - DNA, 1785 bp, Saccharomyces pastorianus
atggctgttataaggatcaagaagcccagagagccaaagcaagaggaggcggcattagaagacgagcccaaattaaagagaatccgcataaaggctaaggtcaataatgatgaggacgccacgccaaagccaaaattgaagataagcctaaagaaaaaaagagacaatattgaaaataaagagaagaaaaattcgttgaagctcaaactgaatttgaagaagaatgaagatgtagttaaaaaggtccataaaactccaaaactacgtctcaaacccattagaattcctggcgaggcatacgactcagaggcatctgacattgaagatgaccccctgatagagaccggtatagtattgagaatactcccggatatacaattagagttcgtaaaaaattcgttggaatccggtgattactctgggataagtatcaaatggaagaatgaaagacatgccattgtgactatcaacggtgtaatgtatggtgccattgtagtagatttacctacagtgatagaagtgaataagtctgtcgatagaaagaatcttttgaagacttttgatgtgtcacaaatgttattatgcgtaagatctatacaaaatgaagaagaggtgtatgctttagaagcaccagatacggaagacttagtggttaagcactttgaagaaattgaggacgaaatctcggaaaacaaagaagcctttgtgaaaggatacaatggtgcaccgctgagcgatgcagaggcaaagcatttgaaaaaaattgctttgaagaactatgattacaagcatgggatatcaccacctctatacaatgtgcgaaataggcgattcaggcggaaaatggacccgaatgaaatagactatgtagagaaagtgattgatatgctcttgaagcaagacaaacaggctgaagaggttagctacggtctggtcgatgagagtgaactacaaacaaagcaagagcgcgtttccagttgggagaatttcaaagaggagcctggagagccttcagtcggacccaagaagaaagaagaaatacctacaatcacaccagtagccgctgaacagcaagaggaaggggaagaggaagaggacgaggaccttgacttgggagctgcctttgaaagtgaagaagaagaagaagaaggaaatgtcgctgacagaaacaagagacagcaacaggaagaagtcggtgatgaggttgatcaagacacagaaggtgaagacgatgaagatgaggaggatgaagaggaagaagatgaaggcgacaatgaagtagcaggaggagagagcgaatctgaagaagaaaaagatgaaaacagacagcacacggaacttcttgttgacgaattgaacgaactagagaccacactggcccacacaagacacaagctgggcaaggccacgaatcctctcttgaaaagcaggtttatcgacagcatcaagaagcttgagaaggaagcagaattgaaacgcaagcaactgcaacaaaccgaagagtcttcccagaagcagcatcaacaacctcctgacacagaagtcccacacaacgaagaagaagacgaggatgaggacgaggacgaagaagaagaagacgaggcagaagaagaagaagatgaagaggatgagaacgaagaagaggatgagaacgacgaaggggaacacacgcaagagggcaagattaccggcgatgccggtgaggctccagcagaagaaacacacgagcttgaccaaaatgacctcgacatgatgatgctgttcggtgcggagggcgatgagtaa

SEQ ID NO: 2049 - DNA, 1026 bp, Saccharomyces pastorianus
atgtctattccaattcccggtatcaaagatatctccaaactcaaatttttctatggtttcaagtatctatggaacccaacggtgcatgacaaaatcttcgataaattggatataacgaaaacgtataaaaatcccaagaagttgaaagtgctcgatctgtatcctggtgttggtgtacaatccgccatgttttacaatagatactcgccccagcaatattctatgatggaaagacgctcgagtctttacaaatttttgcaagcaaacttcaaagattctcccttacagatactaaaaagagatccgtacgactggtcaacctacttgcatttaatcgatgaagagcgattgtttgttcccgaggttcagccatcagatcgtatcaacgatagctttctaaccgtggctaacgtaacaggtgaaggctcagaaggccttattatgcagtggctgtcatgcataggaaataagaactggttgtatagatttggaaaaatgaagatgttactgtggatgccaagtaccactgccagaaagcttctggcaagaccaagcatgcgttccagatcgaaatgttcagtggtaagagaagcgtttacagatactaaactgattgccatatctgatagagacgagttgaaggggtttgatagtaaatgtttagaagagtgggatcccattgtgtttagtgccgcggacatctggcctacaaaagggaagccaatcgcattggtagagatggatccaactgattttgactttgatgttgagaactgggattatgtcacgaggcacttaatgattctcaaaagaacgccactaaacattgtcatggactcgctgggacatggagggcagctatacttcaatagtagaattactgataaggaactgctgaaaaagtgccccattgatttaacaaatgatgaatttatatacataacgaaacttttcacagagtggcctttcaaacctgatattttgatggacttcgttgatataaatcaaacagagcattctggttaa

SEQ ID NO: 2050 - DNA, 5181 bp, Saccharomyces pastorianus
atggtagctcccatcaaaagaaagagagatgacgaatttccactttcgagggaagattccacaaagcaaccatccgcttcatcattgataaggaacactgaagaagtgtcttttccaagaggtggtgcttctgctttgactcctttagaactaaaacaagttgctaatgaagctgccaatgatgttttatttggtaatgaaaatgccaaagtttctgaaccatcaactagaccattaaagaagaagaaaaccacaaagaaatctgcttctgataactcagcaaatgaagattcatcaaccgctactgatgaagcaaaagtcggtctggtcggacatgtcaattttaagactttgaagaatggctcttctctgttaggacagatctccagtattactagacaagatttgtgtgttacattcacagatggtatttctggttatgtcaacttaacacatatttcagacagatttactatgattttagaagatctcgatgaagatatggatagcgatactgaaactgctgacaaaaaagaatccaaggatggtgatgctgaatacgaatcatctgatgatgaagatgaaaagaataacaagtccaacgagcttcctaatttgagaaagtactttcacatcggccaatggttgaggtgctccgtcattaagaatacttcgctagagccttcaactaaaaaaactaaaaagaagagaatagagctaactatcgaaccttcattggtaaacacttactccgatgaagatttggttaaatcaacctctattcaatgtgctgtcaaatctattgaagaccatggtgctatcttagacgtgggtctcccagattttacaggattcatcgctaagaaagatatcacagattttgaaaatttgttgcctggtgctgtttttttaggtaatatcactaagaaatctgacagatcaattgttgtaaacacaaatttctcagacaaaaagaacaaaattactcaaatatcttcaattgatgccgttatccctggtcaaattgtcgacttactgtgtgaagctatcaccaaaaacggtattaccggtaaggctttcggtttagtatctggtgttgttaatttatcacacttaagagcgttttccgaagaagacttaaaacataaatttgccattggttccagtattagatgccgaatcatcgcctgtctagaaaacaaaaacggtgacagagttttgatattgtcaactcttccacatattttacgactagaagactcattaaaatctgctgaaggtcttgatgcgttccctatcggttacacatttgaatcatgtgccgttaaaggtcgtgattctgactatctatacctagccctggatgacgacagattaggtaaggtacactcttccagagttggtgaagttgaaaaccctgaaaagttaagtgccagagttcttggtttcagccccgttgatgatatttatcaattgtctaccgattcaaaatacctaaagttgaagtacctaagaacaaatgatattcctattggcgaattgatagccggttgtgagattacttccgtttctagttcaggtattgaattaaaaatttttaatgaccagtttaaagctaccgttccactattgcatatctcggatactagacttgtttatccagaaagaaaatttaagataggctccaaggttaaaggtagagtactatcggtcaatgcaagaggtaatgtgtacatgactttgaaaaaatcattggttaacattgaggatgacgaatcaccactaatttccacttatgagattgctaaagacatcaaggctaagaatgaaaagactttagcaacagttcaagttttcaagccaaatggttgtattctttcctttttcggtggtttatctggtttcttgcccaattctgaaatttcagaggttttcgtgaagaaacccgaagaacatttaaggcttggtcaaacagtagtagtaaagcttcttgacgtcgatgctgatagaagaagaatcattgccacatgcaaagtttcaaatgaacaagccgctcaacaaaaagataccattgagaacattgttcctggtagaacaactgttactgtcaatgttattgaaaagactaaagaatctatagtggtcgagatcccagatgttggcctacgtggtgttatttacgttggccatctttctgatgctagaattgaacagaatagagctcagttgaaaaagatcaggattggtgctgagctaaagggtttagtgattgataaggatacaagaactcgtgtgttcaacatgactctaaaaagttctttaatcaaagacgccaaaaaagaaactcttccattaacttacaatgacgttaaagatataaagaaagacgctccaatgcacgcctacattaagtccatttctgacaaaggtttatttgttgcatttaacggtaagttcattggtttagttttaccaagttatgccgttgatagtagggatatcgatattagtaagacattctatgtcaaccaatctgttactgtgtatttgctaagaacagacgaccaaaaccagaaatttttactatctctaaaagcccccaaggtcaaagaagaaaagaagcaagctgaatctaaaattgaaaatccaattgattcatccattaaatgttgggatgacttgtccatcggtagtgttgttaaagcgaaaatcaaaagtgtcaaaaaaaatcaattgaacgtcatcttagctgcaaacctgcacggtagagttgacatcgctgaagtgtttgacaaatatgaagaaattaaagataaaaaacagcctttgagtcactacaagaaggatgatgttattcaggtgaaaatcattggtaaccacgatgtcaagagccataaattcttaccaatcactcacagaatttcaaaggctagcattttggaattatcaatgaaaccctcagaattgaaagtgaaggaagtacacacaaagaatttgaaagaaattagcgttggcgaagaactgactggctttgttaataattcgtcaggaaatcatctatggttaaccatttctccagtcttaaaggctagaatttctttgttagacttggcagaaaatgacaaagacttttcagataatattgaatcagttttcccattaggctcagctatccaagtaaaggttgcttctattgatcaagagcatggtttcgtcaatgttattggaaaagctcatgttgatgttgatatgtctacaataaaggttggcgatgaattaccaggtcgtatcttgaaaatagctgagaagtatgttttattagaccttggtaataaggttactggtatttcttttatcactgatgcattaaacgacttttctgtatcactaagtgaaactttcgatgacaaaattaacaatgttatcccaactactgttttggctgttgatgcagagaataagaaaattgaattatctttacgtactgccgctcctaaatctcgctctattgggtcccataaagacttgaaacagggtgatatcgtagatggtattattaataacgtgaatgacaagggtatttttgtttacttgagtaagaaagttgaagctttcgttccagttagtaagctatctgactcttacttgaaggagtggaagaaattttacaaaccaatgcaatacgttgtaggcaaagtagtcacctgcgatgaagattctcgcatttctctaactttgagagaatccgaagtaaacggtgacttgaagattttgaagaactattctgatatcaaggctggtgatatttttgatggtactgtaaagaacgtcaccgattttggtgtttttgtcaaactggacagtacagttaatgctaccggtctggcacacatttctgaaattgcagacaaaaaacccgaggatctctctgccctatttggtgtaggtgacagggtaaaagccattgttttgaagacaaatccagagaaaaaacaaatttctttaagcttaaaggcatcccatttctctaaacaagctgaatcgtcaaccgctactgcaaacgaagccgaaaaggaagatgaagatgaaatcatggctgacgtagccttcgacgattctgacaacgaatctgatgcagaggatcataacaacaacgctactgataagggggctaaaatatcatcagatggattatccttaagtgctggcttcgattggactgcccccattttggaccaagcacaggaagaagaagactctgaagaagatcttgaagactttactgaaaacaagaaacataagcataagagaagaaaggagaagatcatacaggacaagaccattgatatcaataccagagcaccagaatctgtcgcagattttgaacgtttaatcatcggtaatccaaactcttctgtcatatggatgaactacatggctttccaattgcaattaagtgaaatcgaaaaagcacgagaacttgccgaacgtgcgttgaagactatcaacttcagagaagaagctgaaaagatgaatatttggattgcaatgctgaatttggaaaacacttttggtactgaagaaactctagaagacgtcttcaaaagagcttgtcaatatatggactcttatgccattcatacaaaattgcttggcatttatgaaatgagtgagaagctagacagagctgcagagttattcaaagctacggccaagaaattcggtagtgaaaagatttccatctgggtatcatggggtgacttcttgataagtcataatgaagagcaagaggcccgtacgattttgggtagcgctttgaaggctctaccaaaacgtagtcacattgaagttgtccgtaagtttgctcaattagaattcgctaagggtgacccagaaagaggtcgttcattatttgaaggtttggttgccgatgcgccaaagagaattgatttgtggaatgtttacgtggaccaagaagtgaaagccaaggacaagaagaaggtagaagatttatttgaaagaataataaccaaaaagctaacaagaaagcaagctaaatttttctttaacaaatggttacaatttgaagaatcgcaagatgataagaagaccgttgaatatgtcaaagccaaggcaacagaatatatcactaatcatgaaacgccaaaggcagatgaataa

SEQ ID NO: 2051 - DNA, 1050 bp, Saccharomyces pastorianus
atggcaagacaaggcgggttttatgctgttcgaaaaggtagagaaactgggatcttcaattcgtgggatgaatgcaagagccaagtgaatgggtacggcggtgccatttacaaaaagtttgacaactatggtgaagccaaatcctttgtcggccaatcgaataatgcatcggattacaggagttccgaccgtttcgcaaactctaatattagcaaacctcatagtagacgaaagccctctcacgggttaaatgcgccatcatctttctattcctcgctaacaccatctccagcatcagcatcatactccgtcaacaaatctgccttttactcagtaaaaagtatcaatccagaagtcgagagtaagattttcaataactggaatgactgtcaaaactatgtcaagcgtaaaagaggtataacatttaagaaatttgaggatcaatctgctgcagaaaactttatcaatggaattagcgtacatgactacaaactaatgaatatttctaaggacacttttgaatccaactataagcattccaactctgtcagatatgataaatccatgaacgtttattgcgatggttcaagtctcggtaatggtacctcatcatcaagggcaggctatggtgcatactttgagggagcgcctgaggacaacatttctgaacccttaatttcgggagctcaaactaataatagagctgaaattgaggctgtttctgaagccttgaagaaaatatggcacaacctaactactaaagaagataaaataaactaccaaattaagaccgattcagaatacgtggccaaactgttaaacgataggtacatgacttacgatgatagaaaattgaaagagttgcctaattcagatctagtcattcctttagtggagagatttgttaaagttaagaaatattatgaattgaataagaactccttcaaaaatgatggcaaattccagattgaatgggtcaaaggacacgccggtgaaccaggtaacgagatggcagattttctggctaagaatggagcgtccagaaggtaa

SEQ ID NO: 2052 - DNA, 1227 bp, Saccharomyces pastorianus
atggctactttacattttgttcctcaacatgaggaagatcaggtttactccatttccgggaaggcccttaagttaactaccaatgacgatatcaagccgtacttacaagaactggttggtttgaagacgtgtacaaagttggacttttcaggcaataccattggtaccgaggcttctgaggccttggccaaatgtatctctgataacactcaggttaggaactctttggttgaagtgaattttgccgatttgtacacctcgagattggttgatgaagtcgtggactcgctaaagtttttattacctgtcctattgaaatgtcctaaactggagattgttaacctctccgataatgcctttggattaagaaccattgagtctctagagaactacattgtaaatgccgtgaacatcaagcatttgatcttgagtaacaacggtatgggcccttttgctggtgaaagaatcggtaaggctcttttccatttggctcaaaataagaaatctgcttccaaacctttcttggaaacgtttatctgtggtagaaatagattagaaaatggttctgcagtatacttggccctagggttgaaaagtcacgctgatggtttgaaagtcgtcaagctataccaaaacggtatcagacctaagggcgtggccactttaattcactacgggctacaacacttacagggcctggaaatcctggatttacaagataacactttcactaagcatgcttctttgatattagctaaggctttgcctacttggaaggatagtttgtacgagctgaatttgaacgactgtctcttaaagactgctggttcagatgaagtcttcaaagttttcactcaagttaagttctctaatttgcatgttttgaagttcgaatacaatgaaatggttcaaagcacccttgaaacatcctttttacctgccatggaaaaggggaacttgcctgaattggaaaaacttgaaatcaatggtaacagattagaagaagattctgatgctttagatcttttacaaggtaaattcgatgatttggagattgacgatttagaagaacttgacagtgaagatgaggaggaagaggaagatgaggaagatgaagacgaggatgaaaaacttgaagaagtcgaaacggaaagattagaaaaggaattgctcgaggcacaagtggatgaccttgctggacgtttggctaaaactgaaatcaaataa

SEQ ID NO: 2053 - DNA, 2175 bp, Saccharomyces pastorianus
atgctttcgcagacttctattccggaagtaaaagaagacgtggtaggttatgccctgcaccagaggaggtccagggtgggccaatttcaggacctaggtccccctgatttgatcactttggtcaaatcactaccttcgtcctcgagcaccatggcaccctccgtctcagccaccgataatggagcaggccctaacatcaatggccaagatcccacgactatagttaccgaattgcattctcatgataaactaaaaggtcagatcggtactttcttctactccatggggattgacacttctgatcctacttccattacgatctttgctaagaaaataactgatcttttcttggacacgcctcagatttggtttggtaagaagaagcatttccatgtttcgaaaatttccatcagttcttggaatgcgtttagaaagtatgatgttaatatcatagtccacattccagggaccgtgcaaacctatatcataagtagcgacggcgaacaatcgcagcttccctccgtgacagagacttcatccgcctccaattcacaggacttgaacgtaaacatgatctgggcggaaacttttatgagcggtattgtacgtgatattatgctgatgaaagataaccgagtagatggagaatcccaaaatttagtcgaaaccttgatattcaacccactaacctccggtgaactagaggatgtcgccacaaacttcattaaactgttccccttggtttatgagaaaggtgttaatttagacgcgcccacttatgttttgaatccttctttaaccaataattatttggttgaaacgttagtagaaatagttagattaaccaagagtttggacgcttgtcgtaaaatgctcgaggagctaatagaaatccatcctgaggcagttataattttaattcgcgtttattttgcatgcgatttagaaatagacgcaattgatctgatcaatgaacaattgaattccccatcgtcattcttagttgatgactcaaagacaagtcacatccagttgattttcaagtctgaattactaagcattcaaagcgagtttctattaaacgtcaagagagactataaactagctaaagaagtcgctatagaggctgtcaactgtgcaccaaacgaattcaaaacatggtttttattgacagaggcatatattaaattaaacgatatggcaaatgccctcttgtcacttaatgcttgccccatgtcacaggtcaaagaaaaatatgttcttagaagaattgcccctatcacctcagatgaaaatctccatctaccattaccgttggacgcatcggttgaagaaatttcgtcattgaatcccatggacgtccaattggaacaaaaatccgcagatccaaacttaatcaatctttctgcatccagtttaaaatctactttccaactagcgtataaactactaacagaaattgttcaaataaccggatgggaacaactcttaaaatatagatcaaagatctttgtcatggaggatgaataccaaggctcagcttcttctatcgacgaagtagatgttcatggtaatgaagcttctaagatgaggtccaagaggttatgtgaaaggtggttggataaccttttcatgctcctatatgaagatttgaaaacttataccgattggcaatccgagcagttgtattttgatgctcaaaacagtaagtaccataaactaactgtcgaatgggagttattcgggctttgtgccaaaagactgggacatcttccagaagccgcaaaggctttccaagttggattgtctcaaagattttctccagtctgcgcaaagaatctactggagttttacattaatgaacataagcgtattataagggattcagttttggtaaattccgaattgacctcttctcaaatattgtcaagtattaatgacttggacaggtcaattatcgatctagtagtcaagatttgttgttggaatcaccgttggtacattgagttttcaataattctaatagatgctttgagcgtcgcagttcaagacatgggtatcactaaagtgcataatgaaattgcctctagattttctgagcctgtggctcaactggttgacgataacattctaaagtttttaaaaaattttacaaatgacacattcgataattaa

SEQ ID NO: 2054 - DNA, 1377 bp, Saccharomyces pastorianus
atgatcgtcaaagctagtatgaagacggtcctaccgttatgccttacgctcctgtcccttttcagagcaacaagtgctttggatttggacaccactgacgcaacatcgatttgtgatgccacggctttaatacaagatggtatgctggattactacgaaggtactagatatggtggtgcagtggggatgttccaatctccctactattggtggcatgcaggtgaagcgtttggtggtatggttgaaaattggtttctttgtaaaaatgacacatacgaagaactattatataacgcgttactcgcacaaactggtgctgattacgattatatcccagctaatcaaacaatggttgaaggtaacgatgatcaaggtatttggggtattacagttatgggcgctgtggagagaaattttacagaccctgataacggtgccccaggttggctggcaatggtacaagccgttttcaataccatgtattccagatgggattctgaacattgcggtggtggtctaagatggcaaatcttcacttggaatagtgggtataattacaagaatactgtttcgaatgcctgtttgtttcaaattgctgcaaggctgggaaggtatactggtaataccacatatttggatgttgctgaacaggtttttgattggctagtggatgtcggatatgtggttcttaatgacactgctaacgtgtttgacggtgcagaaattgacaccaattgtactgatattactaaaattgaatggacctataaccacggtattgttcttggtggtatggcgtatatgtataatgctactaacggaacaagtgaatggaagaccagtttacaacagattctgaatggtgcggcgtcatatttcttcaaagatggtattatgtacgaaagtgcttgtcaagactatggcacttgtaacacagatcaaagaacatttaagagtatcttttctcgtatgcttggccttacaagtgttatggctcctttcactagtgacactattgatgcattaataaagacaagcgctgaagccgctgccaaatcatgtgatggtggtagagatggccatacatgtggcttagattgggaaaagcaaacaaacgatggttactatggtctaggtgaacaaatgaacgcattagaagttattcaaaatcttttaattcatgacagaccagccccatacaaggaagataatggtggtacatctaaaggtgatgcaaatgctggtatgaattcgtctacaaccagtgtgcttcaaaataatctgaacatcacaaagggtgatcgtgcaggtgctgctattatcacagcagtcatattaagcgttctaattggtggtgccgtctggatgttgttttga

SEQ ID NO: 2055 - DNA, 1410 bp, Saccharomyces pastorianus
atgagcgaaaaggtgaaaggtaaaaggaaaacccaaatagagaataagttgaaaaagggtgctagttcacaacaacggaaggaaacctgtatgaaaaatggtttggaagatcgacccaggacagccgattacgattaccttgaagtgattcaactggagcatgccgtgaccaaactggtggagtcctataacaaaataattgaactttcgccaaatctagtaacttataatgaagccgtagacaatcaagataaagtgccagttcagatacttccctctctgtcacgttaccaactcaaattagccgctgaattgaaaacactgcatgatcttaaaaaagaccctatcctcagagagatcagtgactatgaaaatgtattcgatattgaacagaagcaacatatcttgcaagaaatcaataaatttgacatggaaaagttagaacaaatcaaaaaagagagaaaagacaaaatcgatctaaatgtatacgaaagtttgaatggaaaggaagaggaaggggaggaggacgaaggagaagatagttatgacccaacaaagacaggagataccactaaaacaacaaaatggcctcccaaattaccagagattcaagatttagcaatcagggcaagagtgttcattcataaatctaccataaaagataaagtatacctgtctggatcagaaatgatcaatgcacataacgaaagactagaattcttgggtgattcaattttgaattctgttatgacactaattatttataataagtttccggattacagcgaaggtcagttatcaacattgaggatgaatttggttagcaacgagcagatcaagcaatgggcgataatgtataagtttcatgagaaactcaaaacaaattttgatctaaaggatgagaattccaacttccaaaacggtaaactaaaactatatgcagatgtgtttgaagcctatattggtggcctgatggaagatgatccaaggaacaatttgcctaaaataagaaaatggttaagaagactggccaaaccggtcatcgaggaggccactcatagtcaagttgccttggaaaaaacggacaaacttgacatgaatgccaaaagacagctttactctttgattggttatgcgtcattacgtctacattatgttactgtcaaaaagccaactgcaattgacccgaattccatagtagaatgtagagttggcgacggtaccgttctaggaactggtgtgggaagaaacatcaaaattgcaggtatcagggccgcagaaagtgctcttcgtgacaagaaagtattagatttctatgccaagcaaagagccgcaattcctagaagtgaatctgtgctgaaggatccctcaaataagaataagaaaagaaaattttcagacacgaattga

SEQ ID NO: 2056 - DNA, 1323 bp, Saccharomyces pastorianus
atggccaggaccaaatctaggaaacgttccggaacaaagcaaagtaaaaatgtgtctgtggtaaatagtaaagctgatatcgccgccatgattgaagcaagaaggctcaagcaaaacaaggggagcgttgagttggctaccaagaagagagcaataaatggactggtggatgagaagctagaagaacagtttaaggatgtcctgcgacggtttcaagtacaggcgcatgaagctgtgccgaaagaaactagaaatcagaacgatcaagtagttactacagtaaaggcgggacacgtcatggaggcaaatcctgatgccaaacgtgagttggaaaatgtatttcaagatgatggtgaagagcatttttcgacgagaaagcgtaggaaaatggaaaaaccgtccctatcagaattgaaaagccaggtaccgtttccgcaaaatatagagtggtacgactgtgacgcaaactaccctgccttactggcttccattaaatgcaccaaaaatgtgatccctgtacccaaccactggcaatccaagaaagaatacctttctggccgttctttgctgggtaaaatgccttttgaattgcccgatattatcaagaagacaaatatagagcagatgagatcaacgctcccgcaaagtggaccggatgctcaagacgaaaagtcattgaaagaagcatcaagagctcgagtccagccaaaaatgggcactctagacttggattacaagaaattgcatgatgtgtttttcaaaacgggagcgaactggaaacctgatcacttgctacctttcggtgatgtttattacgaaaacaggaatctttttgaggaggcgaaatggagaagaatggttaatcgcaagaggccagggagaatcagtcaagaacttcgcgagattatgaacctgcccgaagggcagttaccaccatggtgtatgaaaatgaaagatgttggattgcctatagggtaccctaatttgaaaatcgcaggcttgaattgggacataacgaatttgaaaggagatgtatatgggaaaattattccccatggtcagtcaagggccaaaaatcaaaccaagaaatatttcggtgctttaatttcgtttgaaactcctgaatttgaaaccacaaagggtgatgaagaggtagatagagtggaaaaaaaattacaagatggagatgttaaagatgaagcagagaataaattgaaatacgttcagaaagacatatctgaagggataaccttagaggaagaagaagaagttgaaaacggggaggagccattagaaaagcaattatatactatattgaaatag

SEQ ID NO: 2057 - DNA, 1335 bp, Saccharomyces pastorianus
atgatttccggtaaagagttgagaattatttctcttttgaccttagacacgatctttttcctgttggaactgatcattggttatatgtcgcattcgctggctttgattgcggattcgttccacatgctgaatgatattatctctcttttagtcgcgctttgggcagtggatgtggccaaaaacaggggtcctgatgctaagtacacttacggctggaaaagagctgaaattttgggtgccttaatcaacgctgttttccttattgccttgtgtttttccattatgatcgaagctttacaaagattgattgaacctcaagaaattcagaacccaaagttggttctgtacgttggtgtagcagggttgatttccaacattgcgggtttgtttctgttccacgaccatggcagtgacagtttgcactcgcattctcatggctccaccgaaggcggaaataacgatctcgacatagagtcgaatgccactcattcccattcccacgcgtctcttccaaacgataacttttctgccgacgaagacgctatttcaagtcctggtccatcagaggacatcagagaagtccttccccaatcagtagtaaacagattatccaacgaaaaccaacctttattgaaccatgatgaccacggtcacaatagcggaccaaagaaaaacaaacaacgttcgctaaatatgcacggtgtctttttacatgtcttgggtgacgctttgggtaacatcggtgtcattacagcagctttgttcatttggaaaacagaatattcttggaggttttattcggatccgattgtctctttgcttatcaccattatcattttctcttcagctctgcccctatcacgtagagcttcaagaattttactacaagccacgccatctacaatttctgccgatcaaattcaaagagagattttggcggtacctggtgtagttgccgtccatgatttccacatctggaatttgaccgagtccatatacattgcatccattcatgttcaaatcgactgcacacctgataaattcattagctccgccaaattgataagaaaaatcttccatcaacatggtatccattctgccacggttcaaccagaattcgtttctggagaagtcaacgaggatatccgtagaagattttccatcatagccggcggtacagaaccttccccatcatcatctcaagaagccttcgagaataacggaaactctgaacgcgataagaagcgttcccctactgcctacggtgccaccacagcatcatctaactgtattgtcgacgatgctgtaaactgtaatacttctaattgcctttaa

SEQ ID NO: 2058 - DNA, 1752 bp, Saccharomyces pastorianus
atgctacacagacacaagtcaaagcaaaaaaagttcgaaggtattactgaacaagttggtcgcgacttggcagggttgcaattactttccaatgacatccaaaaatctgctatccaacagggtcatccaacaacgaaggggaatggtggaactcaaggcatggctaacaagtattcggttcctaaaaaaggactgcctgctgatttatcatacgaattgattcataacgaattaacacttgatggtaatccgcatttgaatttggccagcttcgtaaatacattcactacagaccaagccaaaaagctgattcatgagaatttgtccaaaaacttggctgataacgatgaatacccgcagctgattgaattgacccagcgttgtatttccatgctagctcagttgtggcacgccagtcccgatgaggaaccaatgggctgtgccaccaccggttccagtgaagcaattatgcttggtgggctcgccatgaaaaaaagatgggagcataggatgcaggatgccggtaaagatatttccaaaccgaacattataatgtcgtctgcatgccaggtggctttggagaaatttacaagatatttcgaagtggagtgcagattaattccggtttccagcaaaagccaccatatgctataccctgaatcgctgtgggactatgtggacgagaacaccattggctgttttgtcatcctagggactacctacaccggccatttggaaaacgtggaagaagtcgctgacgtgttgtcgcaaattgaatctaagcatcccgactggagtaacgttgacattcctatccatgcagacggtgcctctggtgggttcatcattccgtttggctttgagaaagaaacaatgaaaaactatggtttggaacgttgggggttcaatcatccacgggtggttagtatgaacactagtggccataaattcgggttaactacacccggtctgggttgggtgttatggagggacgaatctctactacctaatgaattgagattcaaattgaagtatctcggtggtatcgaagagacttttggtttgaatttttcaagaccggggttccaagttgttcatcaatatttcaattttgtttctcttggttatgcaggatacagagcacagttccaaaattctttgtttgtggcaagagcgttttctttcgaactgttgaattctagtaaacttcccggttgttttgaaatcgttagtagtatccatgaaaacatcaaggacaactctgtgccaaacaaggtgggtgagtactgggatcgcccacaagtgtataagccaggtgtgcctttggtggctttcaagttatcccaagaattccatgaaaaatacccggaagtcccacaggcaattctttcttctatgctaagaaccagaggatggatcataccgaattatccattaccgaaggctacagacggctccgataagaaagaagtgttgagagtggttttcaggaccgagatgaaactggatttggcacagttattgattgttgacattgaaaatgttttgacgaagttgattcagagttacgaaaaggtttgccaacacatagacgctgtcgctgaacaaacgccggagcgcaagagttcttttatttatgaaatgttgttggcgttggcgtctccgcaagaagacatttcaaatccagaagaatccgaaaaaaagaagaagctagaagaaagaacaacaagaaattacagaggaacctgctaa

SEQ ID NO: 2059 - DNA, 180 bp, Saccharomyces pastorianus
atgaagttatctcaagttgtcatttccgccgtcgccttcaccggtttagttagtgctgccaacagctccaactcctcaagctccaagaacgctgctcaaccaattgctggtttgaacaacggtaaggttgccggtgccgctggtgtcgcccttgctggtgctttggcctttttgatctaa

SEQ ID NO: 2060 - DNA, 435 bp, Saccharomyces pastorianus
atgtttggtaaagtgtttgtaagttacgtcaggacaagaatcgggtttaagccattaagcacgatatacgcgcccgcttcttcctcttcctcctcctcctcttcttcttcgtcgcacggcttcgacaaagaggcgtactttccgtataaaaaatggcaggagttggatatgcaccaaaagcaagaattcatccagcggttcgtcaagaactacagacaccaatacccaagctccaagaccaacgtatcgttgaagggactgatcatcggcatggatgagcacaacgattcgccgtccgtgttcggcattttttacaacgatatttggaaatcgttcaaaaacgagccagaaaaggccggtggtagtcttatccccatgaaatcgggtaatagattcagccatcctagcttcagacagttgttgatacaaaaatag

SEQ ID NO: 2061 - DNA, 1257 bp, Saccharomyces pastorianus
atgaacccgtcagaaccgaaagccatacacacagaaggaggtatgcatcccttagttgcaagagagatggacagtacagacttacagccaatacccggaacaaggtcgccttcaccaaaggaaacaagcaaccatgaagacgtggaaatcgaagactataccatcggcgaccaaacaacactacaaagaataagtaaagattatttgaaacctaatctcgggctcgttctcttgacagtatcatattttttcaactctgccatggtggtgtctaccaaagtcctagagaatgaccccgaagatattgccaatgacacacagatcaagccacttcaaatcttattagttagaatggtaataacgtatattggtacgttgatatacatgtatattaataaaagtaccatttcagatgtgccgttcggcaagcctgaagtacgtaaatggttgatacttagaggttgcactggatttttcggtgtgtttggaatgtattactcgttgatgtacttgaccataagcgatgcagtcttgataacgtttctatcgccatcgttgacaatatttttatcgtggcttatcctgagggagagatttaccagagtggaagcgctaggttcgctggtttcattaatgggcgtggtgttgatcgtgagaccatcgttcttatttggagtgcccgaaatgacagactcttcgtctcaaatagtggagtcttcagacccgagatcaagactcattgccactttggtcgggttgtggggtgtcttgggaatgagctgtgtctacatcattatccgttacatcggtaaaagagcccatgctataatgagcgtgagctacttttcattaatcacagcgttggtttcatttatcggtattaacacaattccttcaatgaagttccagatcccacattccaaaaagcaatggatattattcgctaatctaggtatttccggatttattttccagctcctgctgactctgggaattcaaagagaacgtgctgggagaggatcgcttatggcatacacccagctgatttatgccgtgttctgggatgtcgcattgtacaagcattggccaaatatgtggtcgtggtttggcatgataattatcatcaccgctacgttatgggtgataaggatccggtcagccaataacgaagctatcgctaaggatcttactccgatacttgaagacgaggaaaattccataccgttgacagatttcgatatgtcggactctaagtga

SEQ ID NO: 2062 - DNA, 573 bp, Saccharomyces pastorianus
  modified_base (92)..(112): a, c, g, t, unknown, or other
atgcctctagagtctatatgggccgatgtccttgacgaagaaccagtaaagaaacagaagccaattcacagacggaataacgataacaaaannnnnnnnnnnnnnnnnnnnnggaggaacagcgacaacaagccaaacaacaacaaaagagacactgaaaccaagacaaatcacaataaaagaaacaatgaaacgaagacaaagaacaaaatcaaagatacgcctgccagacagaagaatccgcctcgtaaccagggcaagacttccactacaaacgaaccattaacggtgaatcccttttcccaaaagacaaccgaggtgcctcccccacctgtttcgcctagcaagaataagcctgctaaaacgaagtccaaactggatgccgcttcaaagatgaaattactaaagaagaagatcgaagaacaaaggaaaatacttcaaaagactagtcatgaggagcaacaacaacagttgttgatggacttcttgaacgatgaggggaactcgaactgggtagatgacgaagaagaagaactgatccttcaacgtttgaatacctccctgaaaatatga

SEQ ID NO: 2063 - DNA, 183 bp, Saccharomyces pastorianus
atggccaacaaggttattcaactacagaaagtgttccaatcgtccggtaaacctctatggtggagacatccaagatccgcattatatctatatccattttatgccatttttgcagtcgctgttgtcacaccactattatacattccaaatgctattagaggtatcaaggccaagaaagcatag

SEQ ID NO: 2064 - DNA, 462 bp, Saccharomyces pastorianus
atgggtaagaagaacactaaaggtggtaaaaaaggtagaagaggtaagaacgactatgacggtccaaagcgtgagctttattacaaagaagaaggccaggaatatgctcaaataaccaagatgttgggtaatggtagagtcgaagccagttgttttgacggtaacaaaagaatggctcatattagaggtaagttaagaaagaaggtctggatgggacaaggtgatattattcttgtttctttgagagatttccaagacgaccaatgtgatgttgtccacaaatataatttagatgaagctagaacactgaagacccaaggtgaacttcctgagaacgctaagattaatgaaaccgataacttcggtttcgaatctgacgaagacgttaactttgaatttggtaatgctgatgaagatgatgatgaaggtgaagatgaagaacttgatattgatgacatttaa

SEQ ID NO: 2065 - DNA, 3156 bp, Saccharomyces pastorianus
atgactatcatcgtcgcttctttgttcttaccatacacgcctcagttcgaggccgatgtcacgaattcagacaccgccaagctggttgaatcaagcatgatcaaggtggactgcaacaatcaggaattggggaaacaagaaagaagcagctctgtgacttcggcgaactctcatcatatcggtttgccgcaagagcctcagatcaatggtgatcctttgtctaggatcacggcaaccacaccggccacggcggccaacttccacaatggcatggaaatgctatcctctgagcaatttttggaagaattgactgccaatgccacccatgcggccaattccggtaaccctcagtccaacccagtgagttctgcttctgctgccttacagccttcagtggaagagtttttctcagctcctagtgccagagtctgttctcccccacaagaagcgtctgcctcttcttccaacgctccatcatctcaccataacgacttgagctctagccttttgaaaaatgctaatttatcatttgacgcttgttctcctaggactagaagctcatccaagagtgccgtgattaccccggtttccaagagcgtcccaggcgtggaccctgccgttgtcgatgtggccaaagttagagaggagtttcaacagcaagcctccttgccctccatgaaaagagtttctggtggtactactggcgattcttctagcgctactgcgtgcacaggttccaatttaagatattgtgagcagttccacgataactttattgaagacactgatagtgaagacgatatcgattctgatttggagactgatgctaccaaagaatacaatgtccctaaattcggtggctattcaaataacgcgaaattaagagcatctctaatgaggaattcgtatgagctgtttaaacatttaccatggacaatagtcgatagcgacaaaggtaacggatccttgaaaaatgcagttaatattgcagtcgctgaaaagaccgtgaaagaacctgtttcttgggtaggtacgatgggtatccccaccgatgaacttcctcacgaagtgtgccagaagattacaaagaagttggaacacgacttcaattctcattcagtggtcactgatgatatcactttcaaaggggcttataaaaactatgccaagcaaatcttgtggcctactctacattaccaaattccggataatccaaattcgaaggctttcgaagaccattcctgggactactatcagaaagtcaaccagaagtttgctgataagattgttgctgtttacagaccaggtgacactatctggatccatgattaccatctgatgcttgttccgcaaatggtaagagagaaactacccaaggctaagattgggtttttcttacacgtttcgttcccaagtagtgaggtctttaggtgccttgctaacagagaaaaaatccttgaaggtatcattggtgcaaactttgttggattccaaactaaagaatataagagacattttctgcaaacttgtaataggttactggccgcagacgtctctaatgacgaggttaagtaccattgcaatattgtttccgtgatgtacgcgccaatcggtattgattatttccatttggcatcgcaattgagaaatgagtctgtgttggaatggcgtcaattgattaaagaaagatggcatgacaaaaaactgattgtttgtcgtgatcaatttgatagaatcagaggtctccaaaagaaaatgttagcttacgaaaggtttctgaaagaaaatcctgaatacatcgaaaaagttgttttgattcaaatctgtatcgggaagagctcagatcctgaatatgagcgtcaaatcatggttgtcgttgatagaatcaactctctgtcttctaatattagtatttctcaaccagtggtctttttacatcaagaattggattttgcccagtatttggcattgaattgtgaagctgacgctttcttagtgaacgccttaagagaaggtatgaatttgacatgtcacgaatttatcgttagttcatttgaaaagaacgcgcctttgcttttatctgaattcaccggtagttcttccgtcttaaaggaaggtgctatcttaatcaacccgtgggatataaatcttgtagcacagagtatcaaaagaagtttggaaatgtcccctgaagagaagagacgtagatggaagaagttatttaaaagtgtgattgaacatgattccgataattggatcactaaatgttgcgagtacgtgaataacgcttgggaatccaaccaagaaacatcaactgtttttaacttagctccagaaaaattctgttctgattacagagcttctaaaaagcacttgttcatcttcaaaatttcagagcccccaacatcaagaatattatctttattaagtgaattaagctctaacaacattgtttatgttttgagttcctttaccaagaatacatctgaaggtttatacaatggtgttctaaacatcggtttaatagctgaaaatggtgcctacgttagagttaatgggtcgtggtacaatattgtagaagagctcgactggatgcaagaagtagccaagatctttgacgaaaaagtagaaagattacctggctcctattacaagattgccgattctatgatcagattccatacagaaaatgcagaagatcaagaccgtgtcccaaccgtcatcggtgaagctatcacacacattaacactttattcgatgataaggatatccacgcttatgtgcataagaatattgtctttgttcaacaaacggggttagccttagccgctgctgaatttttgatgaaattctacaatagtggcgtcaataccaccgacaatagcagaatctctctatcaaggacaaattcttcaatgagtttcaggagcaacaaaaaacatttacaaaaccacgtggattttgtttgtatttctggttcaacatcacctatcattgagccattgttcaagttggtcaagcaagaagttgagaaaaacaacctaaaattcggctacaccatcctttatggtagctccagatctacatatgccaaagagcacattaacggtgtcaacgaacttttcacaattcttcacgatatgacagcagcttga

SEQ ID NO: 2066 - DNA, 933 bp, Saccharomyces pastorianus
atgagtttactgcgaatgaattctttcgtcggtaaaaatagatcattagaacggttaaaacaaacactaaacatactatccattcgtaaccagagacagttaagtaccactcaacaaggcagtaaatatactcttggattcaagaaatatctaaaacttcaaaatggggaggttggctcatttttccatgatgtacctttagatctaaatgaacatgaaaagactgtaaatatgatagtggaagtccctagatggactactggaaagtttgaaatatctaaagaactgaaattcaatcccattatacaagatacgaaaaacggtaagcttagattcgtaaacaacattttcccatatcatggctatatacataactatggtgccattccacaaacgtgggaagatccgacaatcgagcataagttgggaaacggcgacttggctttgagaggtgacaatgatcctcttgattgctgcgaaattggttcagacgttttggaaataggttccgtaagaagggttaaagtattaggatcactagctttgattgatgatggtgaattggattggaaaatcttagtaatcagtgtaaacgatcccttatatcctaaacttaataatctggagaatgttcaagagcattttcctgggattttggatgctaccagagagtggtttagaaaatacaaagttccaatggggaaaccattgaataaatttgccttccgtgaacaatatatggactccgacaacgccatcaaaactataaaggaatgtaataactcgtggcgtaaactcatatcaggatcactacaggccaagtacgacaacctgccaaatatagaaagggccggtaaaggtattacgctcaaagatagtagtaagcctccttctgaaataccacctgaggtacagaaatggtactatgtttag

SEQ ID NO: 2067 - DNA, 1335 bp, Saccharomyces pastorianus
atggaagatgcgcatgataccacatcacggtcaaaacgtcccctggatgtagacccctcagtagcggcaatatcatcttcaaagaaagcgaatgaaactttaacaaggaatagagaattaacgactgtgctagttgaaaacttaccaaagagttataaccaaaacaaagtctataaatattttaaagactgcggcccaattttacacgtcgatatagcagattcgctcgagaagagctttcgttttgcacgtattgaatttaccaaatatgatggggccctcgcagcactgaccaagacatataaacttgtaggccagaatgaaatcacagtgtctcatttggtagactgcacattatggatgaccaatttccctccaaactacacacagcgagaaattaggggcctatttaaaaatcttaacgttgtcatcctaagtatacgacttcctagtttacgtttcaatacaaacagaaggttcgcttatattgatgttacttctaaagaagatgcaaatacttgtgtagaaaagttgaatgacgttgaaatacaagggtatatgttggtcactaagatctctaaccccctcgaaaggtccaaacggactgattccgctacattagagggacgggaaattatcatacgaaatgtgaatgcagaattgctcgatgaaaataccttgaaggagttgtttgatcaatttggtcacatagaaaaaattaatattcctgcaggacagaaagagcatagcttcaataattgctgcgcatttataacttttgaaaagaaatgttatgctgaaaaggctcttcaaatgaataaaactatgctgcacgacagggagatttctgtcggcttggcggataagaaaccatttttggaaagaaaggaagtcaaaagacttctcactttacgtaatagtaaagaattagaatcattgacgtgtttgtttccagtttccgataaggtttcatcgagccaaatcgaagagtttcttcaagaagaaatacacgtcaataaaaatcaaattgaaaaagtacatctcgtcagtgactttaatggcgccattattatatttagagatgagaaactggcagcaaagatgcccatgatacttaacaattctcaattccagggaagaatggtacgatcaggcactatcaatgacatgaaaaagtatcacaacaatcggaacaataataccgtaaaggatgcgaaacctagtcgcataaacacgatgccgagaagaccaactcatcaaataaaggataaatcagcagataaacaagagcaaatgtctaatgacgattttcgtaagatgtttctgggaaaatag

SEQ ID NO: 2068 - DNA, 684 bp, Saccharomyces pastorianus
atgcccgctactgctataaccttagaggactatcagaaaactttcctagaacttggactggaatgccaagccttgagatttgggtcattcaaactaaattcaggtaggcaatcgccatatttttttaatctaggtctgtttaactctggtaagctgctagcaaatttggctactgcatatgcaattgctatcattcaatcggaattaaaattcgatgttatcttcggtccagcttataaaggtattccactggctgctattgtgtgtgtcaaactcgcagaaattgggggcactaaattccaaaatgttcaatatgctttcaacaggcaagaggttaaagatcgtggcgaaggtggcataatcgtgggagcatgtcttgaagacaagagggttttaattatcgatgatgtcatgaccgcgggaacggcaatcaatgaagcatttgacatcattagtatggctcagggtagggttgttggttgtatcattgccctagatagacaagaaatagtccatgagtctaatccagaaagattaagtgctactcaatctgtatcaaagaggttcaacgttcctgtattaagtatcgtttcactggctcacgtggtgcagtttatggggagcaaactatctccggagcaaaaatcggcgattgaagaataccgtaaagcttacggtgtttga

SEQ ID NO: 2069 - DNA, 1155 bp, Saccharomyces pastorianus
atgtcgagcaatacttccaagacactggagctgttttctaagaagacggtagaagaacacaacactgccaaggattgctgggttacttatcagaacagaaagatttatgacgtgaccaggtttttgggcgagcaccccggtggtgaggagttcatcttggactacgctggtaaggacatcacggagataatgaaagacagcgatgtacatgaacacagcgaatccgcgtacgaaatcctggaggacgagtatttgattggttatttggccactgacgaagaggctgcgaggttgcttaccaacaagaaccataaggtcgaagtacagctatctgccgacgggacggagttcgactctactacttttgtcaaggatttgcccgctgaggagaagctaagtattgccaccgactacgggagtgactacaagaaacacaagtttctggatttgaaacggcctttgttgatgcagatcatacgtagcgacttcacgaaagatttctacgtcgaccaaattcacagaccaaggcattacggtaatggatctgctccattgttcggtaatttcttggaaccattaaccaagactgcttggtgggtcgtccccgtcgcgtgggtgcccgtggtggtgtaccatatgagtgttgctttgaagaacatgaactcgctatttgcttgcttcctgttctgcgtcggtgtgtttgtttggactttgatcgagtacggtctgcatcgtttcttgtttcattttgatgattggctgcccgaaagtaacatcgccttcgccactcattttctactacacggttgccaccattacttacccatggacgggtaccgtttggtgatgcctcccactttatttgtcattctgtgtgctccattctacaaggtagttttcgctttattgccactgtactgggcttatgctggattcgccggtggtcttttcggttatgtttgttacgacgaatgtcattactttattcaccattccaaattgccttcctttatgcgtaagttgaagaagtatcacttggaacatcactacaagaactatcagttgggctttggtgtcacctcttggttctgggacgatgtatttggtacctacttgggtcctgatgctcccttgtcaaagatgaagtacgaatga

SEQ ID NO: 2070 - DNA, 948 bp, Saccharomyces pastorianus
atgctgccagtaccaacgtttttggtacttctgtatatttctatatcatatgtcctaccattatacgcaacttcgcaaccggaaggatccaaacgagataatcctcgaaccataaaatctcgcatgcaaaagctgacaattctgctacttttcaatttactttttgtaccatttttgcaatctcaattatcgagtaccacatcacctataagtttcaaagacgcgttttttgatttgggtattatccctggttattacagggcaataccaaaccattggcagttcggtcagtttgtaaaagattgggccaaatgcgttatattgatggtcactttatattgtggtcccgtgctggattttgtactatatcatttattaaccccaaaaagttctatactagaggatttttaccatgaatttctaaatatttggagtttcagaaattttatatttgcgccaataactgaagaaatattttatacctcaatgctcttaacaacttatttgaacctaataccacattcacagctaagccatcaacaattatactggcagccatcactgttttttggactcgcacacgcacatcatgcctacgagcaatttcaggaaggttccatgacaactctatctattttactgaccacatgcttccaaatcctgtacacaacactctttggtggactgaccaagtttgtatttgtgagaacgggcggaaacctgtggtgctgtattgccctacataccctatgcaatctcatgggattcccgggcccatcgagactaaatttacattttacagtaatagacaagaaaacagggttcacttccaagctggtctcaatctggaacaaatgctacttcggtctgttgcttattggactcatatccttgaaggatagcttgcaaactatggtagggacccctggttatagaatagcactctag

SEQ ID NO: 2071 - DNA, 1104 bp, Saccharomyces pastorianus
atgtcgttgaatgtacatgtaaagtctggacaagacaagtgggaagtgagcgtggcgcccgagagcacggtgttgcagttcaaggaggcaataagcgaggcgaacgggatcccggtggcaaatcagagactgatctactccgggaaaattttgaaggacgaccagaccgtcgagtcgtaccatattcaggacggacatagcgtccacctggttaagtcgcagcccaggccacaggctggcgctgcaacgggtacaggtgcaggtgcagacgcaggtgcaagcgcaaacgcaagtgtaagtgctactccgaatatgtcatcgggacagagtgcaggtttcaatccattggccgacttgaccagtgcgaggtacgctggctacttgaacatgccctctgctgacatgtttggcccggacggcggtgcgttgaacaacgactccaacaatcaggacgagctcttgaggatgatggacaatccgatcttccagtcgcagatgaatgaaatgctgagcaacccgcagatgctggacttcatgattcagtccaatccgcaattgcaggccatgggcccacaggctagacagatgctgcagagccctatgttcaggcagatgctcaccaacccagacatgatcagacagagcatgcagtttgccagaatgatggaccctaacgctggcactggctccgccggcggcgcagcctctgcgttccctgcccccggtggggacgctccagaggaggccgccgacacgaacgctgctccatcgtctaacgcaggggccaacgccgcagcaaacccatttgcgtccctgctcaaccctgcattgaatcctttcgccaacgcaggcaactctgcggcggccacagggatgcccgccttcgaccctgcgttactagcgtccatgttccaaccacagcaagccgctgcacaagcgccccagccagaggatacaagaccaccagaggagcgctacgagcaccaattgagacaattgaatgacatgggcttcttcgacttcgatagaaacgtcgcggccctcagaagaagcggcggttccgtccaaggtgctctcgactccctactgaacggcgacgtctaa

SEQ ID NO: 2072 - DNA, 1869 bp, Saccharomyces pastorianus
atgtctctgcaatttccagataacatcccgtctgacctgaaaggtcccatatccttatggttcaatcaagaccgtaacccagaaactatagaagaagtcactgcactttgcaaaaaatccgactgggatgaattacataagagattcgacactagaattcaatttggtactgctggtttgagatcagaaatgcaagccgggtttagtagaatgaacaccttagtgattatacaagctacccagggactggccacctatataaaacaacagttcccagacaatttagtagtggtagtgggacacgatcatagatttcattctaaagagtttgctagagccacagcaactgcatttcttctgaaaggattcaaagtacactacttaaaccctgaccacgaatttgttcacacacccttagttccctttgcagtagataagttgaaggcctctgtcggtgtaatgataacagcgagccataatccaaagatggataatggatacaaagtatactattcaaatgggtgtcaaattattccgccacatgatcatgccatttctgattccattgacatgaatttagagccatgggccgatgtctggaatttttctgaagttttggacaagggcctcaaacaggggaaattgatgtattctagagaagaaatgttgaagttatatttaaaagaagtatctaaaaccttagtggagaccaacccactaaagtttgaaataaaggctaaaccatggtttgtgtacactccaatgcatggtgttggctttgacattttcaataccatcgtgaaaaagacaatgtcactagtggaaggtaaagattacctatgtgttcctgagcaacaaaacccagatccttctttcccgactgttgggtttcctaatcctgaagaaaaaggtgccttggatatcggtatgcggttagcagaagaacatgacattaatttactagttgccaacgatcctgatgctgatagattttctattgccgtcaaagacacacagtcaaatagatggcggcaactaacaggtaatgaaattggtttcttatttgcattttttgaatttcaaagatataagaacatggatgaagaatttcaacaaagccatccattagctatgttaagttcaacagtgtcttcacaaatgatcaaaagaatggcagaagtggaaggcttcctttacgaagatacactaactggattcaagtggatcggaaaccgtgcaatcactttggaaaaggaagggtattatgttccgtttggtttcgaagaagcgataggttacatgtttccagcaatggagcatgataaagatggtattagcgctgctgttgttcttttacaagcttattgtaaatggaaaatcgattctaatctagaccctatagatatcttggaaaatggatttaaaaagtatggcgtatttaaagagtacaatggctattatactgttccaagcccacttgttacaaatgaaatatttgaatacattagaaacgtctataccccaaaagacgtatcatatcctccatttatcggtgaagaaatcgaagtagtttactatcgagatttaactactggatatcaatctgatactcccgaccataaacctgttctgccagtggatccaacatctcaaatgataacattatctggaaagccaagtgacggaaatgctaatgagtacattcgtctcactcttcgtgggtcagggacggaaccaaagcttaaagtctacatcgaagcctgtgcgaataacgaaaagagggcttcttacttggcgaaattaacatgggatgtattgaaacgtgagtggtttagaccggaaataatgaatataaccactaatttttga

SEQ ID NO: 2073 - DNA, 1746 bp, Saccharomyces pastorianus
atgtggatgaataaactggctaaatatccatctcctagtattttgggcctatatacgagaaggttttgtaatgaatcatttcggtcgctacaggagtttgacatactgccgaacactatgagaggcaatccagtccattcccgaagagcatgtgtaaccactcgagtactcatgtgtgatataacagttcgaaagttctgcacgacccatagatcaaattcaattgatcagccaaccaatggaaatattaagagagctcatgataaattcaagatcaaggaaatacccatagacatgttcacgttaagacgcattgttgattcgagtagtatgagcgaaccggatttttcgaaaagcatgacctatttatttgtaaaggctgtaaactcggaagcgagggaaactttatcgttagaagatctgtccttccttttaaacaatctatattcacaacggtttggaatcaagaaaatctgtaaagacattaatgttaagtattcggaattctggtttaaactcttttccctttacgcagaaaaagtggatgtcaagagagaccaaatcaatttacgaaatacagcattagattcatgcgaaattttcgatatgaacctcctaattaaaaacttcatagaacttggtcaactgggaaaagctcaaaaagttttaagctttattctcgatagaaactccgatatattgctctccccgaataatgcagatatcggtacaataatccattttcttcaattacgttgcggtgcattggcagcctattggaagattccagataatagcgagcaagaatattcacgaaagacggttcggctaggtgccgaaaatacgtcaattcgcatctcctctagctacaaggccatggaccatcagaccttattgaagattgctgatgtcgtattacaaaaagaaaggttactggattctgaggatttagtatccgttttaattcagtcatttggacacttggggcaaactcaaattttggagagatgtattgaacacatatggcaaatatcattgcaagagtttcccagccgtgcaacgatcaagcctaaggcacgaggatgttatccaagttcgaagatcctcgtttcaattttggtatctttccacttgaatgacaacgatcttcatagaggcttgagtattctagattctttcataaaatattatcctgaagtgaaattggatgagttgttttggaggagattgtttcagttgagtcattttgcatggaagccagcacacgacaaaagagccacatctattgttagatgctggcacttgatgaagcattggcatgaatccaaagggttgagcccttctgttgattatgagacactgaggcaattgtatgacctggcgaaaaaaacaggcaattattcgcttgctattgatgttttacaaaacttcaaattaggaattacgaaaacgagggctatgaagtccgaaaaaatcaatggtattgttaccaagtaccagaaatatattataaaacagcttgtaaatagaggtaaaccctcagcagcgagagaattcatcaacgatttcagtttcgatagaagagcagtcaaagaattgaatattttctgtacgaatcgtatactgttaaggagtaagaaattgaaaaataagaccgagaacagaaaagaaaggaacggatcgggacaaggaaactttgatgatgatgatgatgatgatggtatggttataggtagtttgtggtaa

SEQ ID NO: 2074 - DNA, 1806 bp, Saccharomyces pastorianus
atgcaatcaccaagtcacgcctttagtagcatcggaaattttaacgacacaacggacgatgctagttacagaaaattcgacatccacgaaggcatcctattttgcattgaactgtcggaatcaatgttcaaagagtcaccggagctaaactataaatcgttactattggaaattctagagtcattaaatgaactgatgtcacaattggtcattacaagacccgggacgtctataggatgctatttttattactgtagtagagatgacgctaaagaaggtatctatgaactgtttccactaagggatattaatgctaagttcatgaagatattaaatggccttttagaggacctgtcatcggggcgattaaccctatttgaatactttaactttcaactttcgaagaagcaaatgcaaatgccgctaggtaaattatttacttttatgctggacacctttttgcagagtattcccggacaaaagcaactgagtagcaagaagatatttctattcactgacaacgacaaaccgcaagaatcacaagatgctgacgaacgagcaagattaagaaggcttacaattgatttattcgacaatatggtaaattttgtaacattttttattggttatggggacaattcatttgacaacgagttttattcggatattttacagctaggtgcacataaaaataagggcatggacttagattctgaatttgatgggccaaacacaaagccattagacgccaaatatatcaaatccaaaattttgaggaaaaaggaagtgaaaagaatagcgtttcaatgtcctttgatttttgatgaggacgcattcattattggagttaagggttataccatgcatagtcatgagaaagctggagttaggtacaaacttgtatacgagcacgaggacatcagacaagaagcgtattcaaaaagaaagtttttaaatcctatgacgggtgcagatgttactggcaacactgtcaaagtttatccttacggcgatctggatataaaattatcagaaaaacaaaaccaggtcattatggaagcttacacacaaaaagatgcgtttttgaggattatcgggttccgctcgccagacaggtcgatacattattttaataatatagagaaaagtacatttatcgtacccgatgaggcaaaatacgaagggtccataaggacgttgacttctttattcaagactttaaggaaaaaggataaaattgccttactatggggaaaactcaaatccaattcacatccttcactgtttgtactatccccctcgagtgttgaggaatataatgaaggattttatctctatagaattccatttttagatgagatcagaaaattcccgagtttgctatcctatgattctggtgaaaagcataaactggattatgacaacatgaagaggataacccaaagtataatgggatactttaacctcagagatggatataacccatctgacttcaaaaacccatcattgcaaagacatttcaaagttttacatgattatttgttacaaattgagatcaatactgaggaaaacgagacatctgaagccaaaataaatagagtaatacacgaagatgattccttgcggaaattataccatataagaaataagatactggaatcggaaaaatctgaagacccggccattcaaaggctaaacaaatatgttaaagtttggaacacatcctacagcaagttcaacgatgatgacgtttctgttaaagatgaaaagaaactatttgacaaaaagcctaaattcaacatatga

SEQ ID NO: 2075 - DNA, 1518 bp, Saccharomyces pastorianus
atggttaccccttccaagaagcgttctagagattccgaatctccagaagaacctgtagtagatgagattgaaagcataaagaaaaatgaagccacaagtgaagcagaccagacaacttatgtggaaactttcgcagaactgaatctatccgagccaactttgaaagccattgaaaaaatggggttcaccactatgacctctgttcaatccagaaccatcccacctcttttggctggtagagatgttcttggggctgctaagacaggttccggtaagacactggcctttcttattcccgcaattgaactattacattctttgaagttcaaaccaagaaacggtaccggtattattgtcattacccctacaagagagttggctttgcaaattttcggtgtggcaagagagttgatggaattccattctcaaacgttcggtattgtcatcggtggtgctaatagaagacaggaagccgaaaaattgatgaagggtgttaacatgttgattgctacacctggcagactgttggatcatttacaaaatacaaagggtttcgtgtttaagaatttgaaagctttgattatcgatgaagctgacagaatcctagaaatcgggttcgaagatgaaatgagacagatcattaagatcctaccaaacgaagacagacaatctatgctattctctgccacacaaacaaccaaagtggaggatttggctagaatctccttgagaccaggccctcttttcatcaacgttgttcctgaaacagacaactccaccgcagatggattggaacaaggctacgtagtgtgtgacagtgacaatagatttttgctattattctcctttttgaaacgaaaccaaaaaaagaaaattattgttttcttatcatcgtgtaactctgtgaagtactacgctgaattattaaactatatcgatttgcctgttcttgaactacatggtaagcaaaagcaacagaagagaacaaacacattcttcgaattctgtaatgcagaaagaggtatcttaatctgtacagatgttgcagccagaggtctagatatccctgctgtggattggatcgtccaatttgatcctcctgatgatccaagagattatattcatagagtaggaagaaccgcaagaggcaccaagggtaagggcaaatctttaatgttcttgactcctaatgagttagggttcttgagatatctaaaggcttccaaggtcccattgaatgagtacgaattccccacaaataaaattgccaacgttcaatcgcaattagaaaaattaattgaatccaattattatctacatcaaacagctaaagatggttatagatcgtatttacaagcatacgcttcacattctctgaaaactgtttatcaaatcgataagttggatttggctaaagtagcaaagtcgtatggtttcccagttcctccaaaagttaacattactattggtgccagtggaaaaactccaacgaccaaaagacgtaaggctcacaagtaa

SEQ ID NO: 2076 - DNA, 594 bp, Saccharomyces pastorianus
atgatgcatttcaggaaaaaatcaagtgtcagtaacacgagtgaccacgaaggagggaaccatcccacggaggccaaaatctctgatgacgacaaggcaagattaaagatgcgtaccgcttccgtagctgatcctatcttggatgctgtgcaggaagctcagccttttgaacaagccgctgataccttccacgataacatgaacagacaatcttacttctccaacgaagaaggtcacgttctgtgcgacgtcttcggtcaaacaatcacacaggctgatatatcgaacccaactagagcaagagacgagagacctctggacactataagaagtttcgagtatgctgtctctggagacccaatctgggcccaacagttggagactcccacctatgggttccgtgtaagacctgactttcccatgttcggatctgctgtggcctatgacgcgaacggtatgcctcaacagatgggtgcttcttccaaccaaatgtacggtgaacaagcagtttatcaaccacaacagcacgttgaaactggggagaaagaaaagaagaagaagagaggtttattcggtagaatgaagaagaaataa

SEQ ID NO: 2077 - DNA, 450 bp, Saccharomyces pastorianus
atgtctgaatctgctcccattataaccaaactaattcccaagccaaagccaaaagttttaaatttgtttcgtgtttgttttatttcattgctcttaatcgctgctgtggaatacttcaaatacggtacaagaatcaattatgaatggttccactgtactccaatcaaggaacctcaatctggctccgtgatcaaactttgggctcgtggtgggccaagctgtgacaaaagaggtgaatataaaaccatcgtaaagagaatcacaagagattacgaacccaacgatgagcatctatccttctgtatcatcgaaaacggcaacgtcccttctgttcactacccaatccatgaagataaaggtgaacctggctacgtagcttatgttggctacgatacggactctgaattagttcaaacactgtgtgctgattccaccatttatcatatgtaa

SEQ ID NO: 2078 - DNA, 1533 bp, Saccharomyces pastorianus
atgtgtggtattttaggtatcgtgttagcaaaccagtctactccagtagctccagagttgtgtgatggatgcatatttttacaacatcgtggtcaagatgcagccggtatagccacctgtggttctggtggtagaatctaccaatgtaaaggtaacggtatggcccgtgacgttttcactcaacaacgtgtgtctggtcttgccggttccatgggtattgcccacttgaggtatcctacagctggttcctccgccaactcagaagcacaaccattctacgttaatagtccttatggtatcaacatggcacataacggtaatctagtgaacaccgcctcattaaagagatacatggatgaggatgttcacagacacatcaacactgacagtgattccgaattattattgaatatttttgctgctgagttagagaagcataacaagtacagagtcaacaacgaagatgtctttcatgctttagaaggcgtttatcgtctgtgtcgtggtggttatgcttgtgtcggtttactagctggttttgcattatttgggtttagagatccaaacggtatcaggccgttgttgtttggtgaaagagagaactcagacgggaccaaggattacatgttggcttcagaaagtgtcgttttcaaggcccacaacttcactaaataccgtgatttgaagcctggtgaagcagtcattatcccaaaaaactgtagtaaaggtgaacctgagttcaaacaggtcgtcccaataaactcttatagaccagatttgttcgaatatgtttattttgccagaccagatagtgtcttggacggtatatcagtttatcacacaagattggccatgggttccaagttagccgaaaatattttgaagcatttgaagtctgaagacattgatgttgttattcctgttccagatactgcaagaacgtgtgcattggaatgtgctaatgtattagggaaaccgtacagagaaggcttcgttaagaataggtatgttggcagaacatttatcatgcctaaccaaagggaaagagtttcctcagtaaggaggaagctcaaccctatggaatctgaattcaagggtaagaacgttctgatagtagatgattccatcgttagaggtactacttccagggaaattgttagtatggctaaggaatctggtgcagcaaaggtcttctttgcatcagctgcgccagctattcgttataatcatatttacggtatcgatttgacagataccaagaacttaattgcctataacagaaccaacgatgaagtagcggaagtgattggttgtgacaaagttatctatcaatcattggaagatttgatcgattgttgtaaaaccagtgaaatatcgaagtttgaagatggtgtttttaccggaagttacgttacaggtgttgaagacggttatatacaagaactggaagaaaaacgtgaatcgatcgcaaacaactcttcagatataaaagctgaagttgacatcggattatataactgtgcggattattga

SEQ ID NO: 2079 - DNA, 2082 bp, Saccharomyces pastorianus
atgctgctttttccaaggtccccagtagtgggacgaatattaaagtcaggtcttagatctagatctagtctgatacggaaccgctcgccaatcataatatcggtatataagttatcaactcagcggcctctattgttcagttcagttggctccaacttatggaatgacactcgaaaggatcctgttcacaagaaattgattgaacctacttcgcctgtctcaaaaccgaaaactcaagcgaagaaggcaagcaaggcaccaacaatgtcagaattgaaaatcttgaaagacctgtttcgttatatttggcctcaaggcaataataaagtgagaataagagtgttaattgcacttggactattgatatcagcgaaaatcttaaatgtccaagtacccttttttttcaagcaaactattgattcaatgaatataacgtgggatgaccccactattgcccttccagcagccattggactgaccattctttgttatggtactgcaaggtttgggtccgttttgtttggtgaattaaggaatgccgtgtttgccagggtggcacaaaatgccatcagaactgtatcgttacaaaccttccggcacctcatgaaattggatttgggctggcacttaagtaggcaaacgggtggtttaacgagggctatggatagaggtacgaagggtatttcttatgtcctaaccgcgatggtatttcacattatcccaataagttttgaaatatccgtcgtttgcgggattttgacataccaatttggtgcgtcatttgcagctatcacgtttagcacaatgctactatattccatgttcaccataaaaacaacagcttggaggaccaatttcaggagagatgccaacagggcagacaataaagctgctagtgtggcattagattctttgataaactttgaagcagtaaaatattttaataatgagaaataccttgcagataaatacaacggctcattaataaactacagggactctcaaattaaagtatctcaatctttagcatttctgaactctggccaaaacttgattttcacctctgcgttaacggcaatgatgtatatgggttgcaccggtgtgattggcggagacttaacagtaggtgacttggtcctgatcaatcaattggttttccaactctcggtgccattgaatttcttgggtagtgtttacagagaactcaagcaatctctgatcgatatggaggccttattcaaattaaggaagaatgaaatcaaaatcaagaatgcagaacggccattaatgctaccagagcacgtcccctatgacattactttccagaacgttacatttgggtaccatcctgacaggaagattttaaagaatgctagcttcactatcccagcaggctcgaaaactgcaatagttggatcttcaggtagtggtaaatccaccattctaaagctagtatttagattctatgatcctgaaagcggtaggatcctcataaatgggcgtgatatcaaagaatacgatattgatgcgttaaggaaagtgattggcgtagtgccacaagatacaccactttttaacgacaccatttgggaaaacgtgaaatttggtcgcattgatgcgacagacgatgaagtgaatacagttgtagaaaaggctcaattagcaccactgatcaagaaactacctcaaggctttgataccattgtcggagaaagagggttgatgattagtggtggtgaaaagcaaaggttggcaattgcaagagttctactaaagaatgcaaggatcatgtttttcgatgaggccacaagtgctttagacacacacacagaacaggcccttttacggactattagaagcaactttccctctggctcgagaacaagcgtgtacattgcacatagactgagaactattgcagatgccgacaagatcatagtctttgacaacgggaaggtacgagaagaaggtaagcatcttgaactattggctacacccggttcgctgtaccgggagttgtggaccattcaggaggatctgcaccatttggaaaatgaactaaaagacgatcaaccactataa

SEQ ID NO: 2080 - DNA, 1302 bp, Saccharomyces pastorianus
atggtatttgaagcgaagccttttgatccgattacggtcaaaccaaatgataaaagacgcgttgcttatttttacgatgcagatgttgggaattatgcatatggagcaggccacccaatgaaaccacataggataagaatggcacactcccttatcatgaactatggcctatacaagaaaatggagatctacagagctaagccagcgacgaaacaagaaatgtgtcagtttcataccgacgagtatattgactttttgtcgagggtcacaccggataatttagaaatgttcaaaagagaaagtgtcaagttcaatgttggtgatgattgtccagtgtttgatggtctttacgagtactgtagtatctctggtgggggttccatggaaggtgctgctcgtctaaacaggggcaagtgcgatgttgccgtcaattatgctggtggtttacatcatgcaaagaaatcagaagcctccgggttttgttatttgaacgatatagtattgggtatcattgagctactacggtaccatcccagggtattgtatatcgatattgatgtgcaccacggtgatggtgtggaagaagcattttatactactgaccgtgtcatgacatgttctttccataaatacggtgagtttttccctggtacaggtgaattgagagatgtcggggtaggtaaagggaagaattactcagtcaatgttcctttacgagacggtattgatgatgctacctatagagccgtgttcgaacctgtggtaaagaaaattatggattggtatcaaccctcagctgtggtattacagactggtggtgattccttgtctggtgatcgtcttggttgcttcaacctttccatggaaggtcatgctaactgtgtcaactacgtgaaatcctttgggattccaatgatggtggttggtggtggtggctatactatgagaaatgtcgcaagaacatggtgctttgaaactggcctactgaataacgttgttttagataaagacttaccatacaatgaatactacgaatattacggtccagattataagctaagcgtcagaccttcgaatatgttcaatgtaaatactccagagtatcttgataagataatgaccaatatatttacaaatctagagaacaccaaatatgcgccgagtgttcaattgaatcacacacccagggatgcagaagatctaggtgacgtcgaagaggattctgctgaggccaaagacacaaaaggtggttcgcagtatgcgagggacttacatgttgagcatgacaatgaattctattga

SEQ ID NO: 2081 - DNA, 2619 bp, Saccharomyces pastorianus
atgaataatgacgcaatggaccattcccttggtgggggcgtgattgctacttctgggtccaagcagagaaagacctccaaatttgtgatgggtaaatatacgctatatgaaacaaaggatcgcatgtatattgttgggagcaataaaagagaaaccatgttccgcatcttggaaattgaccttacagtacctcgtggagaactcagtgtgctggaagataacgtcttcttcaccagaaatgaaattatgaatgtgttggcaagtttggaggaagccactgagaatggtttacataagaaaattacaggctatggtcttctgggatttattaaatttacctgttggtactacttgataatggttaccaagtacagccaagttgcagtaatcggtggtcatggtatttatcatattgatggtattgacattattcccataacaaacaactataagaaacctgaaaaaaattcagatgaagcaagactattgaatatattcagggatttggacttgacaaaaaccttctatctcagttacacttacgatataacaaatacgttacaaactaacatcttgcgtgagaaattgaaagctgtcgataggtccgatattacaatcccttctaggataactgactataacgagatgtttgtttggaacagcaatttgttgtccccgatttttgcctgtattgacaccgtattcgactggtttcaatgcattatacacggattcattgatcaagttaacgtgtcagttttggggaaatctatatatatcaccttgatcgccagaagatcgcaccatttcgcaggcgcacgtttcttaaaacgtggtgttaacaaccaaggacatgtggctaacgaagtggaaactgaacagattgtgacagatatgattttaactccctttcatcaaccgggaaatggatttttcgacagcgatcgttatacctcctttgtacagcaccggggctcaatccctctatactggactcaggatgcttccaatttaaccacaaagcctcccattaggattaatgtagtggatccattttttacatctgctgcattgcatttcgataatctgtttcagagatatggcggtggaactatccaaatattgaacttaatcaagaccaaagaaaagacaccaagagaaactaagctactttgggaattcgagcagtgcataaattatctgaatgagtttttaccagcagcaaaaaaattggattacacttcttgggatatgagtagggcctctaaacaagatggtcaaggagttattgagtttttagagaattatgctgtgaacaccgtcacaagaacaggaatatttcataatggtccagattttgcatctacaaagattcaggaaggtatatgtcgtagcaattgtatcgactgccttgatagaaccaatgctgcacaatttgtcattggtaaaagagcccttggttgccagttgaaatcattgggaatacttgataatagttacttagaatacgattctgatattgtgaacatattgacagagttatttcatgatttaggtgacacgattgcgttacaatatgggggttcgcatttggttaacacaatggagacttatagaaagataaatcaatggagctctcattctagagacatgattgagagtataaaaagattttatagtaattcatttgtcgatgcccaaagacaggatgcgattaatttatttttgggtcattacgcttggagagagggatttccctctctatgggaaatgaacactgacttttatttacataacggttatacttccaacatgccaaagagaagctatactcattggtggaatgactaccatatcaaaagtataaaggaattgattactgaggagctcattgaaacaggtaatgatatcactagggaaaaaattataaaaaatgttagaggttatcctggtgccttcgataactactggaatgagtactatctgccaagatcggtgacttggattcgtgatctttttgcatacaacatgaattcaacaagaagatatcataatgctctaaccaaacaggacaaagccatgtctccatttacttccaggaaacagagttggctgaataacaaattaaagatgattacatccaacaaaacatcggaaaagatcactaccggggcagttgaagctactgatttaaacaaaggcacttctgccaaacaagaattagagttgtacgagcattatctgcatatggtatcagaaaatggccaaaagcttgaagacaaaatgaatttattttcttactctaaataccctatatttattgattatgaaaagagcgagattccaccaatgaaagacgtggtgaaggaagcgccagctgatattacggatgatttcaccgaagcgtacaatgataacgatgatgaaacaatagtagaagcattgcttatagctcctgatgatgttctagtcgatgaaaaattctacgaaaaggtcctggatgtcgataattatacacccgttgatgattatgcaaccgttatacaaataaatcccgacaatttacaactttataaggatttgtgcatttctgcagatatacaacttgaatttcagtga

SEQ ID NO: 2082 - DNA, 2736 bp, Saccharomyces pastorianus
atggtcaagaacaaccacacgcccgctggcggcaacaacacctccggggacggccgtcttaaagaggagggcctgaccccgacgacgtccacgtcaacgcctcaccggatattcagtgtggacgacgatccaaaggagatccagagtgacattcggtacctggagggcctgcacgagggcctgaagtttgccctacacgccaacaagtccaagcggtctgtgagttcgcagtcgcctatggtgcatagcagcaacaacacgctgcatcaccacgagcaccaacaacacttgccgcccacgctggagttgctgtcgtccaaggcgcactccgtaccagacttgaacacggtcacttcagcgtctccaaggcggctgcactcgcccatccgggagctgtcccacgacggcatcgatggcatagacgataacgacgacagccggttcatcattcatgattcgcacggccatgacttgctgatcgatgaaatcaactgccaatcgccctcacacctggaaagcaacgaccaggcgtcgagcacttcgtctctggagtcgttcacgctgcgagagaggcaggacgccattaacgagacccatccgttcggtattaggatctggaagcctgctctgtacaagaagcaccggtccgtgcaaagaactgctgcccaggacatccacgagacacagttgaagaccatcacctggcaggtgaactgttccaatgcactgtggtcgatcttgtttggcttgcccatcgcgatacttttctactcggcggctattttggtgttcttattgggcggtggaggactggtgacgagctccgccaaggactactcgaagtgtttctacaagcttgccaactactttctgtggccgtttggcaagatggtttacctgttgcaggacgagcagtatttgcaagaggacaaagacgaaggaatcagtatgcagcaattttacgattgggtgacgtcgtactccaacagactcgtgttccatcaatctcaggccaaactgcagcagagagaggaacaacccgtcacggagtcctcctcgttgatgccgcccaacacaaccacaacgccaatgaattccaaccacccttcttataattccataagacaccaaattccacaaccggctgcccaaagaaggtactttggtagaggggaatggaactggggccgtgtccttttctacaccatctttcatctcgccatggagcccattcttgccctcttatctctttgtctatggcttgctgtgtttaccatccccatgagtaacgtgctgtggcaaatcatgtaccattgtagaagacacccactggcactaggcttcaagaatatcgagaattcctcgcaatcgcacgaaaacacaatcatccagcaccaattgaacaaaaatatcctcttgtgtacgttccgtgccgctggttggcattattataaatacacagtggatggtacaaacgttatcgttgttaacttgatctctattgtgtttttcaccatttttgatttttatgtttcgaagaattttctccattggaaaacatggatcactaacgagtcttctattttcattctttgtctgacttccacaattccattagcattctacattggccaagcagtcgcatcgatatccgcgcagacatccatgggtgtcggagctgttattaatgcgtttttctccaccattgtggaaattttcctgtattgcgtagctttgcaacaaaaaaagggtctcctcgtagaaggatctatgattggttccatcctgggtgccgtgctgttattgccaggtctgtccatgtgtggtggtgctctgaataggaaaacccaaagatacaacccggcaagtgctggtgtctcctccgcactactgatcttttcaatgattgtaatgtttgtccccaccgttttgtacgaaatttatgggggttactcagtaaagtgtgcagatcctgctaacgatcggggctgtaccttttcgcatcctcccttaaagtttaaccatctgttcactcgcatcatccagccaatgtccatttcttgtgccatagttcttttttgcgcctatatcattgggttatggtttactctaagaacgcacgcgaagatgatttggcaagtacccatcacagatccaacctcgagtgctgctgaacaacaagaatctaatgaacaacaagagcagggtcaccacgacgcacccaattggtcaaggaccagatctacctgtatactactgatgtccaccttgctctacgcaataatcgcagagatcctggtgtcttgtgtggactctgtcctagaagacttcccctctttgaatccaaaattcctcggtcttacaatttttgccttagtccccaataccacagaatttttgaatgccatctcattcgctattcacggtaacgtggccctctcgatggaaattggcagtgcctatgccttacaagtttgtcttctacaaatccctgctttggtcatctattccatcttctacacctggagcgagaagaagtccctgattaatatcagaacgcagatgtttcctctagtctttccccgttgggacctctttggtgctatgacgagtgttttcatgttcacttatttatatgctgaaggcaaaagcaactatttcaagggttctatgctgattttactatattttataattgtagtgggattctatttccaaggcgtaatttcagaatag

SEQ ID NO: 2083 - DNA, 855 bp, Saccharomyces pastorianus
atgttgtggaaagtctccaagatgttttttagtggctttttagcactatcatcgatatcgatcactaccctttatctctaccaaaaccgtcttgtctacccatcatgggcccaaggcgctagaaaccatgtcgatacacctgattctcgtggaataccctatgaaaagctgactttgatcacgcaggaccagatcaggctcgaggcatgggatattaagaacgagaactcaacaagtaccttattgatcctctgtccgaatgctggtaatatagggtattttataccgataatcgatattttctatcgccaatttggaatgagtgtctttatttattcgtatcgtggctacggtaattcggaaggttcgccaggcgaacaaggtttgaaattggacgctgattgtgtcatgtcacatctgtcgacggatccattccatactaagagaaaactggtactgtacggtaggtctttgggcggtgccaatgccctttacattgcttccaaattcagtaatttatgcgatggtgttatattggaaaatacgtttttaagtattcgaaaagttattccttatatttttccccttttgaaaagattcacagttctatgtcatgaaatctggaattcggagggcctcatgggcagttgtagtccagaaacaccatttttgttcctcagtgggttaaaggatgagattgtaccaccctttcacatgagaaaattatatgagacatgtcctagtgccaacaagaaaattttcgagtttccgcttggttcacataatgatactattatccaagacgggtactgggatatagtaagagaattcctagtagagaaaggctttatctaa

SEQ ID NO: 2084 - DNA, 1626 bp, Saccharomyces pastorianus
atgtccgttcaggttccatatcaacacagttcagggtacatttctcattttcataataacgaactcgatccagatggcgggagagattacaacgttacgatcaagtacctggatgacaaagatgaaaaggaggaaggtcaagtaacgaatagtattcataatgcaagtctacatattccaattcttttgtgtttgataatcgcacttggtggctttatctttggatgggacattggaaccattggtggaatgacaaacatgattagcttccaacagaaatttggtacaaccgatattattgatgatggagaaaccgttttcatttctactaagcaattgaatgatttacaaataggtttgatcatcagtattttcaatatcagttgcggggtgggggctttaactctatcaaaaatgggtgactggaccggtagaaaggctggaatttggtttgccttggtcgtgtactgtattggtataacggttcagatcttttcctgtggtagatggtattttttaactttaggaagagcagtaactggtattggagtgggaataaccaccgtgttagtaccaatgtttctttccgaaaactctccactaaagattagaggttccatggtctcgatgtaccagttggttgtgacatttggtatccttatgggaaatgttttgaacttcatatgcgtgagatgctatagagatccgtttcagaacatatcctggcaattaccgttatttttgagctacatttgggccatcataattggaatgtcgcttgtttacgttcctgaatcggcccagtacttggccaagattaaaaatgatgtgccggctgctaaaagctcctttgctaagatgaacggtgtttctgaaacagatagtatagtgactgagtttattgatgatttgatggaaaataattatgcccaagaggaatctaatgaagaagagaagaagaagagaagtctcgtgaagaagcaaagtttcgagtttgtcttgggaaaaccaaagttatggttgagattaattatcggcatgatgataatggcctttcaacaattatctggaataaattattttttctattatggaacatctgtttttaaaggtgttggaatcaaagatccctatatcacctcaatgattctttccagtgtcaactttctctctacaatattgggaatgtattacgtagagaaatggggacgcaagacctgtctgttgtatggttcaacaaatttattattctatatgatgacttatgcgacagtcgggacatttggaagagaaaccgatttttcaaatattgttctaataattgtgacctgttgctttattttttggtttgcaattacattaggcccagttacatttgtgctggtttctgaactatttcccttgaggaccagagcactttcaatggcgatttgcacatttgtcaattggatgttcaatttcttgatttcatttttaactccaatgattgtgtccaagattgatttcaaattaggctatatatttgccacttgtctgttagcgttaattatattcagttggatactggtaccggaaacgaggaataagaacgaacaggaggtgaataaaatatttgagtcagattag

SEQ ID NO: 2085 - DNA, 1410 bp, Saccharomyces pastorianus
atggacggttacaatcaaaatcagaaccaaaaccaaaatcaaagtcaaagccagcaaccacatcagccgcctctgaaaaagtatatgacgcagaggcggtcagtagatgtaagttcaccctatatcaacctatattacaacagacgacatgggctagcgaacccagtggtggagccagaaacttcatacacgatagatataatgcctcccaacgcctacagggttcgagatcgagtaatcaatcttcccagcaagtttacccatttaagctctaataaagtaaagcatgtcataccggccatccagtggacccctgaaggtagaagactcgtagtggcaacgtatagtggggaattctctttatggaacgcatcatcttttacatttgaaactcttatgcaagcgcatgattcagctgtaaccacgatgaagtattcacatgatggtgattggatgattagtggtgacgccgatgggatgatcaagatatggcaaccgaacttcagtatggtaaaagagattgacgcagcacacacagaaagcatcagagatatggcattcagtagcaatgattcgaaattcgttacttgttcagatgacaatattttgaagatttggaacttcagtaacggtaaacaagagagagtactatcagggcaccattgggacgtaaaaagttgtgattggcatcccgagatggggttgattgcctcggcatctaaggataatttggttaaactatgggacccccgttcaggaaattgtatttcgtcaattctaaaattcaaacacactgttttaaagacgagatttcaacctaccaaggggaatttattaatggcaatttcaaaggataaatcttgtcgtgtatttgatatcagatatagcatgaaggaactgatgtgtgtaagagatgaaactgactatatgacattagaatggcatccaataaatgagtctatgttcactttggcatgctatgatggatcgctaaagcattttgatcttttgcaaaatttaaacgagcctattttgactataccgtatgctcatgataagtgcatcacttcgttatcatataatccggtgggccatatatttgctactgcagcaaaggacagaactataagattttggacaagggcaagaccaaccgatcccaacgcttacgatgacccgacgtacaacaacaagaagataaatggttggtttttcggtatcaacaatgatataaacgctgtgagagagaagagtgaatttggtgctgcgccacctccacctgctacacttgaagcacatgcgctaccaaatacgcatggtttcattacttcaaagacacctcgccaagaaattcccggtatcgattcatcaaagaccaaaggttctactttacctggtctaagcatataa

SEQ ID NO: 2086 - DNA, 957 bp, Saccharomyces pastorianus
atgtggagactgacgagtatagcccgtgctaatattcatacttgtaatcggtttttgcctgtgtccaacaaatcgattggaacactttctgtttttcgtttttattcttccagtctagaagagaggtacaaggacaaattattacaagaagctcagaaacaaggattcaacagcattgaacagttgaaggaccatttgaaagaggatttggaatctagaaaacacaaattcaatagtattgatcctttgaaggaactggaagactatcaacaaagaactcaaatggcaaataataattccaagaatatgatgaccaaatcaaaaggccctctcgatcccaatgctcctaaagttccattcaaaacattagactcctttttagacgtgaccaagattgaagatctgtcaaaacaggaggtcgagtttctttggagagcaagatgggcagagaaggataacgcgttatgtgctgtaattcctgtcgccatttatgatagaatgatggccaatgccaagaacaaccccatgtttgtccttccactacctaggcaatctctgtctgaagacggaaaaactgctggagaacaaggaatggaactacactatatacaatggcagtttgttgggcctcagacaacacattgtatgatgacctccctggcagaatacaagctacatcaggagtttgcaagaccgcacactacctttcagtttcattcggatttagttaaggataaaggagtggtttgcatgaatgggcaagtggaaccggatacaaacgtcaatgtacaagacgcacaattgctattattaaacgttcaaaggttttatggcgctatgggcgaagaaacgccagctgctaaacaaagagtccaattgttaagagacttttccaaaggctctcctcaattcagtgttgagaagttgatttcactgtcccaatctatggaaagttaa

SEQ ID NO: 2087 - DNA, 774 bp, Saccharomyces pastorianus
atggatgaatcagtggatcctgtggagctgctgctgcgattgctgatacggcacaaaccgcatctcaaaccgtatgcctacaggcaagatagctggcagcgagtgctcgatgagtacaaccggcagactggttcaaggtacagacaatcgaggacgttaaagaccaagtttcgtcgactgaaggagctctatggtgcagatcgggcacaattttcactttctcagctcaagctgatgggggcacttttagatgagacaccagagcatacaaaatcaaaaaccaaactggacaatgaatcatcttcatcttcttcttcaccatcttttactaaaggtcattcagggcccgatccgtttcaacagttatcatcaaccgaacatccaaatactaacggttctgatgatgagcatgaacactcgggatcacaaccactacccctggattcgataaccattgggattccgcccactcttcacacaatccctattagcctgtctaaaaatggcgatgacatgaaagctgataacagtcccaagacgagtaaaaatataaacaggttcaatgagacagtgctgcctccacaaatggtggatgggcaggcgtggtctgattctaacatggagctggaaatatgtctagactatctccataacgaacttgaaatgataaagaaaagacaacaggatttcgaatgcaaagtgctaaataagcttaacataattgaagttcttctttcgcagatgcggccaccgaaccaaggagacagtttataa

SEQ ID NO: 2088 - DNA, 2715 bp, Saccharomyces pastorianus
atggacaagctattgcatgtaaagatacttctggtagaggaagtggaatcgttgaagatatgttctttggaccagaaatacgtgagcacggctgtgcatataatcaatggtgaatccttccagctcgtgcagcagtttatagaccagttcaagggaaaagtgaatatcacaggggaaatatctacatctagtgttattgcagctctaagtgatttccttacgcttgaaattgtcaaagaaggtcaagaaaacgaaatgctttttatggccattgctcttttgcagaccttcattcaaaataactatacaggcccagcagcaaagttgaggacagtttcggggttgtttaacgttactggatctgaaataggtgccatcaataaagctcttacccattcactagctatattgggccaacctgcttacgaattaatggatgatccattgtacttagttctttcgcttttattattggagcaaattactggtcaagctagtttattcgatatttcgcaggatcaagaggtgccgctacctgttatttctgccgagtctacacccggattgttggctgtggctaattggtggagagcgagagctcttttgacgcacttgtcattgattccggaaccttctgggtttcaacctagtattgtcgcatcaatataccaatctatagatttagtgcatgctatcgttaaggacttaccagaaaactgtaacgaagatttaaagagacaactctatgcgatgtattacttggaacatgtcaaatgttcattagctatcaatacagaacatctttgtttgtcctccttgaccaaagtaaaaaagctgacagattttcaatttgttatgacaggagctcgtgctacgaggaccaggtttcagcaaaaggctcatgcaggtttgattattcttgccaaatcgtctaagtttcagaaatatgctataaacacaaaatctgcctcaccggaaacattcgccttggagtctgatttgctattagagaagccgcatttcgaatccgttgctgatgaacctttagatgaacaaatttatagcaaaagaccaagactggacctcgattctggctatgaagaagataaactattaccgttggcgctacgccaagagaacattcctaagtcgttgatggggttggatcctaataaccaaccggctttatccgattatgacaatattcaactactattacgtcttcacactattaagaacaccaccccagctaaagatccgcttgtagaagaagaacttacggctctactttctaggattttgtatcaagatggtgacaagaattggtcggttttcgcccgttcattgtgggaaaggtccattcttgaaacaacaaaggctaaaactattgaaagaggtcttttacaaatgcaatctctggtggaggagctggatttaaaaattcaaagtaaattgattccaagctcagatgaaattaatgtggccggtagattatcttatatacatcagctgccatttatccctaggtgggaattagattctacattagctgaaaagtacatgtcgttgggtattttgaaatctgctgtggaaatatacgaaagactgggtatggcatgtgaaactgcgttatgttatgctgctgtaggggacgaaaaaaaggcagaagaaattcttttacaaagaatagaggaaaacgaattggatgccagagcctattcaatcgtgggtgatataaagcaagatccatctctgtgggaaaaaagttgggaaataggcaaatacgttaatgcgaagaactctcttgccaaatattactttaaccctcccgctaagtctggaatacaaccaaattattctgctactttgaaacatttaaacgattcattaagacagtacccactaagctttgaaacatggtatttttacggctgtgttggtttacagtgtggtaagatggaactagctgctgaagcattttccaggtgcgtttcgttagatcctcaccatgccctgtcatggtccaacttaagtgctgcgtacatgaaattggataaattgaaagaagcgtttagctgtctgaagagagctgttgcatctgacgcacaaaagaattggaaaatttgggaaaactacatgcttgttgctgttaaattaaatgagtgggaagatgtcctagtggcatgcaaacaattggttagtatcagaagagataaatctggcgaaggctctattgacttacctattattgagaaattagtggaattattggtaactagcgaatattcagaagatgcagaaaaactatcttacttccaaaaaagctgtacggaattcatatgtgtcactttacctcaagtgattactacgagtgcaagatgctggagaatagttgctagagtagaactttggaggaagagaccatgggccgcattagaatgccacgagagagcttacagagccatttcacataatcccgatttggaaatcgacgaaaaagcctgggatgatacagtagacgcttgtgaagacttggtcgctgcatatgaatctctcggtgaaatgcaaggtaaatatgggcccgacagtttggtgtgcaaagattggaaatacaagtgtagatcaactatcaaggcactaatgagtaaaggcaaaggtaggtgggatgactcccttggttgggatagattaatcgaagccagaagtcaaatatga

SEQ ID NO: 2089 - DNA, 2292 bp, Saccharomyces pastorianus
atgaaacgattacaattactgggtaaatcaaaatacttctcactgatttcaggtcctactaaagaggaagaggagaaacccaggcctgatgtcgagagccctctgttaggtgcaaaccatagtaatagttcagaatcgctcttgttggacgatacatcgtctctcatgtgcctgccacagaaggttttactgctgatactgcgaaacctagatttcaacacattagtcactctctgtcaagtcaattcgacgttctataatttaataaccaatgagttccttttccagaacattatcttgggttcgaaactgtcgttgttaaaattcaacgctttgatacattctgaatttcatacctcgaacatcacctcacacagtggcgatcatgctcgacacacacaatctaaattgcagaacgcaagatttttagtaaggtccatagaattcaaaaacccacaatcccaggattcgttattaaaatacagcaaattctatagtaagaacgaccaaaattctgtaattgcagggtcgtataagctcgattcgtatgacaaaaacttatcaaaggtaaagaatatcaaaacacacgatgacgttcccaccataacttcggatcgaatcaaacaactggataaatttgaaagcaattacttccattacacttacatcgagctgatgcttgatatcatcgactatttgccgaatctaaccaaggtggttctgagcgaagtggaaccaaattttaaaatccctctatggtattctgtatttaatgatggatctcgggacttcttcaagaaaatcatcaagggacaacagtccattacaaatgaagatttgaggactttcctaatatccaagaatttcgtcaaagaatacgaatctaaatattactctttaccgagattaaaaattttagaaattaaagccaacagcaaaagacaaagatcatccaatcgtcaacgccaccatcagaaactcttactaagaccaaatttgttctgttgtttcggtataatcaatgaacttaagctggaaaatatgatgatagatacagaatcactagacactccaatggaatttttaccactgtttttgaaaaatgaaaataccgaactctatagtctacagtctcccatcacttccttaactttaaattcttgtgatgtggttcctggaaacgggatattacgattgttccattcttatttcaaaatggtcaaaaatttgtctttgttgaaaattaatagtaaatttgatttattattatgtagctgttttccatctttaacgaatttaaccatcgactgtaatagtaaatgctttaccaacgagcaggtggtcaacgaatcgtactattttcaacaacgaaaccacaatgcagatgatgattttgacgattgcaattcgatgacggaaacgttgttcgaagcgccctctgattccaaaataacaactcctccgccaacatcttcagttgtactatctttaaatttgaactatatctctaaaactacagggaatgatgattcaaataacccatcgccaaataataacaaaaagcctgccgtcttaacaccagcacagttgcagaccttccagagacaacggattcctgaatttcattccttttatcattattacaaattactttgggaaaggatccctaatcaaaatatctctatcaacgtcattaatatcccgttcactaatgtctacccatcatctccattatccttttgggagcacctagtgcggacgatggttagtgacaatgaaacagacgagaatgctaacgatgctgatgaccaagaaacattaattggctatgaggctgagtcagaaagggccggttcaccggtcccaagtgctgttcctaacttggcaacagcaatggacccagaactaaatactcatcactcttactattggaataattccgtaaagcgttgcatgagagacagtttaatcaagttgagggatagaacattggaatacagagacttagatgtggaagagtttttacaaaatgtgaatctggaaaagtttttcaataatttccaagatccagaaaattttaaagatgttcccaacattaatctttggtgtttcttgagaaatttatcgaagtttaaagcggtcaagataagaatgttgaggcatttttcatcatgtacgcctagaacaagatacgactgggagctattactaaagccagttttgcgtgtgaacgtccctattgaagttcgtgataaagatggatttgttctttattcatacggacaagagtga

SEQ ID NO: 2090 - DNA, 654 bp, Saccharomyces pastorianus
atgctgttgcaacctatctgcagacgctgtcgatggactcggttcgtggggcccatcagaagatggaactcgaccgggacgaacggagaaaggccattttcatttaaggatatatctagtcaagaggagatctcgaacatctcgtatccttcggcctccagcccaggctccacaattaccacgggcggtactgaaacgtacaagccacaagaggaggtggtcaaatatattcttcatggaaagttcaccaagaataacacacatttgacgttttctagcgtgatggaagacaagaacttccgcaagaataaagggctatcgtataacgacacgatgctgtactacttgaacctgcctgaaaaagtcaggatttcgatatccaccggctgtctaggattcagaaaggctgcaagaggggaatatgaagctgctttccagaccagcagtaaaatgtttgatttgatcaaagagaagaacatgctgaataaagacatagaagtggtaatggacgatttcggcaagggccgggccgcgttcatttctgctcttgttgggaaggaaggtgccagtgtggtgaagaaggtagtcaaggtcagcgacgccaccaaattgaagtttggtggtgtgagatctccaaagatgagaagattataa

SEQ ID NO: 2091 - DNA, 900 bp, Saccharomyces pastorianus
atgtcggtcccaccacctcccccctatgaagagcaaagctcgcacctctacgggcagcctgcgggagacggccaggatggcggcgctttcgtcccagaagatttcaaatactccactgtggtcgtctcatgcgaacccataatccgccagcggttcctgcacaaggtttactctctattgtcgtgccagttactggccagtctgtcgttctgctactgggccagcgtctccacgtctttgcagaacttcatcatgtcacacatcgccatcttctacgtgtgcctggtggtgtcatttgtctcctgcatctggctagcggtaagtcctcgtcccgaggactacgaggccaatgtccccgaaccgctgctcacggggaccggtgaagaaacggcacaagagcagagacgtctgccctggtacgtcctgtccacatacaggcagaagctcacactgctgtcaatttttacgctctctgaggcatactgtctctcgctggtcgctctggcatatgacaaggacaccgtgctctctgcgctactgatcaccaccatcgttgtggtcggcgtctctttaaccgcgctatccgacagattccagaacgtgctgaactccgctacgtctatatactactggctaaactggggcctctggatcatgatcgggatgggcctcacggccatgctctttggctggagtacccactcgtccaagttcaacctactttacggctggctaggtgccattcttttcactgcgtacctgtttatcgacactcaattgatctttagaaaagtgtaccctgatgaagagataagatgtgctatgatgctttacttggacattgtgaacctgttcctgtccattttgagaatcttggccaactctaacgacgataattaa

SEQ ID NO: 2092 - DNA, 309 bp, Saccharomyces pastorianus
atgagactttctactgccgccaccattgccaccgttgctgccattgcttctgctgatgttacttcagacggcgtcacctacgttgatgttaccactaccccacaaagtaccacatcaatggtctccaccgtaaagactacttctaccccatacaccacaagcaccatcgccactttatctacacaacctgtcagcagtcagaataacaccactacaccaggtatcagcacatttgttggtgccgctgccaaaggttccgttgtcggactgggtgccatcgtaggtgccgccgccattgctttgttatag

SEQ ID NO: 2093 - DNA, 2571 bp, Saccharomyces pastorianus
atgtctctctcagctgcagctaataagatatccgataacgatttccagaatattgggccggcccctatgccccccaatgcaaatggacaaggccgtaccggttacaaccaaacgcaacctataaccaagctcatgagccaactggacttgacttcagcgtcccatttgagtgcgaattccttgaagaagaagagcggatgggtgtcttacaaagacgacggtttactttcattcatatggcaaaagagatacttagttctacatgattcatatgtcgcgctttacaagaatgataagcaaaacgatgatgcgattttacagataccactaacaagcattataagcgtaagcaggacacagctgaaacagtattgtttcgagttgatacgttgcagcgaccgaaactctgtttcatcaggatcctcgtcctctgtgaatgtatcgtctgagaataattcgaaaaagtccatctatatcgctacaaagacagaaaatgatttgcatacttggttagacgctatcttcgccaaatgtccattattgagtggtgtctcttcccccactaacttcacgcataaagtacatgttggttttgatccggaaactgggagtttcgttggcatgcccactaattgggaaaaactactgaagcattctaggattaccggagaagattggaacaacaactctgcggcggtcatacaggtattacaattctatcaagagtataatggagctggcaaccccacaaatcctttggaaaaatctcaaagtagtgaggcagcctcttctcaaaaatctttaccaagcagttataatgaaaacaagcattcagtgaattcaaaagcttcctctggtggctcctcggggttgacatcacagagacaagcttcgcaaccaccaaatacgaaaccacatgtatcttcaggaaatggttcactgccaccgataaacacaaaagtacttaataatcaatcaaatatacccagacacttacaaaatgtccctagccaacagtacaataagatgagaaatgcacattccccaaccaatggtcagtttcctagaggacctatgcattctaaccattcacaacgatctttgcagcaacaacagcaccaacagcaccaacagcaccaacaacaacaacaacaacaacaacaacaatatcagcagcagcaacaatatccttaccaccaacaggtaccttctccatctccatctccgtctccatctccatctccattaaatccgtataggccacatcacaacatgataaatccatactccaagcaatccctatcacctttaggtgcacagccatctaacgcaaaccaaaaacaaggtacaccgaattacgctcaaaatccaagccccactggtccacaatttcaacctcagcgaactgcaccaaagccaccagtctcggccccaagagctccatacccaccaaaacaaagtgcagtggctgctggtgctgccatgcaacatgttgcagctaagaacgatcagccggttctacagtcgatgaggcaggctccaaagagaccagatacaaatgacaaacaagcgaccggcgtcaccaagcccaagaagccaacaaggccaactatgtcaactgcagaaatcatgagcaagttgaagagtgttaccgtcaatgcagatccatccatctgttttaaagtgattgagaaggctggtcaaggtgcaagtggttccgtttatctggctgagagaacatatataccaatcgaaagtaacatgagcgaatttatgaataacgagattgatgaaccccaagttggagataaagttgccatcaaacaaatgattctttctaagcagcctcgcaaagaactcatagtaaacgaaattctagtcatgaaggactcacgccatgataatattgttaacttcttagaagcatacttgagaacagacgatgacttatgggtagtaatggaattcatggagggtggatcactaacagatattattgaaaacagtcctgccaacgatacttcacgctcaccattaacagagcctcaaattgcatatattgtacgagaaacttgccaaggtttgaaatttttgcacgataagcatatcatccatagagatattaaatctgacaacgtcctgttggatacgaaagcaagagtaaagattacagattttggattctgcgctaaattgacagataaaagaagcaaaagagccactatggttggtacgccatattggatggcgccagaagttgtcaagcaacgtgagtacgatgaaaaaattgatgtatggtctttggggattatgactattgaaatgttggaaggtgaaccaccatacttgaatgaggatcctttaaaggcgctctatttaattgcaaccaatggcactccaaaactcaaatatccggaaacattatccttggagattaagcgtttcttaagcgtttgtctttgcgtagacgttagatacagagcttccaccgaagagcttttacatcacggttttttcaatctggcatgtgatccaaaggacttaacagcattgttggaatggaaggagtga

SEQ ID NO: 2094 - DNA, 1212 bp, Saccharomyces pastorianus
atgaacgggatatttgctattgagaagcccagtggcataacatctaaccagtttatgttgaagctacagcatgctttaactaaaagtcaaatattctcgaaggaaattcaaagggcaacagctgagagaagagagcagtatgaacagcagacaggtaagaaagcgagcaaaagaaaactgcgtaaagtttcgaaggtgaagatgggacacggaggaacgttggatccgctggcttctggtgtccttgtaatcggtattggaacaggtactaagaaattagcaaattatctttcaggtactgttaaggtttatgaaagtgaagccttgtttggtgtctcgaccacttcaggagacgtagagggcgaaattttgtcccagaattctgttaagcatttgaatttcgacgatttgaagacagtggaggaaaaatttgttgggcaattaaagcaaactccccccatatacgctgctttaaagatggatggtaaacctctccatgaatatgctcgagaagggaagcctttacccagagccatagagcctagacaggtgaacatttatgatttgaaggtgtttcctgattcccttaaacgtgatcatgactattctttcttaaggcccacgacagaagaagcggttgacactgtgaaaaacttgaatgcaaacatgctaaatgatgttttgtatttctcaaaagattatacagacaagcatgggctgaagtctgaggtcgcagacgtaggggaggcattgccattgactaatgaagaagagcaagagattaaggaagaaggagattcttacagagctccaaagttgcacttcaaagcaaatgtatcttctgggacatatattagatctttagtgagcgatatcggtaaggctatgaggagctcgtgctacatggtgaaattgattcgtttacaacaacaggactggtctcttgaaagaaataatgtctttcaattggcagatttcactgaaagagatgaaaaagtatggagtaaggtattggaaaaggtcctggacgaaggggcaagtgttgatgttatagaagaattaacgaaagcagaaaaggaagtaccagctgatgtaaaggaggacgtggcgcctgatactcaattagaagatgaagtcactgctgaaacagtggaaactgatattgttgaggagtcgtctggtactttgaagaggaaaattgagcaagtgtaa

SEQ ID NO: 2095 - DNA, 1647 bp, Saccharomyces pastorianus
atgattgtatggcagtttctatttgtagttcattgcttgttggcggcaaccattcaagcaatattcgaagacttcaaccctttcgcacataagaatgtttcactagaagtacccagtgtaaatgggtggcgcaagaacatcatgaccactggtcaacaaaccattttcaattccgataacatctacgaatggaccccgatcctctccaatttaactgctggcaaaaaggacagtttcgtgttcaccatcgatgcagaatcctccggttacgggttcgcacccacatacgaagtactgatgttcattagtggtaatatttgcgacatgcccgaaaatattacgggggctgaattaatgatatactattctttcaatgagtctgttttggacaacccgggtattggccagagtgctgtttttcaaaatggttacattcaagcattggccattagtccagtgcaatcgtctagctcgaatgccacctccacctactcaaacctttatgtggtcactgagctagtgaatgccacgacaaaacaaccactgtccagttctgacacatcaggtatctgggagtacagattgagtatctctgagaatgatttagtcttccaatgggacgtaagaccctgggtagaagtgttagacacagatatgcactctgcgttactgtccacagggaatgttaccgctgatgcaaaggtttaccataactactcaatatatgatccatccttatacgatctatatgtttactcgtacgaagagtcgactcggctaaatgaaaactataatctatctctatgtgctgtgaaaaatggaccgcatttggtttcatctcaagacacttcaaactcaacagttacaacaaacagtacaaatccactggagagtaccgatttgatcatccaaaaaaagattacagagtacggtggcagcgtaagtgaaatgttttacattaccgggttaaacggctcaacaacatataccgcttacctaacaaagaaaatcagtaacggtgatggattgtcaaatgtcggtggcgtgctattttcacaagtttatttcaccaccaaaagtactaatgcatgctctttaatttttgatttggatttctgtagtgacgttgcttattctgtacccacatcatcattttcggtggagaataagactctcatggcgcaaacttatgatcacattgcagaggctttatattcaaatttcagcaaagctttacagttagtatcttgcgacgcagacaaagatgcaagatattcgccgatcatggcttgtgaagattgcgctgaagcatatcgtgattgggtatgtgcagtgtcaattccaagatgtagcacgttatattccaagtactttactcacagagataaaacgcaaaatcgtaatgattatctgaatagatacatcaaacctttagatgattattatgaaatattaccttgtattgatatgtgctatacgttagtacgaaactgccccagtgatttcgggtttgcctgccctaatgataaatccacggaagatttactttacgaaagttacaacttctacatggacgttgactacgcaacatgcaactacataggtaattcttcattaatgacgattcatcctttgaaggacacatag

SEQ ID NO: 2096 - DNA, 840 bp, Saccharomyces pastorianus
atgtgtgaatacagcaaagctctacatattctgctcaagtctccagtcacggacgacataataaaattcttaaccgacaccacgttgagggtcctgccctcgagcaactacccaacgcctccctgctctccaggcgggaagcccgtggccaggttgccatcgctgatgactttcatcaccagactggtcagatacaccaatgtgtacacgcccacgctgctcactgccgtgtgctatctgaacaagctgaagcgcatccttcccaaggacgcaactgggctgccctccaccatccatcgtattttcttggcctgtttgatactgagtgccaagttccacaacgactcttcgcccttgaacaagcactgggccaagtacacagacggtcttttcacgctagacgatatcaacctcatggaaagacagctgctgcagctgctgaactgggacctcagggtcgacactgaagacttgatcctggatctacagcctctactggagcccatcaagcaggacttggtgaggtccagcgaccaaagaaagagaataggcatgatgatggccatgaacaagagggccagtgcaggcacaagtcctatcgcttccaacaatagattcaagctttacgaaaagcaaagaaacgtgtctattgcatcggacctaagttctgccacgcttgttgacagttgtaacgacctaagaaggctgaaagacgtcaccaatataccgaacagcacgcgtaccaacagcaactacgtgaagtctgtggagaggtggaacgacaacgtcaacagacaaagttgggatctggaacagatcatgagccagcatgggttttaa

SEQ ID NO: 2097 - DNA, 1194 bp, Saccharomyces pastorianus
atgttctcagcacaaaagccaatgtatggctctgggacaggcataaatatgggtgccggtggaccccctgcaaacaatccaggatcgatgcctatgcccggagtcccttcgtcaatgggcccaggcatgaaccaacaaatccctggcggtggcccaatgctaatgaacaatactcccaataacaataataacaataataacaacaacaacaacaacaacaacaacaacaacaacaacaacaacaacaacatcggcaataataacaataatggcaataacaacaataacaataacaacaacagtagtagtaacgatggtaatgctgcccgtggcaacatgaacatggccaatagtagaggcgcagtacacgcattagatgatcctaatgtgtaccattggatttgtcaattgacatacggcccccaaaaggaacaagcgttgcttgaacttggtcgcaaaagagaacagttcgatgaccttgctgtggttctttggtcttcgtttggtgtaatgacttcgttgctgaacgaaataatctctgtttaccccatgctgcagcctcaaatgctatccaacaacttatctaatcgtgtctgcaacgcgttggttcttttacagtgcgttgcgtcgcatccagagaccaaacaccttttcctccaggctcacattccactctttcttttcccctttttaaatacgacttcgaggcagaggacattcgagtatttaagattgacctcattgggggtgataggtgcattggtcaagaatgactcacaagacgtaataacgtttttgctcaggaccgacatcgtaccgctatgcctaaggattatggaatcttcatctgagctctctaaaacagtggcgattttcattttacaaaaaatcctattggatgatgtcggattgcaatacatctgtgctacattggaaagattctacgcggtcactaatgtgttgaaggatatggtggagcatttgaccgtgagtacgccaccgggaagactactgaagcacattatcagatgctacctaagattgagtgacgatttggaagcacgcaggttgctgaaagtcgtattgcccgccaagttgagagacaacactttcaccgaagtgctaagagacgacgtcgggtccaagagatgtttggcgcaattgctgttgacgctaaacgaagaaacctcatga

SEQ ID NO: 2098 - DNA, 1461 bp, Saccharomyces pastorianus
atgaatttacaactcatacactggtcttgcgtcttcgtgtcgctcgtgcttatacgagcagcgttcgctgaccagttcacatacaaagcttgttattcgtcaagcgacatccgaaaactggggttatcttctaagggaaattacgaataccagtctgtttcgtactgtgaaaacgagtgttctggacaagctattgtcgctcttttcaatggtaaaggctgctattgcggtggttctgtttctcaattgaaatccttaacacaactggattccagcgactgtaatgttgcgtgtgctggttggccttaccaaaattgtggtggttcttcggccatgaacgtttatatcaacaacgcagcatccacggcggactcatcttcgtcctctgtgtcttcatctaaatcatcttctgcatcttcaagcactagttcaaaaacgtcctcgaaatcggactcgaaaagttcaactagttcttctgctacgcagtcttcaatttcctcatcgtcaactaccacctcaagttcttcctcaaagacgaccacatcctcttctacttcttcttctacttcttcttcctcttcttcttctttttcctcttcctcttcctcctcttcttctagttcagaaacgtcttctacactgacaaccacttcatccacgacattgccctcgtcttcatcatcgacaccaaaggttacgtcggccccttcatcgagttctgcaggtacatcaacacatttaactactcgcgtggtgacacagtccgttgtttctgaagcgaatgaccaggcaagcacaatatatatcacaaggacctctgtttatgcgacagattcgtctacggcctcctctactagtacatctctggatgggaagtcaagcacctcaaagagtaaacatttaagtggtggtgccattgcaggtatcgtagtgggtgtcgtttgtggtacagttatcttggcagcattggtcatattatactttgtttggaaaaaacgtcgccagacttcccagcaggtagacttagaggagactaaacattaccagccgtattcctttggtgacgccgatgctaaccccgttcttccacgatctacttccagttccaactggcatataccctcccgaaacaatactgcgttgtccaagaataccgcacccggtttcgccaattatgacctgccgacaaggttgccgggcggtagagattcggtaatggctggtgatatttctaatgccaccaaaagaagccatgtaccatctgtggtatatgaagagccaccttcgatctataacgggaaccaaagattcagtgctacctcattgcccgatatgatggaagaaagacaactacatattgtaaaccctgataatataagtttgagtaatgagagcaacgcttccaatggtgacgacgattatgatgatgccaaggattccaatgatagttctttgcgctga

SEQ ID NO: 2099 - DNA, 462 bp, Saccharomyces pastorianus
atggttgtcttgaatccaaacaactggcattgggtagataaaaataccttaccttggtccaaggactacttgaacggtaaattgacgagtctatccactgtctgctcagatgggaagagcaagatcgagttgactcaagtcagtagcatcaccggtgactccaatgtttctcaaagaaagggcaagccgatctgctacttcgaccttcagttatcgatgagcgtcaaagtgacaaacttagatactgacgagaacaacaaagacgatgacggcgtacttgcggacggaaaactggagattccagagttcatgcatgacgaatctgatttccctatcctgtcgcaaggttttgacgcgtttgatggattggttagatctgaatttgtccctaaagtattggagacgctactaatgtaccaagacgacttgatcaaagagcattccaaggacgtacaaatctga

SEQ ID NO: 2100 - DNA, 1317 bp, Saccharomyces pastorianus
atggtatcgattttgaatcccagaacaacggagtttgagttcggcgggctgattggtgccttggccatcagtgtggggctgcctgtattcagcatcatcttgaaccaaatggttagaccggattattttattaagggatttttccagaattttgacctgattgagctttggaacggtatcagacccttgcgttactacctgggcaaccgggagttatggacggtgtatggtatgtggtacgggatactggcggttttggacgtcattttgcctggcagagtcatgaatggtgtccagttgagagacggttcgaagctttcgtacaaaatcaacgggattgctatgtcgacaactttgatcctggtcttagcagtgagatggaagttaactgacggtcaattgccggaattacaatacctgtatgacaaccacgtcaacctatgcataatatccatattgttttccttctgtttggccacatactgttatattgccagtttcgtaccattaattttcaagaagaacggtaataaccaaagggaaaagattctggcacaaggtgggaattcgggcaacattatttacgattggtttattggtagagaactaaaccctcgtttcgggcccttagacatcaagatgttctctgaattgagacccggcatgttgttatggttactgatcaacctttcatgtttgcatcatcactatttgaaaaccggcaaaatcaacgatgcgttggttttagtcaatttcctacaggggttttatattttcgacggggtgctaaatgaagaaggtgtgttaacgatgatggatataactacggatggattcggtttcatgttagcgttcggagatttgactttggttccatttacatactctttgcaagcccgttatttgagtgtttcaccagtggagttgggcttgggcaaggtcgtgggtattttgtcaattatgttcttgggatactacatcttccactcggcaaacaagcaaaaatctgaattcagacaaggcaaattggaaaatctacaaagcatccagactaagcgcggtacgaaattgttgtgcgacggatggtgggctaaatcgcaacatatcaactatttcggtgattggttgatttcgctaagttggtgtttggccacatggttccaaactcccttgactttctactactcgttgtatttcgcgacactgttgctgcaccgccaacaacgtgacgaacacaaatgtcgtatgaaatacggggaaaattgggaagagtacgaaaggaaagttccatacaagatcattccgtatgtttattaa

SEQ ID NO: 2101 - DNA, 1461 bp, Saccharomyces pastorianus
atgtctcacactgcaaaatcgaaaacgctccaagagctggatattgaggatattaaggagaccaaccctttacttaatctggtccaaggacaaagaattgttcaggtcccggaactggtgttagagtctggtgtggtgttaaataactttcccattgcttataagacatggggcacactgaacgaagcctgcgataatgttctggtcatctgtcatgccctgacaggttctgcggacgtcgcagactggtggggcccacttctgggcaacgatctagcattcgacccatcgagattttttatcatatgtctgaactctatgggctctccttacggctcgttttcaccattgacgataaatgagcagaccggcactcgatatggtcccgagtttccattgtgcactgtgcgtgacgacgtcagggcccacagaatcgttctagattctttaggtgtgaaatcaatagcgtgcgttatcggcggatccatgggagggatgttgagcttggagtggactgccatgtacggtaatgaatacgtgaaaaacatggttgctctagcgacttcggcaagacactctgcctggtgcatatcgtggtcggaggctcaaagacagtcgatatactcagaccccaactacctggatggttactacccagtggaagagcaaccggtagctgggttgtcagctgcacgtatgtctgcattgttgacatatcgaactagaaacagtttcgaaaacaaattttccaggagatctccctcgatagcccagcaacaaaaggcccaaaaagcagaagtgcgtaaaccctccactgtcagcgagcattccttacaaatacacaacgacggttacaaatgtaaagccaatggtgccattgctggcatctcaggacagaagcgccaaagcgtggtctctactacatcgtcttcggactcattaacttcacaatcatcgatgacttcggtaagctccgtcaccggtgaagtgaaggacatcaagcctgctcaaacatatttctctgcacaaagctacttgaggtaccaaggtactaaattcatcaacaggtttgacgccaattgttacattgccattacgcgtaagctggacacgcacgacctagccagagacagggtggaagacatcacgaaggtactttccgccatcgagcagccttcgctgatcatcggtatccaatctgatgggcttttcacatactccgaacaagaattcttggctgaatacataccgaattcgcaactggagaaaatcgagtctccagaaggccacgatgcctttttgttggaattcaagctgataaacaaactaattgtgaacttcttgaaaaccaactgcaagaatatcatggatgccaaaccaaggacttggggaggagatgttggtaacgacgaaacgaaaacatcagtcttcggcgaggcggaggaagttaccaactggtag

SEQ ID NO: 2102 - DNA, 1053 bp, Saccharomyces pastorianus
atgagcggaaaaccaattgttttgaaattagggaagaatgcctttgctgaggaagcgtggaaggacctgggcaggatcgcagacgttatcactatccctgaaaccaccactcgagagcaattcttgcaggaactcaaggaccctcaaagtaagctttctcgagtacaagtcatcaccagaaccgcgagaagcgttaacaatacaggtaggtttgatgaagagctggctcttgcattgccctcttctgtggtcgccgtttgccacacaggtgccggttacgaccaaattgatgttgagccatttaggaaaaggcacattcaagtggccaacgttcccgacttggtaagcaacgctaccgcggacacgcatgtgtttttattgttgggcgccctgagaaactttagcattggtaataggaggctaatcgagggaaagtggccagaatccgggcctgcgtgtgcttctccctttggttacgaccctgaggggaaaaccgttggtatactgggtctaggtaggatcggtcgttgtattttggagaggttaaagccatttgggtttgagaacttcatataccataatagacaccagctaccttccgaagaagaacacggttgtgaatatgtaagcttcgatgagtttttgaagcgctcggatatcgtgtctgtaaacgtcccactaaatagtggcacccaccatctaatcgatgcagagaccattgagaaaatgaaagatggcgtggttgttgttaatactgcccgtggtgcagtcatagatgaacaagcaatgaccgatgctctacgcagtggaaaaattaggagtgctggtttggacgttttcgaatatgagccaaaaatatccaaagaacttttatccatgcctcaagttttgagcttacctcacatgggtactcactgtgtggaaacgaggaacaaaatggaagagttggtcgctcataacgctaagaatgtgctattgaccggaaaagttttgactattgttcctgaattgaaaaacgaaacctggcccaacgatgttaagccgttaatttag

SEQ ID NO: 2103 - DNA, 2241 bp, Saccharomyces pastorianus
atggatgcttctgaggaatcaaaaagaatatcaatacaggttacatccctgtctactcaactaattgagagtgtagataaacaatcacatttagaggaacagcttaataaatctttaagaaccatcgccagtcaaaagtcagcgattgataactacaaccagctgaaaaccgattatgataccctgaaacagacattatcagagagagatgaagaagtgatgagactgaatgggaatattgcgaaagaaactcagctccgaactaaagctgaggatgaatctggaaaattaaacagagaagtcgaagatctgacagcttcacttttcgatgaagcaaaccatatggttgctgatgctagaaaggagaaatatgctatcgaaatattaaacaagagacttaccgaacaactacgtgaaaaggacacattattggagacattgaccttacaacttaaaaatttgaagaaagtaatgcatagtctagacaatgagagtacggtcacaaacaactccggtagatactcgaccatcttaagcgactccgcaacttcttctagcacttctttaaacaaagtgccaacttccaactctttcacttcacaagatatgtacagtggaattgtatattcaccaacaatatcatctattcgttatgattcaaatctttacaatgaatttttaaaatttgttgctgcactacctcattgtgaaaatataaaggcaacttcatcagagtcaaaattgatacgaaggttggtaaatgatgaaatccaacctatacttaaaatcgataatgcgtccggaattggctggttggttaagaaaaccttactctctctgattatagatggtatggtggttgtggaaccattaagcggtgtcaatgcaacataccaaatcggatacaactcaagtagccctgtgaagcaagccacttctaatatgccaaagatgtttaagtttcccttggattcgcccccagtagctgtgcatgctgcatgttccttctgtggagaatccagagacgatattattgaacacgcaaggatgtatgtgctgaaaacgttacataagtctgatgatggtgcggaacacgtaacaaatacctacccgttatgtcattggtgtttgctaaaggtaaggcaaacatgtgaaatctttgcatttttaagatcattaaaggtaggagcatggcatttagagaaggtaactttgcaaaatattgccaagggtgatttggagaggttttcagaggtcacaaagcgaactaaatcagaggggggcagagtttctcctcatgataagatggctaagcgattgagtttcatggcgggccttggcatcaactcttcaacaaagagtaaaccaagggtggaagtcccgtcctccgaaatgaatgtaaagccgggccaaccaaccactaatattcaaagagcatgggtacagctgtgtaaattgcgttgtatacttcactggtctcatattggcatatgggcagtagatgattctatttcctcaaaaataggaccctttgttgacgatgaaggtactgatgagggtccaagtgacactgtaccagtccgcttgcaagacaagtcattgtggaagaaaaacgcggacatacctttgtcgtcatctagtacagatgaaagtcagaggagtgacactttcgacttcgaaagcgaagacacagagaacgcaaccacagatgaatcacccgccggtgtatctccctcagatacgtcgtcctcagctgcgactactacgagtggaaactcgtcggcagcagaagaacaaggccataatgagggagatgatacagtaacaaaagatgatgagagtagtagtaagtcgataaaaaaacataacgaagaaagtgccactaccaacgataaaaaggttcaggaaaagccgaaaaggaaagcttctcagcgtaagattcaaaagaagaaattgctcagggatttggatgaattggaagaacaatttagagaagaaagtacaaatgtccaggacgaactcaaaagctctgatgatgtcaaagctcaagttgtatctccagacaatactacttctacagaaaaggacactaaaggagatgagcgttcaagcaataaattatcaaagttgtcaataaacaatgaacacaatgaacaaataaaggaaaacagtccagggagaggattgcatgcatcttcaagcaacgatgacaattttgacgatgcccaagaacaacaatag

SEQ ID NO: 2104 - DNA, 1713 bp, Saccharomyces pastorianus
atgagtaaaaatgtggacattggcgtggccaaagaggctcgatacgaagtaaactccatcaccacgaaaaaggaggaggagctggtagacgtccagtacgatggacaggatgccccggcggctatcgcagccgatgattgtattacaaatgaaaatttcaaggcggcaaagacgctaccgcgggaggtgaaacggaacttgaagcagcggcatatagggatgattgctctgggagggaccatcggcacgggcctcataataggtatcggtccgccgctggcgcacgcgggccccgtcggcgccctgatatcgtatatattcatgggaaccgtcatttactcggtgacgcaatcgctgggggagatggccacattcatacctgtgacgtcctcgttctctgtctttgcccagaggttcttgtcgcctgccctgggcgccaccaacggctatatgtactggctgtcgtggtgcttcacgttcgcgctggaactatctgtactgggacagatcatccagtattggacagatgctgtgcccctgtcggcttggatcgtagttttctggtgcctgctgacaatgatgaacatgttcccggtgaagtactacggggagttcgagttttgtattgcttccataaaggttatcgcgctgctcgggttcataatctactcgttctgcatagtatgtggtgccggacagccggatggacccatcggattcaggtactggagaaacccaggcgcttgggggcccggtatcatctccagtaacaaaaacgaagggcgttttctcggttgggtctcctctttgatcaacgccgccttcacctaccaaggtactgaactggtcgggatcactgctggtgaagcggctaacccaagaaaggccgtcccaagggcaattaagaaagttgtagtcaggattctagtcttctatatcctctctctgtttttcataggcctcttggttccgtacaatgacccgaagctggacagtgacggatcgtttgtctccgcatccccctttatgatcagcatcgagaattccggcactagggttctcccagacatattcaacgcggttgtactgatcaccataatctctgcgggcaactccaacgtgtatatcggctcaagggtcctgtacagcctatccaaaaacagcttggcacccaagtttctgtcgatcgttaccacgggcggagtcccctactttgccgttttggcgacatccgtattcggattcctggctttcttagagacttctgtaggcagtggcaaggccttcaactggctgttgaacatcactggtgtggcaggtttttttgcatggctgctgatttcgttctcgcacatccgttttatgcaagcgataagcaaacgcggaatatcgaggaatgatctgccttacaaggcccgcatgatgccgtacctagcttactatgcgtcctttttcatcgccctgatagttctgatccaaggatttaccgcatttgcgcccattttccagcctgtagattttgtagccgcatacatatcggtcttcctgtttgtggcaatctggatcacattccagctttggttcaagtgtcccataatctggaagttgcaggacgtcgacatagattccgaccgccgcgaaatagaggagcaggtatggatagaacccttacacaaaaccaaatggcagtgcgtgtgggatgtccttgcatag

SEQ ID NO: 2105 - DNA, 1836 bp, Saccharomyces pastorianus
atgggcaagtttagaaatttaatatcgcccaagaaatgggacgaggagcaggaaacttccgaagagcagagtatacgggacgactcaataaatcagatagaacatgaaatggaggtgatagatacaggcaacaagccggtcgcatactccatggacgagaagcagtacaatctgaagacgaagaacgggttaatgcaagatggcaccattggtgacgtaaattccatcacaaactcgttatcgaggtcccgaattgcctcgcacgaggcaggtgcggacgaagaagaagaggaagctcactacgaagacaagcatgttaggagagccttgaagcagagacacattggtatgatcgcactcggtggtactatcggtactggtcttttcgtgggtatctccacccccctgagcaatgcaggccctgtcgggtccctgatcgcttatattttcatgggtactgtggtttacttcgtgactcagtcgctaggtgaaatggccacatttatccccgtgacgtcatccatcacagtcttctcaaagaggtttctatcacctgctttcggtgttgccaacggttacatgtactggttcaattgggccatcacgtatgccgtggaagtctcagtaattggccaagtcattgaatactggacaaagaaagttcctttaggggtttggattgccatattttgggtccttattactttaatgaattttttccccgtgaaagtttatggtgagtttgaattctgggtcgcatcggttaaagtcttggccattatgggatatctaatatacgccttggtcattgtttgtggtgggtcccatcaaggtcctattggttttaggtactggagaaacccaggcgcttggggccctggtatcatttctagtgacaaaagcgaggggcgttttctcggttgggtctcctctttgatcaacgccgccttcacctaccaaggtactgaactggtcgggatcactgctggtgaagcggctaacccaagaaagactgtccctagagctatcaataaagttgtcttcaggattgtactattttatatcatgtctttgttcttcattggcctcttggttccatacaatgacaaacgtctgtctgccagctctgctgtcattgcatcatcaccctttgtcatttccattcaaaacgccggtacttatgctttgccagacattttcaacgctatagtcttgatcactgttatctctgccgctaactcaaacgtttacgttgggtcccgtgttttgtactctttggcccagaccggtaacgctccaaagcaatttggatacgtcactaagcagggtgttccatactatggcgtgttgtctacagctgcattgggtcttttggccttcttggttgtcaacaataacgccaacaccgcattcaactggttgatcaacatctctactttggctgggttatgcgcttggttattcattagtttagcacacgtcagattcatgcaagctttgaaacagcgtggtatctctcgtgatgatttgcccttcaaggctaaattcatgccctacggtgcctactacgcgtcctttttcgtcaccgtcatcattttcattcaagggtttcaagcattctgtccattcaaagtggccgaattctttacgtcctacatttctttaattcttttggccgtcgtgtttgctggttgccagatgtactataagtgtagattcatttggaaactggaagatattgatatcgattctgacagaagagaaattgaagccatcatttgggaagatgatgagccaaagaatttgtgggagaaattctgggcagccgttgcataa

SEQ ID NO: 2106 - DNA, 3201 bp, Saccharomyces pastorianus
atgcctaaagaatctagttcaaagaaaagctttgatgataccctcgaactgaaaaaaaacgaacagttattgaagctaataaactctaatgaattcactttgcacaattgtgtggagttgttatgcaaacactccgagaatatcggtatccattattgtttgtgccaaaaactggctacatttcctcacagcgaactacagttctatatccctcaattagtacaggtcctggttactatggagacagaatcaatggctttggaggatttactattgagactaagatcagaaaaccctcattttgcgctgctgacattttggcaactacaagcattactgacggatttgtctaccgatcctgcttcttatggtttccaagtcgctagaagggttttaaacaacttacagtctaatctctttaatacgaactcaaatgacattaagacggttaagatacacgaaaatgtcgcaccagccataatcctttcttccatgatgatggcagcaatagcattaccccagttaagtgaagcttccaagccattggtagagtcccaaggtagaagacagaaagcatttgtttttaaattagcaaggagcgcaatgaaggattttaccaagaatataactttaaaaaatactttattgaataagaaaaactccaaaaccaaaagagtcagctcgaatagcagtttgactccaagctctccgatagatttgatagatccaataaaaaccagagaagacgcgtcgtttagaaaatccagacgtaatgaagtaaagctagattttgacatagtagacgatatagggaatcaagtcttcgaagagagaatctcatcctccatcaaactacctaaacgtaaacccaaatacctggataattcctacgtacatagaacatatgacggtaaaactataaataatgatggaacaccaaggacgagtgaagaaaccattgatggaaaacgaagtagctatgttcctcccaaggtctacaatgatgagaatatagacaacattaacaatggagatgaaacaggcggggagacggaggaagacacagatgctctaaactccgaccagtttaccagttctatgccagatctacataatatccaaccaagactttcttctgcatcattcgcatctttagaaggaacacctagactgaacaggactaactctcaaccgctttcacgccaagcagttaaaaacagtaagaaagaaaaatcatccctaaatcaggaaattgatctatcccaattgtcaactacttcgaaaatcaaaatgcttaaggcaaactatttccgttgcgaaacacaatttgccatcgcattggaaacaatatcacagagactatctcgagtaccgacagaagccagattgagtgccttacgtgctgagttatttcttttgaatagagacttaccggcagaggtggacatccccactttgttaccccccaacaagaaaggaaagttgcataaattggtaacaatcactgctaatgaggcacaagttctgaactctgcagaaaaagttccatatttattgctgatagagtatttgagggatgaatttgactttgacccgacaagcgaaacaaatgaaaggctactaaagaaaatcaatggcaatcaaggcagcttgatatttgatttgaactacatgaaaagaaaagaaaaaagagaggatataaatgaaaatacttctgcaagcataatcatgccaccttcgttacatgataccgatgcaccttacaacgaaacgtctcgtaatggagacttgtccggtacttcaagaaatacgtcagtctctgcggcacgttttaaaactgaagttaataaagaagaagatctaggtgatatgtcaatggtgaaggtccggaacagaactgatgacgaggcatatagaaattctttagtgttacaaagtgccacgagtattcctgtactgtctgccggtagtcaagacagaagtccgcaactaaactttggttcaaacttggatgatatgctcattggaaatggcactggcagcaaaaacattcatagtcaaacggacgctttagccgaccaaatgagggtctcggcggttatgttagcgcaattggacaaatcaccacagcaattatccgaaagtacaaaacaaattcgtgctcaaatcatctcatcaatgaaggaagtacaggataaatttggctatcatgatttggaagctcttcacggaatggcaggtgaacgaaaattagaaaacgatttgatgacaggtggtattgacacgtcatatctgggcgaagactgggccaccaagaaggaaagaatacgtaaaacttccgaatatggtcatttagaaaactgggatctatgctccgtgatcgccaagacaggtgatgatttgagacaggaagcatttgcgtatcagacgatccaagcaatggccaatatttgggttagagaaaaagtcgacgtttgggttaaaagaatgaaaattttaataacaagcgctaatacggggcttgtggaaactattacaaatgctatatccgtgcacagtatcaaaaaggccctaacaaaaaaaatgatcgaagatgcagaactggacgataagggtggtattgcatcattgaatgatcacttccttagagcatttggtaatcctaatggattcaaatataagagagctcaagacaatttcgcctgttcattggctgcatattctgtcatttgctaccttttacaagtcaaagatagacataatggtaacattatgattgataatgaaggtcatgtaagccacattgattttgggtttatgctatcgaattctcccggttcagtgggattcgaagctgcaccatttaaattaacttatgaatatattgaaatcttgggtggaatacaaggagaagcattcaaaaaattcgttgagttaacgaagaaatcgtttaaagctttgaggaagtatgctgatcaaattgtatcaatgtgcgaaatcatgcaaaaagataatatgcaaccttgttttgatgctggcgaacaaaccagtgtacagctacgacaaaggtttcaattagaactgtctgaaaaagaggtcgatgaatttgtggacaactttttgataggcaaatcattaggcagtatttacacgagaatatatgatcaatttcaattgatcactcagggtatatacagttaa

SEQ ID NO: 2107 - DNA, 972 bp, Saccharomyces pastorianus
atgtcttataatccgtatgcgtacactaccggagagcagaacggcgtcaacgaccgctttgctcacactccacaacaccagcaaccgatgcaaatgcccagaaacatgccgatgaacggccaggctaacatcaatgcaaacatgaacgcaaacgtgaacgcaaatgtgaacgcaaacaccaatggtgccggcggctttccgttccaagatacacgtggttcagtggcattccaattggggcagagtgccttttccaactttattggtcaggagaattttaaccagtttcaagagaccgtcaataaagccacggcaaacgccgccggctcccagcagatctccacgtatttccaggtgagcacccgttatgtgttcaataaattgaaactcatcttggtgccctttatcaacggtaccaagaactggcaacggatcatggactctggcaattttttgccaccaagggatgacgtgaactccccagacatgtacatgcctattatggggctggtcacctacattcttatttggaacacacaaaagggtttacaaggctcttttaacccagaggacttgtactacaaactgtcctctacgctgggctttgtcgggctggatttattgattttgaaattgggtctatatcttttgatcgattcgaagattccaagcttcagtctggtggaactgttgtgttacgtcggttacaaatttgttccattgatcctcgcccaactgttaaccaatgtgaccatgccattcaacttgactatcctgataaagttctacttattcatagccttcggcgtattcctactaagatctgtcaagtttaatcttctaggccgctccggtgctggtgaagacgacatacatgtctccgtgagcaaaacaaccgtcaagaagtgcaactatttcttgttcgtctacggcttcatctggcaaaacgtcctcatgtggctaatgggatga

SEQ ID NO: 2108 - DNA, 1440 bp, Saccharomyces pastorianus
atgaatgtcactactcccgaggttgcctttagagattaccagatcaaatgtcttgcatcgtacatctctgctgatccagacattactccgccaaatttaattctgcaaggctacagtggaacaggaaaaacgtatactttaagagaatattttaaagccaatccagacttgcatgcggtttggctggaacctgtcgagttggtttcttggaagcctttactgcaagcaatagcgcgtactgttcagtataagctaaaagtactatacccaaacatcccagctacagactacgatccattacaggttgaagagccatttcttttagtcaaaacattgcataatatttttgctcaatataagtctttgagggaaaaagtttgtctgttcttaatattggatggttttgatagtttacaagatttagacgctgcattgtttaataaatatattaaactacacgaattacttccaaaggactccaaagttgatttgaaatttgtttacaccatgttagagacatcttttttacagagatactccacacattgtattccaaccattatgtttccgaggtatgagatggataaaatttctagtatcctagttatgtctagatgtggtgagctagttgaagactcatgcctgcgtaagcgcattattgaagagcagataacggattgtacagatgaccagtttcaaagtgtagcagcaaacttcatccacttggttgtacaggcgtttcattcttatactggtaatgatgtatttgcattgaatgacctgatcgactttaagtggccagattatgtctctcgcattaccaaggagaacatatttgaaccgctgactctttataaaagtacaatcaaactatttgttggcactgatgatgatttgagtacaaatgaaattgcagagaattccatgaatattaatggggatgagcctaagagcagccaaacgtacgaactatcaataatttccaagtatctgctaatagcttcgtacatttgttcgtatttggagcctagatatgatgcaagtattttttctaggaaaacacgtattatacaaggtagagcagcttatggacgaaggaaaaaaaaagaagtcaacccaagatatttgcaaccttctttgtttgccattgaaagattgctggctatttttcaagctatatttcctatggaaggaaaagccaaaagtggttctctatcggctcttcgtgaggaacctttaatgagagcaaatattgaggtgttccaaaatctgtcagaattgcataccttaaaactaatagctacaaccatgagcaaaaatatcgattatttgagtcctaaagtcagatggaaggtaaatgttccttgggaaattatcaaggaaatatcggaatctgttcaattcgatattagcgattactttagtgatgttcatgaataa

SEQ ID NO: 2109 - DNA, 222 bp, Saccharomyces pastorianus
atggctgatacaaatcattaccaattcaatgtcgtcatgacctgttcgggttgttctagcgcagttaataaggttttgacaagactagagccagacgtttctaagataaatatatcacttgagcagcaatcagtagacgtgtacactacgctttcttacgactttattttagagaaaatcaagaaaactggtaaagaagtgaaatcagggaagcagttgtag

SEQ ID NO: 2110 - DNA, 465 bp, Saccharomyces pastorianus
atgtcccaaaaagcctgttacgtttgtggtaagatcggccatttagccgaagattgtgattctgaaagactatgttacaactgtaacaagccaggtcacgtccaaacagactgtactatgccaagaactgttgagttcaagcaatgttacaactgtggtgaaaccggtcacgtcagaagcgaatgtaccgttcaacgttgtttcaactgtaacggaaccggtcacatctccagagagtgccctgaaccaaagaaggctagcggtagattctccaaggtttcatgctataaatgtggtggtccaaaccatatggctaaggactgtatgaaggaagacggtggtaacggtttgaaatgttacacttgtggtcaagccggccatatgtctagagactgccaaaacgacaagctttgttacaactgtaacgaaactggccatatctcaaaagaatgtccaaaggcttag

SEQ ID NO: 2111 - DNA, 1269 bp, Saccharomyces pastorianus
atgtcatccggtgggactattgatattgttaaccagaaaaccataacttccgaggtagctgcttcggtaacatcgaaatacctggaaagtacgctttcgaagaataacacaagtgatattgaggatgaaaggtttattcacgtcagttcacgttcccattcaaggtttacttccacccctgtaacccccaacgaggttctttctctgaaatttcatgcttcaggctcatcaatggcatacagtagaatggacggctctttgacggtttggttcatcaaagacgcaagtttcgataagtctgtcaaggtttatattccagactgttgtggatctgataaactggccactgatctgtcttggaaccctacttccttgaatcaaatggccattgtgagtaattcatcagagatatccttactgctgatcaatgagataacactgaaagcatctaaattaagaacactatcattaggaagcaaaaccaaagtcaacagctgcctttatgatcctttaggaaattggttactagctgcaaccaaatcggaaaaaatatatctatttaacgttaaggaagaccatcgtcttgttcattctttgaatgttagcgacataagccctaatcctaacgacgttgtatattccatagcatggaataataatggaagtcacatttttgttggctttaagagtggtcatttgatcattttgaaagtaagagacgaaatgctagaaatatctaccaagatcaaagcacatactagttccattactggtatcaaaatagatccgtggggaagatactttgtcactggtagcagtgatgggagctgttatatttggagcctaaagtcactatgttgcgagagaataattcaagatttagactctgccgtagtagcactagacgtgtgtcatttgggtaaaatattaggaatttgtacagaggatgaaatggtgtatttttacgatctcaacgaagctaaactactcgaatccaaatctttagccaaccacaaatctgacctagttttgaaattttatcccgataaatcatggtacattttgtcaggcaagaatgacacattatcaaaccattttgtaaagagcgacaaaaatctaataacatactggaaagatatgtttgatagctcaataattgaaaaacgcaggaagaacaataacagcagtaacaaccacagcaaaagagtcataaaaaatagcgatagaatcgtcaaagacaggccgagtagattcaattctagaaaatag

SEQ ID NO: 2112 - DNA, 840 bp, Saccharomyces pastorianus
atgaaggcaaacttaatgttaaagagaaggctggctactgcaacagccaattccgccttgcccaagatcaaagtcggaatattactatcaagaatccccataattataccaaaaataaatgaactggaaaaacactactacgaataccaatcaaaactggaaaaaagattgatgtggacatttccagcatatttctatttcaagaagggtactgtagcggaacataaatttttatcccaacaaaatgggcccatttctaagaaaggtggtatttggtttcctaaaggtataccggacatcaagcatggcagagaaagaagtaccaagcaggaagttaatctgcctagtagcaatacagcgaaatccgccatagataaaaaagagcataacaaggacgatgttaacagacccgtcattccaaacgataaaataacggaagctgataaatcaaatgatactaagagcctcgaaagacaattaagcagaactttatatcttttagtaaaagataccgaaggtgtttggaaattcccaaactttgacttatctgacgactcaaagcccttacacatcaacgcggaggatggattgagatcgttaggcggtgatcagatacacacttggtccgtttctgctacccccatcggtgttttgaaggacgaccagaatagctcagcagagtttattgtgaaatctcacattttggcagggaagttcgatttgacagccgacaagaatgacacatttaaagactatgcttggttgacaaaggatgaaataaatgaatgcgttccaaaagaatactttagccaaaccgggttccttttagcggataattga

SEQ ID NO: 2113 - DNA, 1740 bp, Saccharomyces pastorianus
atgcagcaggacgacgattttcaaacttttgtagctaccttggaatcattcaaagatttaaaatctggtatttcaggttctcgtattaagaaactaaccacttacgcacttgatcacattgatatcgaatcaaaaatcatatctctgataatagactactcaagactttgccccgactctcataaattaggttctttatatatcattgattcaataggtagagcttacttggacgaaacaagatcaacgaacacgacaagtgcaaacaacaagtccggcacttgtacccatgccataaacacactaggcgaagtaatccaagaactgctatccgatgctatcgcaaagagcaatcaagaccacaaggaaaaaatccgtatgcttttggacatttgggatagatccggcttgtttcaaaagagttatttgaatgccatcaggtcgaaatgttttgccatggacataacaaataacaccaccgctcccccacaacagttgtcatcggaccccaggcagaggtcgaaacagattttgtcgaatttaaaggcaactcctcccttaaacttgaccataaatgtaccaacgagtttaacttccacagatccagctaaacaacaagccgctttattccaactaatagctgccttgcaacagcacttcaatccttcttcttcctcttcttcgtctgcgcccacgaccgttgttccgccatcggaaacacatacaattactgagtacggtagcagacgtgaacgtgaaagagaaagagaaagatacagctccaggaggaatagatcgagatcccctcctccacctcttccccaaccatccgccgctagaaaggaccgctacccatctgtagctcaggaccaatacagtataggcgccccaaatacgacctttggcacaaacaaccatcatttatacccggatgaacttaacgtttccaacaaccctcattatagacccaaacccgtgagctacgactccacattgccaccagatcatatcaaagtgtacagtcgtaccttgttcatcggcggtgtcccacaaaatatgaaagaatgggatttggccaacgtcttaaggcccttcgctgaagtgcaaagcgttattttgaacaattccaggaaacatgcctttgtcaaagtttattcaagacacgaagctgagaacgtcttgcaacattttaataaagatggtgctttgccgttaagaactagatggggggtcggttttggcccaagagactgttgtgattaccagcacggttacagcatcattcccatgcacaggctcacggatgctgataaaaagtggtctgtaagtgcccaatgggggggtacttccggtcaacctctagttactggtattgtattcgaagagcctgatatcatcgtgggcgaaggtgtctcttccaaggcaatctctcaaaagatgcccaccgattccggcagaaacggtcctcgttccgggaaacctaataaatcaggaagcatatcttcattatctcctgtaccttacggcaatgcctccttagcgtctcctccaccacaacaatacgcgcaacctataatgcagcaaccatacggttacccccctacccaaccacttccaccacaaggacctccaccagccgctgtccccgttccccagcaacagcaatttgatcccactgctcagctgaattctttgatgaatatgctaaaccaacaacagcaacaacaacaacaaagctaa

SEQ ID NO: 2114 - DNA, 1248 bp, Saccharomyces pastorianus
atgcctgtgaaaagatctatttccgaaattgaaattcaaagtgttcaagatcatccttccgttgctgtaggtagtttcttcaaaggtttccgtgcccccagtgagacctcgttcgagttatacaaaaacaagaaatctagcaacgacgagtttgtgttgcatggtgagaacgaaaggctagagtacgaaggttcgactgatcccggctctcaagcctccaatcaatatctcgtgggtctatataatccggaaaagaagagtattcaactttacaaggctccagttttggtatccaaagttatctccaagtcaagtaaaaacctaagaggcccaaagattaagagcaagagtgatacacgtccatctgctttgaggaacgccttaggtgaggcatttggtaccaaaaaggctaaaaaggcaattgctgatttggaaagaaatcgtattgattctgacaaattgaccgattccgctattgacattgtcgattccgtgagaactgcatccaaagatctgcccacaagagctcaattggatgaaattacctctaacgatagaccaactccattggccaatatcgatgctactgatgtagaacaaatttacccaattgaaagtataataccaaagagagaattgcaatttatccgtgtttcaccaatcttgaaggagtctgataaagaaaagaaattggaaatgttcccatatcaaaacaattccaagtacgtggcaaagaaattggactctttaacacagccttcacaaatggccaagttgcaacttttatactacttatccctgttattgggtgtatacgacaatagacgagtgaacaataagaccaagctactagagagattaaatagcccacctgaaattttagtggacggcatcttgagcagattcactgtgatcagacctggtcaatttggtagatccaaagatcgctcttatttcattgacccacaaaatgaagacaaaattttatgctatatcctagcaatcattttgcacttggacaacttcatcgttgaaatcactccattagcacatgagctcaatttgaaaccttctaaggtcgtcagcttgtttagagtactcggtgccgttgtcaaaggtgctacagtggcccaagcagaagcctttagtattccaaaaagtactgctgcctcttataagattgccactatgaaggtaccattcaagttacctgaaatgaccagaagaggaagaggtccaagacgttag

SEQ ID NO: 2115 - DNA, 534 bp, Saccharomyces pastorianus
atggggtcaggcgatttgaatttgttgaagtcatggaatcccaaacttatgaaaaacaggaagaaggtctgggagaccgagcaggacctggttaacgagcagcagaagctaaacacccggttgaaggagattgaaaaggagcgtgagctgaatgagctgctacacgcatcgaacaaggaccagccggatgctctcaagactgatttgacgctaaagaagtccggtttggaatggatgtatcaggacgcaaaactgaacgatgaaaaggaggactatttattaggtaaaaagaaactagattcatctatactaaagcagcctgcggccgcaaccgaaaaagctaccgaaagggctgccgctgctgcagccgcacccaagaattcacacaggaaaggctcaacgctgcacagagacgacccaatgagcaagttcaagataacaaagcaacacaggagaacccacaatgcagtaaaggcggcaccgcttcagcgcgggaaaccaccgcccagacctgccgcagacctggactactaa

SEQ ID NO: 2116 - DNA, 327 bp, Saccharomyces pastorianus
atgtccattgagaatctgaaatcatttgatcccttcgccgacacaggagacgacgaaaccgccacttcaaactatattcatattcgtatccagcagagaaatggtagaaagactttaactacagtgcagggtgtgcccgcagagtacgacctgaagagaattctgaaggtgcttaagaaagactttgcgtgtaacggtaacatcgtcaaggaccctgaaatgggtgagattatccagctgcagggtgaccagagagcaaaagtgtgcgagttcatgatcgcccagctcgggttgcaaaagaagaacatcaagattcatgggttttga

SEQ ID NO: 2117 - DNA, 2892 bp, Saccharomyces pastorianus
atgtctagaatagactcagatctgcagaaggcgctgaagaaggcgtgctccgtcgaggagagtgcgcccaagagaaagcacgtacgcgcgtgcatagtgtacacgtgggaccatcagtcggccaaagccgtgttcacgacgctcaagacgctgccgctggccagcgacgaggtgcagctgttcaagatgctgatggtgttgcacaaggtcatccaggggggccacccgtccgcgctggccgaggccatccgtgatagggagtggatccggtcgctgggcagggtgcacccgggcgggtcgtcctacagcaagctgatccgggagtacgtgcggtacctggtcttaaagttggacttccacgcgcaccatcgcgggttcaacaacgggacgtttgagtacgaggaatacgtgtcgctggtctcggtctccgacccggacgaagggtatgaaacgatcctggacttgatgtcgctgcaggactcgctcgatgagttctcgcagatcatctttgcctcgattcagtccgcgaggaggaacacggaatgtaagatatccgccctgatcccgctgatttcggagtcgtacggtatttacaagttcgtcacctcgatgctgagggccatgcacaggcaattgaacgatccggagggcgatgccgcgttacagcccttaaaggagcggtacgagctgcaacacgcgaggatgtttgagttttacgcggattgttcctccatcaagtacctaaccacgctcgtgaccatcccaaagcttcctgtggacgccccggacgtgttcatgatcaacgatgtggacgaatcgaaggaaatcaagtttcaaaaaagggaatccaccccgactccggctcggactccgactccgacgcctcctatgatggagccgtcgctgtccccccgtccggtgtctagcaggaccaccagcacgcccctgggccaattgcagaccatgcagaccggagccacagcggcaatgatgatccccaccgtgactggtgcggccaacgccatcttctcgcaaacgacggcccaaatgcagcccgatttctgggtcaaccagcaggcccagtttgccaacgagcaaaaccgtctcgaacaagagcgtttgcagcaattgcgggaacaacaagcgcagcaggagatgttccagcagcaactgcagaagtcgcaacaggatatgatgaatatgcatttacaagagcagaaccaacaccaaaacgacttaatcgccctcaccagccagtatgaaaaggatcaggcgatgttggagcaatacgaccaaagagtgcagcaactggagggcgaaatcgtgacgatgaactcgaacgcttctaaacaactagccaacaaagacgagcagctatccgctctacaggaccaactggacgtttgggaaagaaaatacgactctttggccaagctgtactcccaattgcgtcaagagcatctaagtctcttgccccgtttcaaaaaactgcaattgaaagtcaatagcgcacaagaatccatccagaaaaaggaacaactagagcaaaggctgaagcaaaaggatttgcagctagccgagctggttaaggaccgtgacagagcaagattagaactggaaagatccaccaataacgcagaggccagcactgcagcggccgcagcggccgcggaaacactttccaccgacaagatgaaccctatcttagatgccatattagaaagcggaatcaacaccatccaggaatcggtgtacaacctcgattctcccttgagttggtccggtccactgacccctccgactttccttttgtctttgttggaaagcgcttctgaaaacgccacggaatttgctacaagcttcaacaacttgatagtggacggcctcatcaacggcgagcagacagaagtcatacgctgtgtgagtgatttcagcacttcgatggcgacactagtgaccaactccaaggcctatgccgtgaccacattaccacaggaacaatcagaccaaattttgatcttggtaaagagatgcgctagagaagcacagtatttcttcgaggacttgatgtctgaacacctgaatcaacttgacgatgaggagaaaacggatattgtcattaatgccaatgtcgacatgcaagagaagctgcaagaactttcattggccattgaaccgctgttgaacatgaaatccgtcaaatcaaacaaagaaacaaacccacattcagaattggttgctactgctgacaaaattgtcaagtcttcgcaacatttacgtgttgacgtccccaaacctttgttatcgttggcactattgattattgatgctgtggttgctttggttaaagctgctattcagtgtcaaaacgaaatcgccaccacaacaagtgttccgctaaaccagttctacttgaaaaatagcaggtggacagaaggtttaatctccgcagcaaaggctgtggccaacgctaccaatgttttgatctctactgcaagcaaattagtcacatctgaaggtaacgagaacacgtcacctgaacaattcatcgttgcctccaaagaagtggcagcctctacaatccaattggtagcagcatcgagagtcaagacttccatccattccaaagctcaagacaaacttgaacactgttccaaggacgtcacggatgcatgcaagggcttgggtaaccatgtcatgagcttgatcgaaaacgatcaatccaaggcacagcaacagcaacctttggaattctcgtccgaacacacattgaagactgccgagatggaacagcaggtggatattttgaagttggagcaatctttgagtaatgccagaaagaggttgggcgaaattagaaggcacgcttactacaaccaggacgatgattaa

SEQ ID NO: 2118 - DNA, 1371 bp, Saccharomyces pastorianus
atgtacaaaaagaatacgagaacaacttgtgggtcttctacaattgcaggtgtttgtttgttagtatgttttctcattgaagaagtccgcggtgatatgggcaatgatatgggcatggatgatacttctgagtatactagcccagatatagtagacgccgggtccaaaacttttcactggctatgcacgctagggtttctgctgcttctgccatctgtgattacttgtctttcattcgctggcaaaatatatattgctacttccctgcaatgtatttgtgccgtctacgcctttttagaggctgctgtccttagattccacgataatgacggggtagaaaatagaacttcaagggggactgcgtggtttttggcaggactgacttggatcgccctattctctggtggacttgccggagggaccagcttcttggtgagaagcaagaagttgcaaactttcatctcaaatacaggcgagacaaggttatcgtatatccatcgtggtttatcctttttgactgtcatcacaggctgggttaaggtatgtttggcaccagtcgctttgttcgggttctgtagagaggcgcacacggggcagtgtattgctcacggtatcatggggtctgcgtttgtattatacgggttcatttatgtgcttgtattgaccattccgtggattcgtaacgctcaggcttcatattcacaagactatattgacagttgggtaatgtgcgcatggggtattgttaacaccttcaccgaacatagatggggacgcgaagaatggagtgtccatgattaccagcatacatttatgggaattatctggtgggctggcggtatacttggaatttttctttctagaaagggtagaagaacattcgtacctagtttaatcattatcttcactggatgggcaatgtctcagcatgctcagcacttgataattagtacaaaagtccataatatgtttggcctgcttttaatgtgtggaggtgctctgaggataatagaaatatccttcctcataaaagataagagaacactgggaaacgtacattcgtttcaatatcttgctcccctttgtctagtatgttcaggtcttttatttatgggcgcgaatgaagaacaattgattttggtattaagacttggtggagatcatagtgcctatgttttattaattctatcaggtgcatttttagtctatttttggatgattacatgcctggagttctacctatatctggtcgaaaaaggacagcaaggcttccttccaaaatcctacgagcttcaagaggaaaacaatcgggttagcttcgagttagataatatttcagacaacgaagatgctggctctttcaatgtctga

SEQ ID NO: 2119 - DNA, 1269 bp, Saccharomyces pastorianus
atgacaggtgacagagaagtttttttgcagttggtgctcaacaatgtcaggactaagaagaacgttccctatgctgaatcgatgatgtatgacgtacccttaccttactacaatggcagtcgcatggagcacctcgagtacttgaggattaacgatagagcagggtcccatgaccattcgatacgaagcgggatgtcgtccaaacatcccgggagcgagtttatgccacagtccattttcgatactgaaagtagtatataccaggaagaaggagatgactctacggagaagtatgatttcaaagtaaatgaaagagatgtagtgctactccaaatgtcatgggacatcctcctcaaagagtatttaactcccgaggaactaaaagtgtttcacacactattatattcaaacaagaacataaattcgacagaaagaccgtatctgaatactaattttgaaggcttaatttccaaaacttcagatcccaccgtcaaatcaagtaaaatcaaaaagagagacaacgatgacaaggttgataccgcgctattttgttcacaattttatgataatctgattgccatggacccattactagaagattatttcccatctttgagacaccaggcagtttcattttgtaaagtccttaattctgctgtcgacaaccttgaagatgtacatgtcttagacagttatattgtaaaactaggaaagcggcattctagaattctcggtatcaaaactgttggttttgaagttatgggtatggcatttatgacaacgttacaagacagattcggatcttttttcacattagagcttaagaatctctggggtcaactttactcttacatggcgaattgtatgatcaaagcggggaaagacccaatggaaaagactaagagctgcgctccaggtcaagatgtttcaaccgttttaaaattaccggttgccaagcttacaacgcatgatacgagtgctatcaacgagctgcatttggtcaagactaaaaatgccactaggcctaacaatataacacaagtaccaaagaacaaacccaatccggaaatagtcatagaaacacttccaaccgcagaaaggaaagatcgtacaggatcatcatcaatctcaccgaagggttccgaaagcacgaagcctagagtcagtagcagcagtgtcgtggagagcagcatcaaaaacagtagttatgagaaaagaattcgcgtaatccaaaaaacagctcagcaaaagaactgttcgatcatgtaa

SEQ ID NO: 2120 - DNA, 2697 bp, Saccharomyces pastorianus
atgccggatagtgtttcagactcaaaatcattggagctgctcaactcttctttttactcatcgaactcaataaacacactcgatcatgctagaacttttagaaattcgttgattttaaaagagatgtcagatcaaagtttaaattcgtcaataaagccaaatgaatcgttttctggtgcaactgaagggagctctgttttgcagcactcatttaaagaaggcttaaccggagactcagaggtgcaaactgttaatatgacaacctcaccctcattaagtgcattggctgatattttaaatgaaaggtcaaaatatgctgatcaaaaaactagaaacgcacaaaatatcgaatcgtctataatcgaagaggaagaggatagcaaagagcaagacaatatgtataaccataaccacaatgtaagcggatccagactcggtataccagaggaggcaagaggaagcctagcaacatcttcacctaatcttattgatattaatggtttcaataatatccaagctgctccttccagctcacactcattcgaagaaccggactttttatctactcccaaggtgaaatcagattttcataagccggtaaagaaagttcatattcaacctacaatcgtagagcaagagaatagtccgccaaccaaacttgaaaatgaaagcacagttcatgcagaaattggaaaatccacacaaaatatacgaccattaaatgaaagttcaaaaccattgcctactccaaagaaactgaaaaacactaaagtacgttcaaaaaaacctcaaccacgaaaatataccgattcatcagcacagagaaccacttcagcaggatctgttcttgaagatacatctgtgcataaaaaaaaaaagagtttcttttctttccttaaaaaaaaagaaccgaaagctacggtcaataacaataacgatatattaaatgggagaagtagaatgtcatcatcgaacaccttttcaatgaaaaatcaacatcccatgaaaacgcctgaaaaactcaaaaaaaaatcgcatagtagtagtagtatttttaattctttcctcaaagggaaaaatgacgcatcagattcacctggaagggaatcaataaggcacaaaaaacacactgaaaaacctgatgaaacaatgcaagacttagaactaacagttgataccaattcgatatcgtctattgaatctcctattttacgaaaaaactttgacgatgctcctgtgaaagcagatattgtaacaaaaccaattgaccaaaggaagctcactcccttaaatatggatattttactgggaaatgaagaacgggagaaaggtgccgcacagaaacaacaaagctcagacagtgttgctagtgatgatgttttaatgccgtccaaggacaactttttgtccttgaactacgaagctccctcaccagcattttcaaagcatgatacaggtgaagttcttttccccaaatttcttgatagtcacgaagtcgactcgatcgtttccttagaaagaacaaggtctacaaagtctaacaagagaagttcaatgaattcacaaagaagatcgctaacagacacattatcgattaaagcacaaagtgaggggatgttcattactgaggcatcttcagttgtattatctaccccagatttaacaaaatcacctgctagtagcattttgaagagtggaaggtttgaatgccaggacagcttttctagggagttttcatacgaagggaacacaaacgaagatcataatgctttcttaaatataaggaatgataataatttatcgaaaaataacgacgtatttttgaattctattgagcaaaaatttgaccaattggtgatggcttctgatgaagagaaaactgaagttgaaaaagatataccgaaagcaaaaatatcgcctgtgaagagtatttccgaaagtcaggatctgtatgtagacgatgatagtgagttgatttctgatataatggaatttgcgagttttattaattttggcgacgatgacatcagtttagatttagatttgggaaccacagaagctccgtataatcctggaaagcctacattactggacaataaaaatgtgagcagtcctgctacgtttgatacaagaaataaccaagagcctactcgcgtgacaagagaaccacagccacatattgctgaagaagaacgatttgctatgtacgaagatgaccaccgagaccagtcagccatctatcaacaagacgacggaataatagacgataacgactttgaagatgcggatttcaataatcatacggacgcacctgtagaggttacgcccagaatcaatgcatatctaccagaatttgaagccaataggcccgtttctatgtctttcaaaggtctgaaagctccaagaatgaactcttcttttattgattccatgacacctaattcacctgcgaaatcagatataacaagtattagtgaaacgaatgctaaagacaatactgacgaaggggttaggttttcgtcacagataattctttacgatacctacggggaatttgaatatgataggcacccagaggtttccacctgtaaccaactaactccgcaattggctcaaatgatcaaattagagttgaatgaattaaagagcgtaatggaggtgcacgacgattcaagatgttacacacacttctattaa

SEQ ID NO: 2121 - DNA, 1125 bp, Saccharomyces pastorianus
atgaaaagtttaagaacattatgtgaaatctcgttgatgagaaatcactccaatatacaatctgtcagtaatgttccctaccatctgctaaaaaaaatactgcaaaaagtcaaaataccgcagctgttgaaactagagaaaagcaacgttttgttgatatttgatgacgatgatctatggctagaaatgctgaagcaagattttccgaccaatgtgcaggaacaatttgtatccaaaagagattccatttgcaaatattatatcactttcataaaggagaatgacatacaactttaccactcggatcaagacctaataaaactctgtatacgacagtcggtggtcaaagacccccggaacaacaagtaccgcataccctacagaatgttatactcgaagtaccagcaggatgtggaaaagaaacaagaagaaagcgcagagaggctgcgatcagaaatgctgaaactaaaacaagaaagagagaaaaagcaaactgtagtagtagaccatactgtttacttccaaagaagaaaccccaggaagaccacgaggtcggacagcgaaccccactcgcaactgtacatgaaatcattgagagatcacgaatccagactaaagcatttcaaagacggcgggttcaacattgcgaaaaggcatgcacagcgtgtagcgtttggcgggaaagctggcggacagccatcgtctccaaagaaggatgcaacgttgtccaggccggaacccgtcaaaacagaccgagaaggggacggtcctacagaagagaagaaagacgctctagttcccgccgcaccgatcaagaagagaaggttcgaattaccgtcgatctttctcaaccgaaaaaaacccgcactacccagggtggcgaccaagatcaacactgcacttcctcgtcccgctccagcatcgattaccaatgatcaccatccccacacaaacaccgcttcctcctctacgtcaactgccaccgctaataccgtgccgaaaggccacaagaagaagaaatcgggcatcttcgtacaaaatgccggtcctgccggaaatactacgccgcacgtgaccgccaacatgcccgctacccggccgtatatccacgatccgcggaaatag

SEQ ID NO: 2122 - DNA, 1749 bp, Saccharomyces pastorianus
atgaccgattttgatctaatgaattttccattcaacgagcatttagactctcctgtttccgatgacactggggagagggacgaacagcagatcccacaaaactggcttaacgagaaccatgttgggaagtctattttgcctttgttcgttaaccctgacgatgttatcaagcgcaacttctccaatgttagagattcttctgaagaaaataaaccaccatctatggatcgcatgaactacgccaggaatacaaatcttcaagaatctcccggattacaagaaagatcacacaatggacgacatcgttccaccaaagtaaccgaaagtcacaaaggagatgtaccgaattttatccattccaccccaagggaagactcttctgcgaagcatttcacgaaagcgaatgagcgtggttcttctcaaacgtccaatgaaaatttatcgcctgacctctccatagaagactgtaacggtgcaactgttccattacaagcttctctatcaaaggaagatcttcagattttggaaagcgttatactcggataccaaaagaggattattgaattaggcaaagagaatttagaaaaagaggaaagatcaaactctttacaaagagaactagatatcgccaagaaattcagtgacaagaactcaaacaatgaaaaaaaactcgaagaaaaaacagtaatgattgaaaatataacggaagagttctcacatacgaaggagttactagaaaaggctaaagatactattcgaacaaaacaaactgcactattgagtcttactgactctcttcgaaatgttgaattgttcacaataccaatcggtatattattttttgaactatatgactctgaggacgcatccttgaatttggatggactattacgggaaaaatatcctaatatcataggatttttacgacagtcacatttagatgagcaaaatcgtatgtcacaacgtttagaaaacgcaaaatcggaaaatagcgatctccaaaatgaattagaaaacaaaaaatcagaaattcaagccataagagaaaaaaataataatttacttggtacaaataagaccctatccaagcaaaataaagttctgtgcgataaatttgagaaattaagcaatgacgaaaaggaaatgttaaaaggttgcaacgaagaaataaaaactaagctagaaagtttaaatgaaagactgggatcatgggagagaaacaaagaaagctatgaggcagcactgaaagataaggaccaaacgataggggagtttgagaagaagacaaatagcatgtcaaaagaactgacccatttaaagtcacgtttgggtaacttagagggaaatacttctgaaaggattactataaaagagattctacaatcaaggtcagatatttctgttgaagaatgtaatcttcttatgatcgaacagattgattcagcatgtctaacagacttacaaaatattgtcaaagaaatcgtacttgctattggaattccctactccaaattacggagaaaaatccccttattagcaattaaactgaaatatgaaagtatattactgtccaactttgcccaacgccttcatagacagatatataatcaagaaatgaatctaaaaaagtttacggatcaggcatactatgaattcatgactacacgtaggattgacaccatagatcaccatttggagagatgcctggatcatctgtatgattatatcttggaaaagatggtcaggtaa

SEQ ID NO: 2123 - DNA, 2289 bp, Saccharomyces pastorianus
atggcgaaaagacacagccattatcaaggaagtagaggcaggcatgcacgtggtggtagtaattccaagagaggtggcaagggaaatgctaaaggtccttcaacgggcaggaacacaaagaaaaagtcagttcctacaaataattggcacaactcgtctgttccactgggaggaggggaccttgctgacctaggtgcggatttcaacccggggagagcgttaatatcttctaagaccatagaggactattattttggtcgcgatgccaagagtcggtctatgagaatgggtggcatgagaccaggccaccgtaatgactcttcaaacaatttacaggaaggcaaagcaacctttcgcaaaagacccatggaatttgtcaaagctaaagaagtctacgatccatctcatgatatggttcaaaaactccaggaaaaaagtcttgctgctcataacagggacctcgctgacacgaaagcaccagctgatgaagaaactacagagcaggtttacaccgcccaagacgtaggcaatgaatacatcagaagcgaagatgatgaaagcccgatatcaccaccgtctttgtcctcactctcctcttccacttctgagattaaagacaccgaacttttctttgtagatgaagaaggccaaaaacgactagattcaaataaaataaaacgggtccgtattgaagaggttctaaaacccaaggaaatcgcagtagagttcaatcctatcttaacaatcggaaaggttgaacttaatgttgcagaaggtgacgaaaatgaagatgttggagttgatgttcctaataaaggtagtaagacatatcacccatttgctgattacatttcaggtgtgatgcaaaatatggaaaacaacgattcaagcgatgatgaacttgcttatgagatagaaactgaaaacagtagcgacgctcagtacgaacgttttgacgatagtgacgtcgaagacgaatcttattttgacgattactatttgaatgctccaaatgatgttagtcttttaccaagtcccagcccgcaattaactcaagatataaaatccctttcgatcaacggcaataaagcgcctgaagaccaagatggcaatgtacaatcacctgtgagtgatgaagtagagttcggattcaaagaagaagactttgttataaatacaaatgacatagtggtcactaatattaggatgggtggagccgataattcatactacttgcaatgttatcgattactgggagattacgattttcattggattgatcaggacctgcttgctgatttcattatagatgacttgggtcttcctgaatatagattatccgcatatttgaattttgtcaaaaactctcttataccaaaagttgaaccacctgagccaacctactctgatatccaaatttccgattccagtgacgaagaagacaaatatgatgaagatttagactcttcaattgtatatagtgatatggaagaggggttgaacgatcttattgcatacacattgaagcatgaccttgatagatccaggacttttgaaagcaagtctttggaaactaagggtaaaggcaagaagaagaagctactgatagatgaatcattggcattggatacagaaacaatgatcacactacaaaataaactaagcaagcgtctagaaaacaaggcaaagaagagaaaagacaaggaggactttattgataaagagaataagaattcagatgatctgttcaagaaatacccatacggtttccatgttcagaatataagggacgaatttgagttatttttgtcaagaaacaaagacaggctcacctttcctccattagatcctcatggaaacaaaacagttatgaaacttgccaaacactataacatgaagacttcaaaaattgggaaagctaatcacacatctgtagtggtcgaaaaagtaaaaaaaacaaaatggtccaccccaagtcataaccttattgaccaattgttaaggcagagaccagtatttatgagaatcgatgtgaaaaggccaagagaagaacaagctgtgtttgaaagaaccaaaacgatcagaggaaaattccaaatcaaagaaggcgagattgttgggaaagacgccccagaaattgggaacgaaaatattggcagaagaatgctggaaaaacttggttggagaagtggagagggtctcggtattcaaggtaataagggtattagcgagcctatctttgccaaaatcaaaaagagcagatcgggtttgaggcacagcgacaattag

SEQ ID NO: 2124 - DNA, 621 bp, Saccharomyces pastorianus
atgtctaatcatcgcaatccaaacttgaaattttgcacagtttgtgcgtcaaacaataatcgttcaatggaatcgcataaagtcctgcaagaagcaggctataatgttagttcttacggaacaggttcagcagtgagactgcctggtctgtcgatagataaacccaacgtgtactcatttggtacaccctataatgatatatataatgatcttttatcacaatctgcagaccgttataaatcgaacggtttattacaaatgctagaccgtaatagaaggctcaaaaaggccccagaaaaatggcaagaaagcacaaaagtctttgattttgtttttacttgcgaagaaagatgttttgatgccgtttgtgaagacttgatgaatagagggggtaaattaaacaaaatagttcatgtcattaatgttgacataaaagatgatgatgaaaatgccaaaattggtagtaaagccatactggagttagctgacatgttcaatgacaaaatagaggagtgcgaaaaaaacgatataccattcgaagattgtataatggacattttaaccgagtggcaaagcggacatccccaactaccgtcattgtatgctccatcatactattga

SEQ ID NO: 2125 - DNA, 2613 bp, Saccharomyces pastorianus
atgagtgaaagactccctaaacagagtggtggaaagaaaccgctaaacaaaaatcagttattaaagagaaatcgtataagaaatgctaggtctattagagcagaagcagtggcggcttcttcctcaaaacacgcatcaccaagtgatttgagtgagtcgggcggtaagctaaaggtggaccaattcatgaactctcgacaattcgaggttaagcagctgcagttggccatgcacaattccaaaggtgcaagctcaacgagaatattccaagcactgccccgtaaactgcgtcgtaggacagcctctcataatgtccgtaggatcccgaaaagaatgcgtaatagggctttaagagaaatgcgtaagagtgatcagcagcaaactttgaagaactcttcggcctcctctaggaaaactcatggcttgaacgcgaaacaattgtatcgagctaagatgtccataaaactactacgattggctagtaaatctacttctatgaagcttggcatgccattagatatcacttcatcaaagtgccatgtgagacaaaagattaaatcactaaaacgtatgatcaaagaatcatcaaatccgaattcgaatataataagactcaataatcgtatgggaagttatgatactaccggccttaatgaattggcatccactccaaagggtagaatcaaatacacgaagagacaaaagcattttgcttggctacccactcacatttggaatgctaaaaggtctcatatgataaaaagatgggggtaccaagtgccatgggcccctacccaaaaatgtttcaaattgactcacagattgggtggtgacacttgcgcctctgatggtgctttatgtcttgattcaagtcatatcggtacaattgttgttagagatagcaatagcgacactaaaggtgagtttttgaagtcaatcattggtaaactaactagtggaagagcaagcttaaacaaataccgccgatctcaaaccttgtttcaagggctgatttacagtttcagtgaaaactcccccaggccactgggaccatgtgatatattctggattcaagacgatactgtggttttaagattacatccttcaattttcacgcaggtctttgaaatctttatacaatacattgataagttaactattcaagattgtcgatactcactggctagtataactttaaagggagccaaagctttagaatctttagcttcctgcttaagaagcaccaagcactgcacatccttcgagcaatttaaagatacatcaaagataactgaccatgcaattttgccacagagatgtacatttgcatttgaagccattgatccacgccatttggctgccccaaaaaaattaaatgattcccagaggaagacatatagctctgatgacattttatcattacaggtaaactaccctcaaagtgaaataaattctgttttaaagcaattatgtgacccagactcacgtacacgatcatacaacaatcaaaacactctaaaagaaatttctgcaagacgttccgaactgttggcctctacaccaaaccacattaacaaaacaacgatcccgtttaaggagaatagtgatccctccatcccgctagttataatgagaaggcccaagacaagcgattggatcgtcatgctgccatggttttggctactaccactatggcaccaactgaacaggataccgagagtttatcacattggtctaaggcagttccaacaaattcagtacgaaaacgaacaactctattttccagatgattatccattcacacagttaggttatgtagaaaattctttttataaaagagaagcctcaaaaacaaagtgggataggaagccaaaggggaaaaaaatcaactttgaaagggttaaggatatacatcacactcaactccctgcatacaagggtgagatcggtgattttttcagctcagattggcgatttttacagatcttgaaaaacggactagactatttacagtgtgatgataaggacttgaagttgatggatagtaagaagactggtcaatttggcgatcaaggaataagaattattaactgtctgaatgatgttttagaatttcacaaggactatgaaactaaggtaacagctgaaccattgccagtcgaggagaacgtacccataacgttatgtaaactttcaaaatgtcaaacacctcctaaaacaattaactccaacacttcttcattagatctatcaatccagccgcgttgtacgattgccatatcttgcagattcttggaacgaggccatcccaaggacaacgctagaatatatcgaatttcagaagagcacttagatcattggatgcaggtggctgagggagtctatcgttccaatggaagaaaagatcacgatctagagattccgctaccagaagtacatgacttgattggatttatcaccagcggcacgtaccatttgaactctggaaacggtatggggattggattcatagaccaccattctgccatccaacagtctgctcgatatgttctcattagaaacgtggggaccaatatctatagattagcaaaatggtcggaaatatctgtatga

SEQ ID NO: 2126 - DNA, 1668 bp, Saccharomyces pastorianus
atgaattgcaaggcggtatccattagtttgttgctactgttgtttgtaacaagagtatatattcaacccacgttttccctgatttcagattgtgatgaaacattcaattattgggaaccactgaatttgttggtacgtggatttggcaagcaaacctgggaatactctcccgaatactctattagatcatgggcgttccttttacctttttatggtattctttatcctatagataaatttactgaactggaaagccactggaacttttttattacaagggcatgtttaggcttttttagtttcatcgtggaattcaaattgcaccgtgaaattgcaagcactttggcattgcagattgcgaacacctggattattttccaattatttaatccaggttggttccatgcatctgtcgaattgttgccatctgctgttgccatgttgttgtatgtaagtgccactacacactctttgcgctatctatcgaccggttctgcttcgaattttacaaaaagtttagcatacaacttcttggccagtatacttggttggccgtttgtcttagtcttgagtgtcccattatgcttacattaccttttccatcatagaataatttctaccattagaacagccttcgattgtagtttaattttttcattaactgccttcgctgtcattgctactgatactatcttttacggaaagcttgctcctgtgtcatggaacatcttattttataatgtcattaatgcaagtgaagaagccggtccgaatattttcggtgttgaaccatggtactactatccattaaatttgattttgaatttcccattgcccgttttacttttagctatcctaggaattttccatttaaggttatggccattatgggcttccttattcgcatggattgcgatctttattcaacagcctcacaaagaagaaagatttctttatccagtttacggtttgataactttgagtgcaagtatagctttctacaaatttttaagttttttcaataagaaaactgttttgaagaagggaataagactatcagtattattgatcgttgcaattcaaggcatgtcacgtattgtcgccttggttaataattatacagctcccttagccgtttatgaacagctctcttccctcaatcaaggtggcgtaaaatcaccagtagtgaacgtatgtactggccgtgaatggtatcactttccaaattccttccttttgccagataaccataggctaaaatttgttaaatctgggttcgatggtcttttgcctggtgatttcccagaaaagggctctattttcaaaaagattagatccgtgccaaagggaatgaacaataaaaacatttacgatgttggcaaggaatggcctcttgctaaatgtgattattttgttgacattgtagcaccaatagacttaaccaaagatgttttcaacccattacatcttacagacaactggaataaactagcatgtgctgcattcattgatgcagaaaattctaagattttaggcagggcgtattatgtaccagaattcatcaaccaaattatgcaaacagttttaccaaaacagtggaatcaagtctatggtgttcgttacattgattattgtttgtttgaaaaaccaaccgaaactatcaactga

SEQ ID NO: 2127 - DNA, 978 bp, Saccharomyces pastorianus
atggatagcaaacgtaaaaaacaggccattacgggtagcacagtattgatttttttggttgcatgctgtctttatacattatatatcttaaaattcgagaatcctaatgtaatcccaccagctcttttgctgcccaccattagtaccttgaagaaaattgagaatgtgattgaccccgaccaacgatacgtattcgttggtgatattcatggcaattacgacgaattcatggaactcatcgatgacaagattggagggctggatgatacgacgatggtattactgggcgatttcatccacaaaggtccggactcagacaaggtggtctcgtacattttaagtcataagaaccaaataaaatgtgttctaggtaaccacgaaatattggttatgatggcctatttgaacccagacttcctaaagtgggaagggagccccaaatttatgacaccattaacgttcagtaccgagaacaagttcataccacaagacatctcgaagattagcgaggcgcacgctcaattggcccactcgcttggcttttccaaattgagccagctggctgaacactgctcagtggctttcgaactggacttaggacttactggcgagaaactgtttggagcacacgcagggatgctaccgggagacttcatgaagcccaatcaaatccccagcgtgggctctctctcgaacatgaagttcgtcgataagaaacattggtcaagaacatcacgtgaaaaggaaaatgatgattacgtcaggtggttcaaattgtgggacaagtatggagaccatttcagcaacgctaaagtattctacgggcacgacgcttccatgggattgaacctacgcgagcagaccaagggcctcgacactgcctgtataaaggaccacttgctttcatccatggaagtgaagtacgatagaaagaaggggcagtacgactataaactaattcaagtcaagtgctcctag

SEQ ID NO: 2128 - DNA, 2490 bp, Saccharomyces pastorianus
atgtccagcccagatgatttcgaaactgcaccagctgagtttgttgatgctttggatccgagcatggtcgccgctgataatgatcctaccccaatctctgcgccatcggattctgccgctgatgtgaaaactagtcaagacgtagagaacactgcggctatcgaggataaagctaccgagacggagggccaggtagagagagaggagaaggtcggtgataccactgaaactgttttggcgaccgccacatctgctgttgttgatgccgccggtgccgatattccagaaacgacaacttcggctgctgctgacgttgatgctgacgttgatgctgaagctgacgttgatgctgatgctgccgctacagacgagaagaaggaacaagaaaatgcccctcctctgctgcacatgaagttctacctcaatcgtgacgcggatgcgcatgattctttaaatgacgtagatcaattggcgcgtctgatcaaggcaaatggtggtgaagtattggacaccaggccaagagaatcaaaggagaacgttttcattgtatccccttacaatcataccaacctaccaacggtgaccccaacctatatcaaggcctgttgtcaaagcaactcgttgctaaacatggaaaattacttggtcccttacgataactttagagaagtcgtcgatagcaggttacaggacgagccccagtctagtggcagaaccgacagtaacagcaacgatcctactgtgcccaaaactgaaagagtctctgaaaatgctgacaattccgccgaagaatcaagcaagaacaaggtaatggtggacgcggagcaacaggctaggctgcaagaacaagcacaattacttcgccaacacgtaagtagtagcacatcaatgagaggcgacggtaatagtgacttggttcaaatcgaacagcctcagacagacgcctcgaataataataatgttgacgatggagacaacgatttagcgacacaagataacaatgtacagggagatgatgagggcagtgcatccttccaagcacaaagacccatgatgtcaagaggcactttgccctctcataacaaagcttcttttactgacgaagaagacgagtttattttggatgttgtgaggaaaaatccaaccagacgtactactcataccctctatgatgagatatctcattatgtgcccaatcacacaggaaattccattagacataggtttagggtctatctttcgaaaaggttggagtatgtttacgaggttgacaaatttggtaaattggttagagatgacgacggcaatctaatcaagactaaggttttgccaccatcaatcaaaaggaaattctccgcagatgaagattatactttggcaattgcagtgaaaaagcagttttatcgtgatttgtttcaaatagaccctgatacaggaagatcactaatcacagatgaagacacgcccaccgctattgcaagaaggaatatgacaatggacccaaatcacgttccaggaaatgaacccaattttgcagcttacaggacacaaagccgtagagggcccatagcacgagaatttttcaagcattttgctgaagagcacgcgactcacactgagaatgcttggagagacagattcagaaaatttttacttgcttatggtatcgatgattatattagctattatgaagctgaaaaggctcaaaatagagaacctgagccaatgaagaacttaaccaatagacccaagaggccaggcgtgcccacccctggcaactataactctgcagccaaaagagcaaggacttatggcactcaaagaaatgctcagcctacagccaatgctgcttccgccaatgctgctgccgctgccgctgccgctgcttccaattcttatgctataccagaaaacgaactactagatgaagataccatgaatttcatttctagtctgaaaaacgatttatctaacatttcaaacagtctgccctttgagtatccacatgaaattgcagaggcaattagaagtgacttttcgaatgaagatatatatgataacatcgatcccgatacaataagcttcccacccaaaatcgcaactaccgaccttttcttgccgttatttttccatttcggtaatacaagacagttcatggacaagcttcacgatgttatctcaggagattatgaaccttcgcaagctgaaaagttagtacaggatctttgtgatgaaaccggtatacgtaaaaatttcagcacaagcatattgacttgtttatccggagacttgatggtctttccccgttatttcttaaacatgttcaaagataacgtcaatccgccgcctcatgtcccgggtatttggacgcatgaagatgatgaatcactaaaatcgaacgatcaagaacaactaagaaaactggttaaaaaacatggtactggcagaatggaaatgaggaaaagattttttgagaaggacctcttataa

SEQ ID NO: 2129 - DNA, 969 bp, Saccharomyces pastorianus
atggacagcgaagcaagtgatatagacatagaaatatctgacagtatctctgttggaggtgaagaatatatagaggacgatgatgaatatacagaagattttgacgatcggatagttgcaagtaaatcatctaaacgtgcagcacgtaaaagagaaccaaaaggggtaagagcgtcgaaacggatcagggacaaagaactcactgacgaggttgatgaggaatttgacgaggatgaggaagtgctaagcccttccaagaaacgtcatttacacaccaggtcaatggataaaagaaaggttggtactgctgtgtttgaaagttctgatattgaggatactaaaaccaatgacgacgtaatggatgaaagcaatacagaagaagaagaggaaggtttagaagaagtgctaaatggagatgaagataaggagattgccgagaaaggtgaagacatagattacaatcaaagtggcaacgagccaaaaaaggaagaacaagacatgggatctggagactatgaagataacgaggtcaatattagcaaggaatcagacgaaatggagtctgttatgaacggtaatggaaatgaagaggacgaagaagttgaggcgaccaaggaaagcacaacagactctactaggagtactacaactcgaagtaagatgttgatggatttattggaggatggtggctctaaaaagaagttaacagatgaagagattcaattaagaagagctgaaaatgctcgtaaacggaagaacctgagtgagaagagattagaagaagagaagcaagacacaataaataagctcttgaagaaaagggccggtaaatctagaagtcatctgccgaacgaggatgataaaaatgatggctcatcaagttttgtaaagccgcgtaggccttataatagcgacggtatgacaagaattttaaggaattacaaggaagatgtattttgtaccttttag

SEQ ID NO: 2130 - DNA, 645 bp, Saccharomyces pastorianus
atgaatattctgcgaatggcatgtcgttcctttcattgcctgcgctgcggctcactgctcaatgagaataagggaacatcattcaaggcaattgtcaagttgatcaataaatcgagtttatccaacaaggaatttgaagaaaaagtgcgagatggcgctaaggagatacctgagtggaagaaacagaaaatggcagtcaggaaaaaaattcaaggccaaagatggaacccatcaaaaaagatatctcaggagcaaatggaggctttgaggctattgaaatcaaactttcccgagatgacagcatctgattttgcggagcggttcaagatttctcctgaagccgttagaagaattttgaagtctaattggaagcgtagtgatgacgagaataaaaacgcacacgagagatggaagaggagaggagagagaataaaagaaatgtatgacaaaaatgagggcgctgactttccatcccaccagatcataagtggcaaaaaacttattgttagttccaatccaaacgcatctgaactaatagcaaaaaatgtccacactactagaaattttaaacataataatgatagacctgaaaagaaaaacaccaacaagctgtaccttttaaagcatttatcctcaagacagtaa

SEQ ID NO: 2131 - DNA, 2346 bp, Saccharomyces pastorianus
atgaacattttgaagaagtttatggattccgggaacaggccagagctcattaccataccttcagggcagtttaatcttttgaggtcaaagagttcacctaaagctgctttagaatgtatctacaataattctattctaagtgttcgcaaagttggcaggtttgattacgaattggctgtttatagggtagaagatgataatgaagctggtacaggagatgagtctgagaattttgaggatgacagtatcagtgttttatccacacaatctaaaaaaaaggaagaggagtggagctttgaaataacggataaaattatgtttcacaagacctgggatgaacaaggaaacatagcgctcgtatgggagaatttggttggtgatgagcaagatgaaaaggttcaatttgttgttgctactgatgtttcgatgtctgatgtggagcaatttatacaaactgtttaccggtgtcaatacgaagtaagatataaaaaatcctctttcactgcttcagcagatgacttgaagcagatagaacacaaatcggcaagtctatttgttcaagatgaggatgggacagactcaagttcagacgattttcaagatgctaatgacttatattttgaacaaaaagaagaccatgacttactggcaagaaccccttctccattgaggagggtacctgaaggaaaaaatctgtgcttaatcatgtctggtttatacgtttatgatccgattcaagaaatgtttgttttacaggatcctgcggttaaagtagcgattatcgacactgggaaatacgagttttggctggctatagaaggtaaagatacccgtctgggcacccaagttgctccgaatatcaaccctacctttgaactggcaacagatgcatttcttttcaattatacactacaaaatattactctgtcctacatgttgaagttcaagaacttggataaatgtattcaattcagatctgtttgggtagaatgtctgtggatgtctttgaacaaagaaacctggaaggatcttcctgatagggagagagattatattttagattcatcgtctgtaccattggaaaagcagtttgatgatattttacacttgggtgagagtcctaacgaaaaaaggaacgaagaatcaagtgaaagtgaaagtgaaagtgaagacgaagtggacggaaaagagcactccaaaagaattgtttcctctgaagcctttgaagaaccaaaacgtgcaacttcaaagggtaatagctctttaacaattgctttcagaaataatagatcgtatgttacaagagacaacaaaattggtgtattcaaaacagatgatgatgatgatttattagaattcgttactgccatcaaaaatgtttctgatttgggcggtaaaagtattgatcctcataatccaatgctgtatatggaagatcgtaacctgatcctaactgacggtcagaatgaaaataggctctacaagatggatatagaaagaggaaaggtggtagaagaatggactacaggtgacaagaatgttgttcaatacggtccggccaagaaattcgaccaaatgacaccagaacagacaattgtgggtgtttcacaaaaaggcgttttcaaaatagatcctagaattagtggaaagaataaaatagtcgccgatcagtccaaagactatgtcgggaagtataactttagttccatcggaaccacagagggtggttatatcgccatcggctcagaaaagggtgatataaaactgtatgataggttgggtattagagcaaagaccgctataccttcactcagccaagcggttaagtatatcactatatcagctgatggcaaatggttgttagcgacttgcgagagttctttgcttttaatggatctagaaatcaaggagggcaaaaatgctggtaacattggattcttgaagtcattccctgcaagtgaaaatgtcaaaacgtatgttctgaaaatacgaccggaacattcagcatccatattgacatacacaaagaaacccattagctttacgaaggcttcctttaacaccggtataggccaaagggaacaaacgattgttacctcgacaggcccatatgcaatttcttggtcgttaaaagctattctcgaacaagatggtagtagaaattatccatacagaattcgtagatacaacggcgacgtcgttgctgataatttcgaatttggttcggataaaaaggtgatagttgctttgaaagatgacgtttctttatcgaaagtgaaatccttcaaacagccgagcaagggtgtcttgatgccaaattcctctctccaagatttttatggctga

SEQ ID NO: 2132 - DNA, 1296 bp, Saccharomyces pastorianus
atgaaattggatacatctcatatgagatatttgacgacggatgactttcgtgtcctacaagccgtcgaacaaggctctaaaagtcatgaagttgtcccaactctcatgattcaccagatctcaggaatgaggtcacaatcgggtacaaacagggccatcagtgatttggccaagctaagcttaatctccaaaatgagaaatatcaaatacgacggttataggctaacatacaacggtatcgattacttggccttgaaaacaatgctgaacaggaatactgtttattccgtcggtaacacgattggtgttggtaaggaatctgacatttataaagttagtgataaggacgggaatccgagagtgataaagattcacagattgggtagaacctccttccatactgtcaggaacaatagagattacttgaggaaatctaatcaaggtgcgaactggatgcatctttcgcgcttagccgctaataaagaatatcagtttatgtcaatgctatattcaaaaggattcaaaatccctgaaccattcgataattctcgccacattgttgtgatggagctgatcaatggtttcccaatgagaagattaagaaaacataaaaatatacccaaactttatagcgatctaatgtgttttattgttcagctaggtaatagtgggctcattcattgtgatttcaacgagttcaatgttatgattaaagatgaattggaagacgaaaatgactgtgggtttgtggttattgatttcccacaatgtgtatctattcaacaccaagacgccgactactattttcaaagagacgttgattgtattcgccgttttttcaaaaagaaattgaagtatgaaccaaaaccagactcatcaatgctcgatacagacggtttcggagatggttacaaatacgcctatcccgaatttaaaagagatatcagaagaaccgacaatttggatgagttagttcaggcttccggatttagcaagaaacatccaggtgataggagtttagaagatgcagttgaaagcatgaggaacgctgcttataactcagatgacgaagcagaagtagaggacgaagtagatgcagaagcagaagacgaggaggatgagggtgatgattcagaggaggaggaggaatattatgattccgaatctggtgatgacagttctgatgatgatagcggagattcgcaagaagaagaaaatgaacgtattatagaggcgctttctagcggtgttggaaacctgaaaatggataaattaggaaactatttactagaatag

SEQ ID NO: 2133 - DNA, 1392 bp, Saccharomyces pastorianus
  modified_base (962)..(962): a, c, g, t, unknown, or other
atgtcgaaatcttttctagaccatttgccggagcctcttagcgagaaaattggccttgtcgtgagggcattgccgagctcattagaaacattcgaagaattgtataattatgcattggatgaaactagcaaccgcaaaaagggacagcataaaaagcccaagttgcatagctctccagatgaacttaaaatagatgtgatttcagaggcaaacaccattttcaaattagaaggtgtttctgtactgtcaccactaaggaaaaaacttgatttggttttctatctttctaatattgatggatctccagtaataacgttcctaaaaggaaacgatagagaactgaccatttgccaactaaacagcaacattaagatggcttctttcttgccagtgccagaaaaacccaatctaatataccttttcatgacatatacggcatgtgcagacaacaaattttctgatcctgtgttaatgactttaaataaagagaacacactgaatcaattcaagaagttaggacttctcgactacaatgcaatagatttcgataagtgcgttgagtacatgaggaaacaagcgatcttgacaggtttcaaaatctcaaacccatttatcaacactaatgcggccgatacagaactgataagctcattccacgtggaatgtcatagaggtactaaggaaggtacattatatttcctacccgataatataatattcgggtttaaaaagcctatcctattgtttgacgcttcagatatcgaatctataacatattcatccatcactagattgacattcaacgccactttagtaacaaaggatggtgaaaagtacgaattttcgatgatagatcaaacagagtatgccaaaattgacgattacgttaaaaggaaacaaatgaaggataaatcgatgtctgaggaattaaaggctaaatctaaaaataaagctcagcagcntactgatggtgaaaccgaccagccatctatcttacaagaagccactcgtcaaatgcaagatgaaaaaaagacagaaattttctccgatgacgatgaggaaaatgatcaaaattttgaagctgaaagtgatctttccgatggtagtggccaagaattctcagatggcgcagaggatggaacggaagctgaagaggaagaggaagaagaagaggaagaggaagaggagggagatgataaccatgaggacgacaacggcaacgaaagagaacgcactgcgtctcacactgataataacactatgcttataaataatgaagtgggtcaggaacttcaatataaagaattcaaagaaaccttagagctcgaggacattcccatcgaaattgacaacgatgatgaggaggagggatcaggcgtagaatacgattga

SEQ ID NO: 2134 - DNA, 741 bp, Saccharomyces pastorianus
atgtcagcgttgaaagtcgtttcttccaagcttgcagctgagatcgacaaggagctgatgggccctcaaatcggattcactttacagcaattaatggaattggctgggtttagtgttgcacaggctgtatgccgccaatttcctttgaaggacaagactgaagcagagaagggcaaacacgtattcgttattgctggacctggtaataatggcggggatggtcttgtatgtgcaagacatttaaagctttttggctataaccctattgtttactaccctaagaggagtgagcgcactgaattctataagcaactggttcaccagttaaatttcttcaaggtccctgtattgtcacaagatgaggaaaattggctcgaatacttaaagccagaaaagaccttgtgtattgtggacgcaatctttggctttagttacaaacctccaatgagagagccattcaggagtatcgttgaagaactgtgtaaattacaagaccgtattcccattgtttctgtagatgtccccacaggttgggacgtggataagggtccaatctcacagcctgcaataaaccctgcggttcttgtatctctaactgttcccaaaccgtgcagcacatacatcagagagaagcacacagctcattacgtgggaggaagattcattcctcgagattttgccaacaaatacggatttgagcctttcggttacgagtccactgaccagatattgaagctgtaa

SEQ ID NO: 2135 - DNA, 1074 bp, Saccharomyces pastorianus
atgtgtagatttttgattttcaaaggtaaacagccaatccggctttctcaccttttaacgagaccagctcattctattataaaccaatcatttgacagtagattacgtttagatagaagaagaccaatgaatggtgacggatttggtgtagcatactacccactagacaacgaactgagcgaagacggcccatgtcttttcaaagctatcacgccggcatggaacaatcaaaatctaagtacactagcagaaaagacgaaatctgatttagtctttgcccacgtaagggcctccacatacggtgttttgtctgaaacaaattgccatccgtttacgtatcacagcttatgttttatgcataatggtggtatatccaatttcaaaggaatcaagagaaaattattgaatcacattaaggacgaatacctcaattttatccagggaagtacagattccgagtgtgcatttgcattgtttttggatacgctagacaaattaggccatgatccgaagaaacaagagggcgattttggtaacgtcgctcttaggaaggcaatgctacaaaccattgactatatcagggattggaccaaagaagccaacaagaatgaagtgcatgtggatccatctttattgaactttgctgtaacagatggatctaccgtcattgtttccagatatataacatccaagactgacgaggcagcatccttacatttcagctgtggttccagttttgtagagacctcaccaggggaatacagagtagagaggctagacagaaatcaagatgtgattatggttgcatcagaaccattgacattcgaaagaggagattggaccgccctacccaccaatagcatattgaccatcaagaaacagacaatattgttgcatcccattatcgacgaatattaccaagaagacccactatacttaagaagctccacgctggcagaaagcaaagggcttatgggttctataccgctcgcaaaggctgtggaaagaaatgttcctccgttagagagagaaggccgtacaagacctccaactgctgccgcacacatagcataa

SEQ ID NO: 2136 - DNA, 603 bp, Saccharomyces pastorianus
atgaagttttcctcagttaccgctattgctctagctactgttgccactgttgccatagctaagaagggtgaacatgattttactactaccctgactttgtcccaggatggtactttgctcaccaccacttctactcatactactcataagtatggtaagttcaacaagacttccaagactaagactcaccgtactggtactcacaagtatggtaagttcaacaagacttccaagactaagactcaccgtactggtactcacaagtacggtaagttcaacaagacttccaagactaagactcaccgcactggtactcacaagtacggtaagttcaacaagacttccaagactaaaacccaccgcactggtactcacaagtacggtaagttcaacaagacttcaaagtccaagactcctaaccacactggtacccacaagtatggtaagtttaacaagaccaaacatcaccacaccacttatggcgtgaacgataaggctgccgtgaataacgctgccgctggtccatccaacttcaactccatgaagttattcggtgttaccgctggtagcgctgccattgccggcgccttattattgttataa

SEQ ID NO: 2137 - DNA, 2391 bp, Saccharomyces pastorianus
atgactactcaagaatcgatcaagcctttggtcgacagaatcttatcgaaccctctgcagtttagtgctgcaatgatctctaagaaatcaaagaataataataataatggtactaccgccgcgccgcaaaatagctcgtacatcgtgatagggaagcagcataataatagcagttctggcggcaccactattgcaacttctaatggcggccaagcacaactcgatgggtcgatggaaaagtctaaaaatgaaaacaagcctgatgccgctcccaaatcgatggccgaagctttgttactatatacttctaagaatagtaacagcggtaataatgttgccgctgtgaaaaggccagcggagctttctacggagctttctacggaacctcccacttctgcttctgcctcggaagatgagaaagaagttgagaaggaagacgagaaagaagaacaggtccatgaagaagaaggagaaggagaagaaggagaaggagaggtatttcacgaggcaagggattatctagagcctgaaaatgcccacataaacgatgacgaagacatcggtgaagacatcggtgaagattttggtttgcctgtcgctaccgttgatggagaagaggaaaagggtacgctttctggcaccaatgaagcggacgatgatgatgaagacatggattatgatcccactgccatggagaaggagctccctgaagaagaagaagaagaagaagaaggaggagaaagcgattctagctctgcaatttccgaagatgagaaaaaggatctacgcaaagacttgatagaggctaatacagaaaacgtaaagcaaggcgaaacgcaaaacaacgacgcggaagcaagtaagatcgtaactccaaaaggagaacaagaagaggaagaggaagaggaagaggaagaagaagaggaagaggaagaagaagaagaattaaaacataaaccaagatcagttaccccaccaactacgatatcagatctgtcgaacttttaccaattcaatgaaaatatcaacgatcacgggtccttgaattctagtaaaatcatcaagaattggggtgaccaattcactactttaaaacctcgtggcctattaaaccatggtgttacttgttatacaaatgccgcagtgcaagccatgttacatatcccttccattcaacattatctgtttgacattcttttaggaaagtacgacagcaccatctcaaaaagctctgtttcctacactctagccgaaacgagcaagaaaatgtggtcaccgatcttgaaaaatcctaaaaaaagcccttcagcctcttacatcaatccgaaatatttgatatccagactagatgatatcaactgtatgatgagcgaatggcagcaggaagattctcatgaatatttcatgtcgctgatgtcaagattacaagaagattccgtccccaaggggcataagctaatagaatcgataatctatgacatatttggcggtcttttaaagcaaatcgtcacttgcaaatcttgcggcagtatatccaaaacggaacaacccttttacgatctatcgttgcatttgaagggtaagaaaaagctggattcagattcagatttgttggatggtagcagtaataatgcttccaccgccagctctacttccaacgccaccactgcacaatcatcagcctcttctgctgctcccaatttgaataccactactccaggctctgcagccggcaatttaagttcagtcaatcgtaggttctccattgagaagtcaatcagagatttcttcaatcctgaattgattaaggttgacaaggaacaaaagggttatgtttgtgaaaaatgtcacaagactacaaacgctgtcaagcacaactcgatcataagagcaccagagactttacttgtacatttgaaaaaatttagatttaacggtacttcgtcatccaagatgaagcaagccgtttcatatccgatgtttttagatttaacagaatactgtgacgataaagatttacctgtcaagtaccaactattaagcgtggtcgtccatgaaggtcgttctctctcttccggtcattatattgcccactgtaaacaaccagagggtacttgggctacttacgatgatgaatatattaataaaatttctgaaagagacgtgctgaaagagcctaacgcctattatctcttgtatacgaggctaactcccaaggtgatttcgttgccactagcaaagtctacaatgacggccgacaatattacttcgtccaaatccaaacaagaacaagcatccagcgaatcaaataaacgtccattaaagattaacagtaagaaagataaccggaaaaaatggaaaaagaataagaaaaggaagttttctaaataa

SEQ ID NO: 2138 - DNA, 477 bp, Saccharomyces pastorianus
atgtcacaggcagccaaaaacgtaatagtgaagctgatagtaggagcaggtcaagcagcaccatcaccacccgtagggccggcgctgggttccaaaggtataaaagcgattgacttctgtaaggaattcaatgcaagatcggcaaattatcaaccaggcgtgccagttcccgtactaattacgataaaaccagataggacgttcacatttgaaatgaaatctccacccaccggttatttattattaaaggctcttaagttggagaaggggcacggacaacctaacgtaagtacgacattaaccggtgctcccgttaagggaccacctcgtattttgggagaactatcgttgaaacatgtttacgaaatagccaagataaaaaagagtgatgaaatgcatagcctgttggagatggaaggtatcgttaagtcaataatcggtgttgcgaaaagtatgggcatcaaaatcatgccttga

SEQ ID NO: 2139 - DNA, 1224 bp, Saccharomyces pastorianus
atgcctttgaatattattggaacagcccttttagatggaactgataaaattccttactttcagacgattaaaaaggtggcgccttatgtattaggggcaagtgccatcaaatactggtcaagaggaccatcgaatacatgggaaagaaagctgcatggcaaagtgtatttggttactggagctacttctcaaggaatggggacatctgtggcctttaaaatggcagaattaggcgcacagctaattattttgaccagagaagtggatgaatgggtcacagagtggtgtgaagacttacgtgaaaagacaaacaacgagctaattttcgtagagaaatgtgacctgagtaatttgtgggaaattcgtaaatttgccacaagttggttagataattcgccacccagaaggttagatggtgttattgtcatgtctggtgatatggagccttggggtgttcccaaaatatctctaccgaaaagaagatcttccaaggatgggttggagttacaaatagctacgaattatgcggctatttttcatcttttaaatttgctgcaacctagttttaaggctcaaccacctgatagagacgtaagaattatccttgcgacatgctggttgcaagttgttggagatattaatgtggaagaccccttatggcaaaatgccaagtataaaagtgctttgaaatttttcgcaagcagcaagttacagttgggattaagcatgatggagttgcaaaggagaattactgcagacattcaaaagcaaaagactgatggtgtcgaaagaacaggtaaaaatgttacaatcaccatggtgcaaccaggaacaatgagatccaatagtttacgtcgtgtcattagtaatgggtcagtgattttattgatggtattatattgtattttactataccctatattgtggttatttaccaagagcggtcgtcgtggtgatcaaagttttttgtatgcattaatgaccccagaactggaagagataaatctaaaggatacgaaggccaagtacatttcagactgctcaattgtaaaattcgctcggaaaaaatttgatgatgaggaattacagaaaaagttatttgagaatactgaaagagatatattacaactagagaaaaaaattgcagcgaagaggaatgctgatggaaagagaggaaatgatgctaaaaagaaaaaacaaacgaagagcaagaaagatgattag

SEQ ID NO: 2140 - DNA, 996 bp, Saccharomyces pastorianus
atgaggtccatcaagtgcgtaataattggtgatggtgcagtgggtaaaacatctcttctgatatcgtataccaccaattctttccccaccgactatgttccaacagtttttgataactattccaccactatagctattcctaccgcaactacagatagccccttagagcctggaagcgataatactaagggagaatcattttcgtcttcaaattccttaccaagtacagaaagaaaactatttaagatcaatttatggggcactgcaggacaggaagattacgatcgtttaagaccgttatgttaccctcaaactgatattttcttaatatgtttttctgtaagtgaacatgctagttttgctaatgtcactgaaaaatggttacctgaacttaagcaaacttctaatattgaaaacctttctctcttcaccaaattaaagaagtatccgatactattagtaggtaccaaggctgatctcagagatgatcctgtaactcagaaaaaactacaagaaacaaattctgattatgtatcccaggaggaaatagataaagtcgtgcaagagtacggatttatgggatatacggaatgttctgctgctactcaagctggtgtccgagaggtttttgaacacgcagtgagatatgccatttacgagccggaatccaatctgcagaaatcagtaaaagagaccaccaccgatgaactaacgaccgccacaactaataacaacaaggacaagattatgcaagaacaaaaaccacatccacatcccaataatagtacagatagcacactttccaaggacaattcacaacaggaaaaagaagcccttaattataagccgactaaaaaacaacataaagacaaaactcacgaacaggttaaatccaaaggcaccaagatggccacaaagacgcattgtaataaacaaaccaaatcaaaggtaagaaacgagaagaagaagaagaattcaaaatgcgtaattctttaa

SEQ ID NO: 2141 - DNA, 1791 bp, Saccharomyces pastorianus
atgagctctaatagtaccatcgggacggacaccattgatcagtcaggtacgtcatcactgtccatcagtggccagaccagcagtctaatttccccatcgacctatgtctcatccacgccttcttcgactttgacaccccagcaaggaagtctaacatcattgccaccggtatccagtacttctgtctctacattccgcacctcaaatacggtttctgatgaaagcttgtattcgtctttttccgtatcttcaacgtacactttgatatcatcttctattagtggtcaatctagcgggcaacagatggaaagttcacagtatggaccaaccactacttcattctctgtcatcacgccatccttatcgattctttcgtcatctttatcaccatcatcttcattatattctgcctccgcaaaatcatcgcttgatagcgtttctacgtctttctccacgtcaacaccttctgcaatatctcccagtttcacttctctatcttctgcgtacacaggttcctcggaatttaccagtaccccgcaaaccacatcaacggagtcttcggcaatatttacatcttcgccaacatccaatgaagacattacatcttcatattcctatcggattacatccacattgatgtactcttccctgttttcatcagctactaattcctccactaaaagcgaatcctcagagtcgaattcaaaggccccatcatcgacggtctcggacacttttcagagtaccacatcagtcacacatatgccaaagctagtttcgagtcatactactagttcgacttctacttcaagccgtctttcatcttcatcagatgcttccacaagtgcatttgagaactcttctttgagcgataacacatattcttccaaacaaacaacctatacttctagtagtagcgtgccaatgacaactcctccacctaccaccactacgacttctacaacttcaccgacatcatccagtcaaacgtatagcataggggtcgtatcaagctcagaagactcacaaaccatctattatttttatacccaagcatacgatattactggctcttctacaacatttgcaacagggttgcctactacggttgctcttgccaaaagtgcagtaagctcattttctgttccatcttcaaccattactgcagatatgtctttctaccagcactggctgaacggtggtttagacgacaatcaaaatcaagggacatcaaagtcaaatactggtactattgtaggaagtatagtgggcagtattggtggtattcttgtatgcgcggtgatagtttggtttttgttgttcagaaaaagaaaaggcaagagagagttaaaggaaaacagttctttctgtcatgaaatagggcgcagaacgggatttcccacgactgctcaagcaagggagacatcagttcatgcccaggactctggtgctcaacaaacaaatatggacagtaattctaccaataacccatttagcaatgaattcaactttaaggccaggtgtgctactgcagtaccaccatcaagaaatggtgtcaccctcgacaacccttcccaaaccattcgcaatgattcaatgaactcaaacaacaggttttcgtatgtctcttcatttacgtattcatctctcggttcatctactcagggcggtttttctgctttatcttcaaattcgataaatctcgggcctggcttaaataacaatgtctcgaatgatgaaagagcttctgctcgagatacttcacaagggttcttaagagaaataatatga

SEQ ID NO: 2142 - DNA, 1212 bp, Saccharomyces pastorianus
atgtcagaaatcgaagtcccaagcgaacaaattgtatccaataacaaaaacgaggaacagattaaaaaagctttgctcgacccaaccaaaaagagaaaagctgaagatgaaatcgaaatcgacttggagagctctattcctttatccaagaaacaaaaacgtctcttaagaaggggaaagattaccttggaagagttgaacgcgaagtacaacatcgatcctaagtccgttcaagaatataaagaggacgctgaaaagaaaaaatctggtgatgttaagaaagatgcccaagatggtgaatccaaaacagatgttacagtagaaaccgcatccgatgatgctgcaacgaagaaaaaaaaagaagaaagcaaatatggtgtttggattggtaatttatctttcgacactacaaaagatgatttagtcagatttttcatttccaagacgagagacaatgaagacgaaaaaagcagagtcattcaagaagatataactagattgtccatgccccgtgttgcttctaagaactccaactctatgcaaaacaaagggttctgctacatgttcttcaagaaggtggagcaaatgaaagcggtcttagaattatctgaatctcatttgaatgggagaaatatgctaatcaaggactctgagaacttttcgggcagaccggataaggaagatttcgtcgccatgtccaaaaacccaccctcaagaattctattcgtgggtaatttgtcatttgatgtcaccgatgatttgctaagaaaacattttcaacattgcggtgatattgtgaagatccgtatggcaacattcgaggatagtggtaaatgtaaagggttcgcgtttatcgatttcaagaatgaagaaggctccactaatgcgttgaaggataaaagctgtagaaagatcgcgggaagaccattaagaatggaatacggtgaagacagaagtaagagacaagtgcgtaagaaggttgaaaacgtcactcatgacaaaccccgttcgtttgacatctccaacaacagagaatacgatcgtccaagacaggatagcggtaataaacccgagtacaaaaggtctaacgctaataggcgtccacccgtggattccaataaccgtactaagagtagtgtggcattggctaccgctcaaagaggatctgcagctattgtaccatctcaaggtaagaaaatgaagtttgactag

SEQ ID NO: 2143 - DNA, 1113 bp, Saccharomyces pastorianus
atgcagtcaggcctacttcaatttactttcaaatggcccaagggccctcaatctgttgtccttacaggtgccttcgatgagtggaagggaagcttacccatggtaaagaacccgagcggagcattcgagataaccctgccggtgcagtttgacgatcctggtgacaagttctatttcaagtttattgtcgatggccagtggttaaccaataaagactacagggccgacggtaatgtagaaggcaagaataacttcatcaccaaggaagacataatacaacagtggggtagcaagacaggaacgctggtacctgaaagtgccgggttggcggtttcgaaaaacaccactcttactgaacaggagggcgacaaaaagcctgcgaagttgagaaaattcaagattaagagagtgatcaagaccaataaagaaacgggggagaggtcgatcttttctcagaaagtcatcgaattgcctgacagcgaagacgaagacgaagatgaagacgaagcgcagcagacggtcaagaatgccaagaatgtagatggcctgagtggcactacaaccataattggaaacaccgatggcggtgtagaagaggagaaagcagtcaagccatatgaagaaaagcaccccaatattggcctggttaagagtgaagaaaccgctacggatcacctgggtaagacacaatcttccgattctagactatatgagctgtccgcagaagagcttgaagaggaggaagaggaagaggaagaggaaaaagaagtgggtgactcaagtagaaccgctggtacgggcacggaaactcgagaagaaaagcccttgaatgaaaccactatagctgagaacccacaagaggcaattccagtaggaacggcaacagtcgtcaaggaggcgcctgggaaattgaccagcgaatctaaagctgagacccaaactttggaaggacaacaaaacccaccagcaattactgcaaaaacagttggaattaagggaactactagaactgccaaacctggtggcgcgaagggagtaccacataaagaggctccgggaagttcggctaagaaaggtggatttttcaaaaagttgggccagcttttgaagtag

SEQ ID NO: 2144 - DNA, 1506 bp, Saccharomyces pastorianus
atgtcaatcatgccagtcaagaacgccttggcacaaggaaggacgctcctcatggggaggatgcctgctgtgaagttctccacaaggatgcaattaagaaacaaaaccgctgtgctatggaatagaaggttttccacacgtcttttcgttcaccaacgacgtagttccggtgaaattgtggatcgtgctaaggcagctgccgcaaacagtgggaagaaacaagtttctatgaaatgggttgtacttactagtttcaccattgtcctcgggaccatcctgttggtctcaaggaacgataaaacagatgaagaggatgacacaaaaagtaagaagggaacaagaacaagaaaaatcaaaatatttaacaataactggcttttcttctgctattctactttacccttgaatgcaatgtctcggctatggggccaagtgaattctctcactctacccatctgggttaggccatggggttaccggttatattcttttctattcggggttaatctggacgaaatggaagatcctgatttaacacactacgcaaacttatctgagttcttttaccgtaatataaagccagatacgcgtccggtagcacaaggcgaaaacgtcatttcctctccaagtgatgggaagattttacaagttggtataatcaactctgaaacgggtgagattgaacaggttaaaggtatgacatactcaatcaaggaattcctcggcactcattcccaccctttgatgtcgaaaagtgaatctagcttggatttgacttccgatgaagaaaagcataaagaatttgccagaataaacaactttcaattagcgggcgcaggggatacggaacaacctctcatcacaattaaaaatgaaggtgaccaatctgttgaagagtttaaaccaagcgtttccaaaaatatacatcttttaagccaactttctctgagctacttctctaacggattttcgtgctcagaacctcatgatacggaactattttttgccgttatatatttggcccccggtgattaccatcatttccactccccaattgactgggtctgtaaagttcgccgtcatttcccaggtgatttattttctgtagcaccttacttccaacgtaacttccctaatcttttcattctaaacgaaagagttgctctattgggtggttggaaatatggatttttcagtatgacgcctgttggtgctacaaatgttggttccattaaactgaattttgatcaagaatttgtaacaaattctaaaagcgataagcatttagaactacatacttgctatcaagcaatctatgaaaatgcaagtaaaatattagggggtatgcctttggtcaaaggtgaagaaatggggggcttcgaattgggcagtaccgtcgttctatgcttcgaggcaccaactgaattcaaattcaaggttaatgttggtgataaggttaaaatgggacaggagttaggcattattgaaaataaagattcaaaataa

SEQ ID NO: 2145 - DNA, 780 bp, Saccharomyces pastorianus
atgagttacaattatttgaaagcagccaggaaagtcatatgcattggtcgaaactatgccgcgcatatcaaagaactgaataatacaacccccaaacaaccattcttttttctaaagccaacttcaagtatagtgaccccattatcatcatcgctggcaaagaccaagagaccgacggattcaagtttcaatgggttgaatgaagacgggtccaatccagggcccatattcatcccacgaggagtaaaggttcaccatgaaattgagctggcattgatcataaacaaacacttgtccaacgtcgctgagatgaaacccgaagaagtctatgaatctatcagtggtgtggctctagcattagatcttactgcaagaaacgtgcaggaggaagcaaaaaagaagggattaccttggaccataagcaaagggtttgacactttcatgccaatatccgctctaatctcccgcgagaggctttcaacctacaaatccaacttgcaagacattttcagaatcaagtgttccgttaatggagaactgagacaagacggcgggactggtctcatgctacacccattgcacaaaatcttgccacatatatctaccatgatttctctagagccaggtgatattgtattaactggcacacctgccggcgtgggcgagctgaaacctggcgaccgtgttcattgtgaacttttacaaaataacgacaagctcgtggacatggatttcgaatgcgaaaaccgccctggtccttatgaattcaaggaaacgtaa

SEQ ID NO: 2146 - DNA, 1962 bp, Saccharomyces pastorianus
atgtcaagtgaggagcgttcaagacaaccaagcaccgtttcggcatttgatttggaacccaatccttttgaacaaagctttgcttcttccaaaaaggcgtcactcccaggcgtagcccctcatccatttcaaccaaagagcccttcgagaagcggttccatatcgacgttagcgcaaaatcctcatcgttccacgcatagtttggacagcataccggaggggaacgggaaccgaattattccaagtaatggtaatacaaatgaggcgaaaaaagactcgccaaattttttaccgagccaacagagacctaccataatatcaccacctatacttactccaggcgggtccaaaaaattgccaccgctacttctctctccctctattctgtatcaggcaaactcaacgtcaaacccaattccaaactcacattcagcctcaacttcgaattcgaatcccagtgcctttagcgcttcttctgcttctggatccatgtacccgaacagctcatctccttcaggctcttcattaacacaccaacctcgaaaccataatgctacagccagcactaccagtaacggcttccctacgaatgattcacaaatgcccggtttcttgttaaacttatccaaatccggattaacacctaatgaatctaacataaggactgggttgacacctggtatcctcacacaatcatacaactatcccgtcctcccttcaatcaacaaaaatactgttacaaatggtaaaactaccaacaaaagtatcactgccaatgggaatactgaaaaccacgctcacattaatataatgcatccaactgtaaatggtacaccaatcacaccaggactgagttctttgttaaatctaccatctgctggcattttgacgaatccaatattcaaatcgacaccatcgacaattattacagatgcgaccgctaataccaatgccggaaatagcaacatctccccaaacacatcgaaagccgcggtgaaaatggataatccagcagtaatcaacggcatcgggcagcctacccttaatcacaacgaaaatgaacattcgacaactcaacttgagaataatgatccattatttactacaaagacacgaaaaaggaaaagaagaatgtctagcatgagtccaacttccaaagtcccgagaaagagctctgtatcgagaaagagctctaccgttacggctttgacagcgccaaaagacggtgtcgatagtaacgaaaattcaaacaatgtaataattgatgagacagaagaacaagaaaagaaaagaaaggaatttttggaaaggaatagagtagctgcatccaaattcaggaaaaggaagaaggaatatatcaaaaaaatcgaaagtgatatacagttttatgaatcggaatatgatgatctcacccatgctgttgggaaattttgcgggatagtaccttcaagtgcttcaagttctcaatttagtatgaatatgtccaccccatcgtcttcatcatcgccaacatctacatctttattagcactgctagaaaatagcatttcaagaaatgacttttcaagtgccatgtcaatattatcaaacatgaaacaagttatatacgaaactaatttttaccaaagagggggcaaaaatccaagagacgacatggaagatcaagatgatcagagcagcttcaataaggacattactactgttaagaatgaaaacgcaggatatccctccattaactcaagaccgataatcttggacaaaaaatacccgctgaactctgtaccaaatatcagcaaaagcaacacaatcatcaacaatgcgggacagactacacagactgcgcagagtataatcaattcatgttattcagttcctaatacattggtaataaatgcaaaccctgatactcatgatgctaataatggccatgatgtattatccacactacctcacaataattga

SEQ ID NO: 2147 - DNA, 1329 bp, Saccharomyces pastorianus
atgggattagaccaggacaagataaagaagaggctttctcaaatcgaaatagacatcaaccagatgaaccagatgatcgatgaaaatcttcaattggtggaaccaacagagaacgaagatgcaaaggagataccagaggttggtgaagcgactgaagcggcttttccaagtagtaacgaggaattcagcaatacacgagaagatgcagtacagcccgaagctggtaatgagtctccaaaggagcatattttcagtgacaatgagaaaaagaagagtatggagactgaacctgaacaattagaacctcaggttgcggtagtccaagaaattcaagtgaatcacacggccattgttatcggtgactcctataacgcgtttgtcgccaaatccgccaaaaatgcggagtcaaatgacagtgacactgaagttaaagcttatgatactgaaaatgtaaatcaaagtggagttgataatgaaactgccaaaagtgacgacgatgaatgggaagacgaaaaatcggatgcggaagacaagtgcacaggtaaggaagaggtagaaaagattgaggctcaacctctaaaacctcccactcgcgaaactatcagctacgctggacaccgtacagcagataccgagttgatattggataacttttctttaggaaatgatggaggagacccgaacatactaccgcaaactatatctgtagggagcaaaaacgacgacaatcacaagaacaagcatttagctgaccaaacgaccgacacctcagaggacttccccaatccttccggaagaagcactccgcttgattctcaatctaaaatctttatacccaagaaaaatctcaaagaagatgataccgatgcaaatgactccgattcagctagtcgagaactaaaacccgtaccaaacttcgagaaacgacgcctgacaaatccatttagagttatctcggtaagtagcaattctggttcgagggatgggagccgtaaatcttcactgaacaagtacgatactcctgcttcgtctcctatcacttcagcatccgagttgggtaatactgccaagctagaaaaaagacatgattatttggctatgaaatgtaccaaattgcaaaaggaaattgactatctgaacaagatgaatgctcagggttcactgtctatggacgacggtaaaagactgaaaagagccgtggtgaagcttcaagaataccttgatagtaaaacaaaggaaaaatatgaggttggggtgctgttgagtagacaattgaggaagcagattgaccgcggtgaaaatggccaattctggattggtactaaatga

SEQ ID NO: 2148 - DNA, 1236 bp, Saccharomyces pastorianus
atggacagagtacgctctcttattgggggccaccgcacacgcaatcgccagcgtcccttatattcacacaacgagactccatcaaccacgaatcttttgggagctggtggtaatggggacgatcaatccacgatatttgagcatgaaacggagcgaccgggtactgcagagcagactgtacacgacggcgatgacaatgcggatgttgctactttgaatacagcggtatcagagggctccactatcggggatctacaaagacaaggttttattaacagagctcccaggttcacttctgaaagaaccatgccattcatttcaatcctactacaacgagggtattttgttttccctagtgaagagtctttccaattttttttacgcaacaagagaaaacttgataatattgatccaaaaaccggtttgggacttcccctatttcacgctgtctctttgaacttagtcaagtccctctttagtaatcataatactccggtaatgaggatttacaaatacgccataatagattttcaatgcgagaagcctccacccaattccgagctagtcctggaaataaataagaatatttcaatatataaattcgaattctgcaccattttaaaaaagctagaaagccataatttttccagtagagtagaacacgacttcatttttcatttaaacaacgagcctgacgttcatattcccatgattaattacaatcaaagaaaaaacgcagatacgacagttcatggactgaatctccgttggtatgggacaactagtttggcctcaccgttcgggtcaaacagcatcaatctgcttgttctcgacgataccatggcatcttatatgaaccaacctactatagaagagtttgattcttattgtcgttcacgccctacaagaccattgggctatctcccagtatgggctagatatactgatgataaggttagtataataccgaaaaagagatcgttgagggtggctaccctttacatgcaggagactgattccttgaatgacgaatctaattcgacgacccccactccgtgtaccattggtagtgaaatacaccccaatattattgacacaatcccgtgggatagccaagtattgacttgtatgtgcatgcttttgcacgaatatgaatcaagaaaggataaacgtcacactgcatggggaagttcaaccggttatatgttgaatggacctgcaggattacttatgtaa

SEQ ID NO: 2149 - DNA, 219 bp, Saccharomyces pastorianus
atgtctgacaagcctgactctcaagtgttttgcccagactgtaatgagagacttcaaaaatgtttaatacagcaaaattacgccatcatcatatgccccagcctcacctgtggctacccatttaaccaaagggaagtgctcgaaaacttaacgtacgtagatgataacgacgttttgagagttgcaaaaaaaagactgtctacgcggagtaaaccatga

SEQ ID NO: 2150 - DNA, 2304 bp, Saccharomyces pastorianus
atgtatactagtaacagtaatcatcatggaagtgcgtctccctcaggacaaggctattatatgtcacaacaacaagatcaacagcagcaacagtattccaacgatatgaattcctaccaacaaatatctagaccgcctgctgcaggattcagcagtaactatatgaaggagcaaggctctcatcaatcattgcaagaacatttacagcaacgtgagaccggcaacacgggcggtggttttacagatatcccaacactaaattatcctgccacaccgccgccacagaataactataccgcaccaaatcagatgattagcaccccacctccatccatggggggtctttacaggcacaataacaattctcagagcctggtgcaaaacggcaatggaggcggaaatgttctgcaatcccaattatctccaggtcagtattccatagaatcagagtataatcaaaatataaatgccagcacgtctagtagcccattccatcaaccgcaaacagtccagagcaatggatcgtactcaagtgggttaagaagcgttaagagttatcaaagattacagcaagaacaggaaaatgcccagtttcaacaacaagtgcctccagcgcagcagcaaaattcacagcatcaacagcaacagcaacaacttcaatttcagcaacaacaacaacagcaacaacaacaacaacagcaacagcaacagcaacaacaacaacaacaacaacagcaacagcaacaacaacaacagcagcaacagcaacagcaacagcaacaatcacctgttcagggaggcttctgcaatggtagcatatctagctacatgtatttcgaaagacggcctgacctgctgacgaaaggaacacaagataaagcagccgctgtgaagttgaagattgaaaatttctaccaatcatccgttaagtacgccattgaaagaaacgaaagaagagtggaattagaaaccgaactcacatctcataattggtcggacgaaagaaaatctaggcaactgagttctttaggtaagaaagaatctcaatttttaaggttgcgcagaacgagattatcgttggaagacttccacaccgtcaaagttatcgggaagggtgcttttggtgaagtgagacttgttcaaaaaaaagacactggaaaaatatacgcaatgaaaaccttattaaaatctgagatgtacaaaaaggaccagttagcccacgtcaaggctgaaagggatgtattggccggtagtgactctccatgggttgtttcattatactactccttccaagatactcaatatctatatttgatcatggaattcttacctggtggtgatttgatgactatgctgatcagatggcaattattcacggaggatgtaaccaggttttatatggcagaatgtattttagccatcgagactattcataaattgggctttattcacagagatatcaaaccagataatattttgattgatattagaggccacataaagctatctgattttgggctatctacaggttttcataagactcacgattcgaactactataaaaagctattacaagaagatgaggctaccaatggtatttccaagccaggtacctacaatacaaatgcaaatgataccgcgaataaaagacaaacaatggttgtggattctattagtttgacgatgtcgaatagacaacaaatacaaacgtggaggaaatcacgccgtttgatggcttactctacagtgggtacgccagattatatcgcgcctgaaattttcttataccaaggttatgggcaagaatgtgattggtggtcacttggtgcgattatgtatgaatgtttaattggttggcctccattctgttctgaaaccccacaagagacgtacagaaaaatcatgaactttgaacaaactttacaattcccagacgatatccatatctcttatgaagcggaagatcttatccgccgacttttaacgcatgctgatcaaagacttggtagacacggtggcgcagatgaaataaaaactcatccgtttttccgtggtgtcgattggaatacaattagacaagtagaagcaccatacataccaaagttgagctccattacggataccaggttcttcccaacagacgagttagagaacgtacctgattctccagctatggcacaagctgcccaacaaagagaacaaatgacaaagcaaggtggaagcgcaccagttaaagaagatttgccgttcattggttacacttactccaggtttgattatttgacaagaaagaatgcgctatag

SEQ ID NO: 2151 - DNA, 1065 bp, Saccharomyces pastorianus
atgaagttccaagttgctctctctgcccttttggcatgctcttctgctgtcattgcaagcccaatcgacagcttgttcaaatacaagtccactaagactgcgcatagcagagacattaactccactttgcctgtctggaataccacttcgaacacaacttatgctaacggcacaaacggtacaaacggtaccagtaacacttcctccaacaacagcgagctacaaatcattgtaacaggtggtcaagtcccaatcactaacagctctttgacccacacaaactacactagattatacaacagctcctctgctttgaacattactcaattgtataacattgcacgtgttgtaaacgaaacaatccaagacaaatcctcctctggtgccattgttgttaccaatgccaagtctttggaagccgtctctttcttcttctctatcttattcgataccaacaagccaatcgttgtcactgaagactctgcttacgctatcccagtcgctaacgataagggtgctgctaagcgtggtgtattgtccgttacctctgataagttagtatactccggtgttttcactccagcttctaccttttcttatggtgctggtttgccagtcgctatcgtcgatgaccaagaccaagttgaatggttcttcgatgcttccagaccaactttgatttcttctagctctgttatcagaaaagaatacaacaacttcactacaccattcggtattttcgaaaacggcgcaccaattgtgccaattgtctacgatggcggttactcctccagcttgattgactctttgagttctgccgttcaaggtttggtcgttgtttcttcaggttccagcaattctacttcttcatccattgcaagcgacataattccagttgtctacgctgaagccagtacaccattgaacttcattgacaagcaagatgttccagagaacgctgtcggtgccggttacttatccccagttaaagctcaaatcttgttgtccattgctgctgttaatggtgtcacctccaagtctgctttacaagacattttcccataa

SEQ ID NO: 2152 - DNA, 870 bp, Saccharomyces pastorianus
atgtccacccaccaatatcgctcccatggtcatcggacagaaagagacgacaatgacgattatttgttccaacgatttctggttgaatcagacactaggccaaatagagaaccatcgcctacaactgaacagtctcaacaagaactacagcaagatgtgcagcaagccatcgatggcatattcaattcccttagaaggaatatgagttcgtcctctaatataaacagagctactaacgtggacccaaggagaggcggaaacgaaggaattaatgtagataacagaagggccgcaaacgcaaacgcagtcgattcgccgtttttagcaagacagcaaagtcctcttagaacttttcttagaaatctattcattttagattactttattggactaatactattcccgttttccgtgtataacatattgagaagtggattcaattcaatgactttttccgagaatgactttataattgaaattgtggggtactggaaattcgcgaaaatttttggttcaaatggcacgacacttattgcctataaagatacaggcaaattgggactacttggcaaatttcataatattatcgtattttattcttccccgatgataaaatttataatgaaaagtgccaatggtaatgaatcaaagatggactggctaaaacaaatgttttccaaaattttcgaattattcgtgaaattctctaccatcttaatatatttaatctatggcgtgagcggtactatatacatggttactgcaggatttttttttgtactgtgtctcttgtttactgttatcagaagatataaaggcgttcatagaatactggtaagccaaagaatgtcagggccaactgttttttaa

SEQ ID NO: 2153 - DNA, 501 bp, Saccharomyces pastorianus
atgtcgaacgaaaacatatctcccaatagtagtaacactgatttaccaaaactgactaatgatgagggcgaagctatcgacacaagcaaattctctcccaacgaaatgaaactattaaaaatgtatggtaagttgccatcaaaaaaagatatttttaagcataccatggaaaagagaaaatattttgatagtggtgattacgctttgcaaaaagcaggcattcaaaacaacgatccaataaattatggtaagaataatctgcccttgaccaaccctagcaagctacgagaagatataataagaagaaggataagcacctgtccatcgactgcgtctactgctggggtagtagacaacgcaactttgatacagaaggagggcagtatatcgagtggaccaccatcgtctaacaacggtgcgattggaggcagtacgagttcaactccaactggcaatcacggatcttcacctcctagtctacatggatcatccactagataa

SEQ ID NO: 2154 - DNA, 888 bp, Saccharomyces pastorianus
atggccaatagaagagaaccggatccaaaaaaaagcaccgaatcaattagttctttaactaagccccagctttattcattgtatgacgatgacgtagtgagatcggaagataacgacatttatgaggaattgaaacggtctgtctctatagactctggcagatatagcagagatcaaacgattgattctacgtttggatatggcgataaggtaagtagttcgctccctaggaatccagtatcgtcaaataatctggaaaggatattatctgcttcatccattcaccaaaacttcccatccaggactatgaaaacccgtcagaatttcgttcattacttgcaagccattttttttttatcattaagtggcatagcataccatgaactatcaagaaacttgcacgataatcatcttttacatccagaattcgcatcaagacctcttattctcggcgttaaaatatgcaatggggttttaccggactggttgggttacgccattgagggggtgttatttggttctatcataccgattctagatcacattttccaaacagaggttgttaagagctcagtaccccacgacagcttgctttctgtgattagaagcatcaacgccatgttaggtgtcacgtttggcataagaaaaatacagtggaactcttctctacaagctgcaggtgcatgggggcttctaaatgtgatattatggttatttttcgatggttccatatctatgctactgagttgcatctgtatcgggataagttgttgcatttcttgttataaagacattattgatggttctcagttagtatatttcatggatttttacttccttggttctttaatgttcggtaaactaggaagatatttatattctcattaa

SEQ ID NO: 2155 - DNA, 1683 bp, Saccharomyces pastorianus
atgtctcaggtgcaaacttccttaacgggaacgaattcaggtctagcagtcaataatatatcaactacaatgaattcacaaatgcccaatcgtagtaacattagattggtgaatggcaatttgcctccatccttacacgtcagttccaatctgaatcacaatcctggaaacagttctgcttcgcattctggctctcaatctcgtgatgattcaagcatagttggattacattacaagataggtaagaaaattggtgaaggttcatttggtgttcttttcgaaggtaccaacatgattaatgggttgccagtggctattaagtttgaaccgagaaaaactgaggctccacaacttaaggacgaatacagaacctataagattttagcaggaacccctgggataccacaagcatactatttcggccaagagggactacataatatattagtcattgatttattgggtccttctttggaagatttattcgactggtgtggaagaagattctcagtgaagactgtagtacaagttgcagtgcaaatgataactttgatcgaagatttacatgcgcatgatctgatatatcgtgatatcaaacctgataacttcctgattggaaggccaggacaacaagatgccaataaagttcatctgattgattttggtatggctaaacaatatcgtgatccaaaaactaaacagcacattccatatagggaaaagaaatcattaagcggtacagcaagatacatgtcaattaatacccatttgggtagggagcaatccaggagagatgacatggaagcaatgggtcatgttttcttttattttctgagaggccaattaccatggcaaggcttgaaagcaccaaacaataaacaaaaatacgaaaaaattggtgaaaagaaaaggctaacaaacgtttatgacttagctcaagggctaccaattcaattcggtagatatttggaaattgtcagaaatttatcatttgaagaaactcctgactatgaaggctatcgtatgttattactatctatcttagatgatttaggtgaaagtgccgatggacaatacgattggatgaaactgaacggcggtcgtggctgggatttatcaataaataaaaagcctaacttacatggttatggtcatccaaatccacctaacgagaagtcaagaagacacagaagtaaaaaccatcaatactcatcacctgacaatcaccatcagtatactcagcaacagcaacagcaacaggcacaagcccaggcacaagctcaggcgcaagcccaggcccaggctcaggcacaagcacaagcacaagcacaaaagcaacaacagcaactgcaacaagctcaggcccaacagcaagccaatcgctaccagttacaacacggtgattcgcattacgatgaagagagagaagcttctaagctcgatccaacttcatatgaagcataccagcaacagactcaacaaaagtatgcccaacaacaacaaaagcagatgcaacagaaatctaaacaatttcctgatactaatgctaacggtcaaactaacaagtatccatatggtgcacaaccaacaacaaacaacgagccaaacgccaacaacgcaactcaagacatgagtagtaataaatcctctaagggatttttcagtaagatgggatgttgttga

SEQ ID NO: 2156 - DNA, 390 bp, Saccharomyces pastorianus
atggaattgttgccccagggacaaaggaacaacacacaggtgacgtttgaagaccagcagaagatcaacgagttctcaaagctgatcatgcgcaaggataccgttgcgcaggaattgactttgcagaaacaggagaaggagtacctcgatgatgtttccctggagatcgaactgatcgatgaagacgagcctgtgcagtacaaggtcggcgacctcttcatcctcatgaaacaaagcaaagtggccgcacagctcgaagaggatgcacagcttctcgaggacaagatccagaccctgcaggataagcaaggtgagattgacggccgtcttgatgctctgaaggcttccctgtacgccaaatttggcgataatatcaaccttgaacgttaa

SEQ ID NO: 2157 - DNA, 390 bp, Saccharomyces pastorianus
atgtctgaagtggcggcaacttggatagagaccctcttaaccagaataatcaactatgattacaaacatttcataagattggtgatgatcgtaggcggttatatgttggtgagaaatatagcatccagagaattggctaagaagcaattggccgctcaagtggaacatgacaaacgggagaaagaggaaaaaaggtctgaggagctgattgataaactagacggaccttccgtagcagaaacgacttctttcggttggggtaagaagaccagacaaagggtgaagaaacaacaggagctgtttgaaaaggctctggaagaggccaaacaaaagcaacaaggaagagatccagatagtgacgcagatatcgaggaactgctggaagaataa

SEQ ID NO: 2158 - DNA, 738 bp, Saccharomyces pastorianus
atggtcacggttattatagagagcgaattggttcacacagagaaggacttcccgcagatgctcagattgagcgagttcaaggagaagctttaccgcatcaccgggatagagcccagcgacatggacttggtggtgaagagacagtacgacaacaaggagatatgtcacgtgaagaaggaggaatcagacgcggattgcgactttctggcctccgcggagacgttagttgtggtggccacagacactaacgcacactcggtcacgaaccaactggccgagcaggccgatggacctacaccagctcagggaatcagcgaagaggactacttacaaagagaccagtccgttttgcgatggaagatggcccatgggtacggcaggtttgatgttgcccagcagagccaacgtgctgcacagacgttacaagacgaggcgtacgcccgcgagcatctaacggcggctatcggcctcgcttgccgggtcacgtcagacggccgcgcgccccgcgaggccgtgctgcggtacgtggggccgctgccgtcgggcgggactggcacgtggtgcggtgtcgagttcgccgaggcctcgggcaaaaacgccgggtgcttccagggggtgaccctgttcgggccagtggcgccgggtcacggattgttcgtgcggccgagggcggtggagattctggccgaaaacgaaggtgccgttcatcgtgatgaggagagcgatggtgaaatttga

SEQ ID NO: 2159 - DNA, 303 bp, Saccharomyces pastorianus
atgagtaacactaaacataccacctctcatcatatagatttcaaaaggatcattaaccttgtgctcttcttcataataatagcattgatttttcaaaactcagcatatttcaggacggcattccaaaaactactctcagggttttacaaaaacaatcatcagggccctgccagtagcgtaaaaccattgcctatcttttcagaaaacttgatagatttcgacgacgttaacgtggtagacaagacaagagtagccatatttctggttttctgtttcatcattaccataccgtttatggtataa

SEQ ID NO: 2160 - DNA, 117 bp, Saccharomyces pastorianus
atgcaaccagtcaccaccatctctgcccaagcttctcaaaaggacaagtcttccgagaagaaagacaactatatcatcaagggtctgttctgggatcctgcctgtgttatcgcttaa

SEQ ID NO: 2161 - DNA, 1044 bp, Saccharomyces pastorianus
atggtctcccaagagtttttacaagaattgccaaagtgtgagcaccacttacatttagaaggtactctggaaccagatctattgttcgtattagcgaagagaaacaaaattaccttacccgacgcattccctaaatcaatcgaagaattaaacgtaaaatatgaaaaattccgcgatctacaggatttcttagattattattacatcggtaccaatgttttaatcaaggaacatgactttttcgatttggcatgggcttattttgtaaaagtccacaagcaagggttggtccatgctgaggttttttatgatccccaatcccatacctccagagacatttctatagagacagtcactaagggcttccaaagagcttgtgacaaagctcaggctgaattcggtattacatccaagctaatcatgtgccttttgagacacatcgaacctgaagaatgtttgaaaaccatcgaagaagccactccgtttatcaaggatggtaccatttctgccttaggtttagattctgctgaagcgccatttccaccaaatttattcgttgaatgttacaaaaaagcagcctctttaaaccaagatctgagattgactgcacacgcaggtgaagaaggttctgctcagttcgtctcagatgctctagatttgttaaatgtgaccagaattgatcacggtataaatagtcaacacgatgatgaattactggatagattagctcgcgatcaaatcttgctaaccgtctgccccttctctaacgtcaaactacaagtcgtcaaatctgtttctgagttgccattgcaaaaatttctggacaaaaatgtccctttttctttaaattctgatgatccagcttattttggcggttatatcttggataactacattcaagtctcaaaggatttcccacactgggatcatgaaacctggggtcgtattgctaagaacgctattaatggttcttggtgtgatgataaaagaaagggcgactggttggataaagtggatcaagtagtcactaagtattccaattaa

SEQ ID NO: 2162 - DNA, 1599 bp, Saccharomyces pastorianus
atgcccgactctaaatatacaatgcaaggttataaccttgttaaactattgaaaaggttagaagaagccaccgctagattggaggatgttaccatttaccaagaaggttacattcaaagcaaattagacgcttccaagacgaacgtatctagcaactcgggtacttccaccagcagagcacctacaaagggttcttctttagagaacgttccagaagtccaagaagatccgaaatgcgttactgccttccagacttatattaatgaaaacattgatagattggtagagctatcagggaagatcgatgcagtggtcttagatgctttgcatttgctaaaaggaggatttcaatcccagttgattttcttgagagctgctgtaaagtctaagaaaccggattattcctcccaaacatttgctgattctttgagacccatcaacgaaaacatcataaaactgggtcaattgaaggaatcgaaccgtcaaagtaagtactttgcatatttgagtgctttatctgaaggtgctcctttattctcttgggtcgcagtggacaccccggtatccatggtcacagatttcaaagatgcagcacagttctggaccaatagaattttgaaggatttcagagaatccgatcccatcgccgttgaatgggtcaagactttcttgaccgcttttgataatttgaaaacttacatcaaagagtatcatactactggtgtgtcttggaagaacgacggtatggagtttgccgatgctatggctcaatcggcaaatacaacaccagttccatcagcgccagcttcaactatttcacaaacaggcagttcagcagccgcaccaccacctcctcctccaccggcaccaccagcttctgtgttcgaaatttctaacgatgctccctcgagtagcaataattctggtaacgtcggtattggtgctgtttttgctgaattaaaccaaggtgaagacatcactaaaggtttgaaaaaagtagataaatctcaacaaactcacaagaaccctgaactgcgtcaatcttccactgtttcctccgcggaaggtaaaactggtccaccaccaagaccaaagaagccatcgacattaaaaactaagaaacctccaagaagggaattagtgggtaacaagtggtttatcgagaactacgaaaacgacaccgagtctctagttattgaggctaacagagatgagtctatcttcataggtaaatgttctcaagtacttgttcaaatcaaaggtaaggtcaacgctatctcattgagcgaaactgaatcatgcagcgtggttcttgattccagtatttctggaatggatatcattaaatcaaataagtttggtattcaagttaaccattcggtacctcaaatttctatcgataaatcggatggcggtaacatctatttatctaaggaatctttgaacaccgaaatatacacttcttgttcaactgccatcaatgttaacttaccaatcggagaagacgatgattatgtggaatttccaatccctgaacaaatgaagcataacttcgccgatggcaaattcaaatctgccgtttttgaacatgctggttaa

SEQ ID NO: 2163 - DNA, 1275 bp, Saccharomyces pastorianus
atggcagtacactggacgattgtagatgaaatacgacttcttagatgggcatccgaattcaagccggccggaattcataagcattttcacatgttttgtatagtggaaagaatgaactcgccagataagtatccagtgacattattgcagaaggagaccatgaaattggggaaagtttttaccgctacagatatatgggagaaattgagtcaatcttacaacttaaaagacattgacaaaagggaaactacgtttcccatcgcaaccacgacagatagtgcgacaaatgataatgattatgatgataacgataagagtattcatgaggaaacgttactagagctgaacaatcgaataaggacacgaaaacaagactttactctgccttgggacgaatacggggaattgatcttagaaaatgcaaaaaagagtccaaccccaaatgaagaggaaacgcaaattgagccttcaaatgatacgaacggtcaaacacccaagaagacggctgaaagtcctaaaaaaactgtcaaaaaggaagaaaacaaagatgtggaaggtggaaaagtgggtgacctaaaagaatctaacacaaatgagaataatagccctacgcttgattccaaaaacgaatcaatgcaaggcctaccagatgatggaaaatacaaaaaaacagaacattcgagtgatgaggaacagaagatgaaaaacgaaagtaaagccgcagctcctataaggaaatctcaaaggttgaaaaggaacaaagaggtaaaatttgaagacgaaggcagagaagaagcaggagaagaaaaagagcaagaagaagacgagggattagtaaaagaagactatgataaagccatcgaagaagaaggcgaagaatgtaatgggaacgaagaagaaaatgatgaacgcgaaaagtctagctcttctgaaaccacgaatggatctgaaagtgaggaagctgacgaaacactcgaatctgattctgatcatgagagggaggacacagaaaaggacctaggtgcaaagcctgattctgaacgtgacactttaaaaaggaaaattgaaaataagaatgaagagagtacacaggacggtgaaaaaaagaattccaaagctcaggatgaaccattagcgagaagaacgaggcattcgtcatctgcagggaacaccagcaatgaaacctcgccaaagaggcaaagacgaaaggcaggttcccgcaaaaataggactccggccactagagtatccagtaggcttcgaaacaaaaaatag

SEQ ID NO: 2164 - DNA, 345 bp, Saccharomyces pastorianus
atgtctgaagtaattgaaggtaacgtcaaaatcgacagattatccccaggtgacggagccaccttcccaaagactggtgatttggttactatccactacaccggtactttagaaaacggccaaaaatttgattcctccgttgacagaggttctccattccaatgcaacattggtgtcggccaagtcatcaaaggttgggatgttggtattccaaagttgtctgttggtgaaaaggctagattgaccatcccaggcccatacgcttatggcccacgtggtttcccaggtttgattccaccaaacagtactttggttttcgacgttgagttgttgaaggtcaactag

SEQ ID NO: 2165 - DNA, 3171 bp, Saccharomyces pastorianus
atggcgaaaaaagctatcgattcaagaatcccttcactgatcagaaatggtgttcaaaccaaacaaagatcattctttgtcattgttggggacagggcacgtaaccagttgccaaatttacattatttgatgatgagtgctgacctgaaaatgaacaaatccgtattgtgggcctacaagaagaagcttttaggtttcacttcgcacagaaagaaaagagaaaataagatcaagaaagaaatcaaaagaggtacaagagaagcgaatgaaatggacccctttgaatcctttatttctaatcagaacattagatatgtttactacaaagaaagtgaaaaaatcttaggtaatacttatggtatgtgtatcttacaagacttcgaggcgttaactccaaatcttctagcaagaaccattgaaaccgtcgaaggtggtggtatcgtggtgatcctattgaaatccatgtcctccctgaagcaattatacacgatgactatggatgttcactcccgctatcgtactgaagctcatggtgacgttgtagcgagatttaatgaaagattcatactatctttaggttcaaatcccaactgtttagtcgtcgatgacgaattgaatgtgttgccattatccggtgctaagaacgttaagccattgcctcccaaggacgatggtgagttatcacccaaacagctagaactgcaagaactaaaggagtctttagaagacgtccaaccagctggttctttagtcgctttatccaaaaccgtaaatcaagctcacgctatcctgtctttcatagacgcaatttctgaaaagactttgaatttcacagtcgcattaaccgctggaagaggtagaggtaaatctgccgctttgggtgtttccattgctgctgctgtctctcacggttactcgaacatttttgttacttctccatctcctgagaatttgagaacattattcgaatttatatttaaaggttttgatgcgttagggtatcaagaacatatcgattacgatatcattcaatctaccaatccagactttaacaaagctatcgttagagttgatatcaaaagagaccatagacaaactattcaatatattattcctcaagattaccaagttttgggtcaagctgaactagttgttatcgatgaagcggcagcaattccgttaccaattgtcaagaacctattgggtccatatctagtttttatggcatctactatcaatggttatgagggtactggtagatctttatctctgaagttgatccaacagttgcgtaatcaaaacaacacatctggtcgcgaaagttctcaaacagccgttgtttctagaaataataaagaaaaagactctcaccttcatgctcaatcgcgtcaactacgtgaaatctcattggatgaaccaatcagatatgctcctggcgatccgatcgaaaaatggttgaacaaattgttgtgtttggacgttaccttgattaaaaacccaagatttgcagcaagagggactccccatccatctcagtgtaatctatttgttgtaaacagggacactttattttcttaccatccggtttcagaaaatttcttggaaaaaatgatggcattatacgtttcatcccactataaaaactctccaaatgatttgcaattaatgagtgatgctccagcacaccaactgttcgtccttttaccaccaattgatccaaaagatggtggtagaatcccagatccactatgtgttgttcaaattgcactagaaggtgaaattagtaaacagagtgtcagaaattcattatctagaggtcaaagagccggtggtgatttgattccttggttgatttctcaacaattccaagacgaggaatttgctagtttgagtggtgcacgtattgttagaattgctacaaatcccgaatatgcatctatgggatatggttcccgtgcgattgaattattaagagattacttcgaaggaaaattcacagacatgtcagaagatgctcgtcctaaggatttctctatcaaaagagtaagtgacaaagaactggccaaaagtaccttactgaaagacgatgttaaattaagagatgcaaagtccctaccacctttacttttgaaactttctgaactgcctcctcattatctacattacttgggtgtttcgtacggtttaacacaatcattgcataaattctggaagaacaataaatttattcctgtgtatttacgccagactgcgaacgacctaactggggaacatacctgcgttatgttgaatgttttggaaggaagggaaccaaactggcttgtggaatttgccaaagatttccgtaaaagattcttgtcgcttctttcttacgatttccacaaattcactgccgtccaggctttaagtgttattgaaagtagtaagaaagcgcagagtttgtctgatgacgaaaggtttgagaccaaagaactgacacgcttacaaatggacgacattttctctccatttgatttgaaaagattggacagctactccaacaatttactagattatcacgtcattgttgatatgatacctatgcttgcgcttctatattttggtggtaaaatgggtgattcagtaaatttgtctagcgtacaaagtgccattttgttggccattgggctgcaacgtaaaaacatcgatctaattgctaaggaattgaacttacctgccaatcagactattgctatgtttgcgaagattatgagaaaaatgtcacaatatttccgtcaactgttgagccaagctatcgaagaaactttaccagtggtcagagacgaaaacatagccgaaatggatggtgaagaaatcaagaagtacaacgctgctgaagcattagaccaaatggaagatgatttagaggaagccggctccgaagccgttcaagctatgagagaaaagcaaaaagaattgatcaactctttgaatttagacaagtatgccatcaacgataacagcgaggaatggaccgagtctcaaaagtccttagagaaagctgccaaagccaaaggtgttgttagtgtaaaaactggtaagaagagaaccactgaaaaatctgaagatatctatagacaagaaatgaaagctatgaaaaagccaagaaaatccaagaaaggcggaaattga

SEQ ID NO: 2166 - DNA, 459 bp, Saccharomyces pastorianus
atggtcgaattaactgaaattaaagacgatgtcgtccaagtagaagaaccacaattcggcggaaaccaagccattatcgaagaaaagactgccgcacaaaacgacgatgttgtagatgatgaagacgaatctgacagtgatttcgaggatgaattcgatgaaaacgaaacattgttcgatagaatagttgctttgaaagatatcgtacctccaggtaagagacaaactatctctagtttttttagttttacgagctctcttgtaaagaacgctttctccagatccggaaaccttgcctggactttgactaccactgcgttgttgctaggtgtcccattgtcattgtccatactagctgaacaacagctaattgaaatggaaaagacatttgacctacaaagcgatgctaacaatatattagcccaaggtgaaaaagaagcaccagcaattgccaactaa

SEQ ID NO: 2167 - DNA, 723 bp, Saccharomyces pastorianus
atgacttcgaagaaaataatactcgttgccttgagtggatgctcctctagtggtaaaaccactatagctaaactcacagcgaacttatttaaggaggccacattgatccatgaagatgatttctataaacatgataaggacgtaccagtagataccaaatataacattcaaaactgggactcaccagaagctttggatttcaaactatttggcgcagagttagatttaatcaaacaaacaggcaaaattgcaaccaaactaattcataatgacaacgtagatgatcccttcacaaagttttgtattgataaacaagtttggaacgagctaggagctatgtatgactctattgatcatgacaagtatcaagttgttattgtagatggatttatgattttcaataatactgaaatatctagaaaattcgatttgaaaattttagtgcgtgccccctatgaagtattgaaaaaaagaaggtcctccagaaagggatatcaaacgttagattccttctgggtggatccaccgtattatttcgacgaatttgtgtataagtcttatcgagaaagccacgcccaattgtttgttaatggagatgtagagggtaatttggatccagtaaaggccaagcatattaaagagtttataaataacgacaacacaccgattgaaagccctttaaaatcggtgtgctatgaaattttaaagctttgtaaggactag

SEQ ID NO: 2168 - DNA, 2901 bp, Saccharomyces pastorianus
atgaatactagcggcaggtctcattccaaaggtccgattataaggtcagtatcattagaagatttaaagaggaactcaagtttcaaaaacactttgaagtacaaagatgatgtacccgcacataaagaaccgcaaaccagcgcagtaagtaacgaagaactgctgaaagatttggataacatgttgcgcaacaagcttaatattggaagaaacgcctttcatgccgataaaagaaacaaatcagatagtaatatcagtgccttaaattttaaagcaagatctggtcttgatggagactttcgcactatagacacagagcaagataatgatgacgatgatgacgatgatgctgatgatgacgatgatgatagtaatgctaatgattttaaattgggtgcagatggcgctaataaagatgaggacgaggagaaagttaacaacactgacaatgccgttgaatttcaagacgatgctgaagaagctgaagaagagaatgaagatgagtcgtttgctaatgttgatgaacttgatggctttgatttaaataaagctgcggataataagcacgctcctgtaaatgaaaagggtgaaattgattataatatgcccgttgacaaggagtttcaaaaatcactcgaccaatgtgccgcttctcttgaagggagagcaagcgctccttacgcattacaaagagccgtggattgggaattgaagatgttttataccttagaggacgaactttcagaatggttttgtagctccgactatattcattttggccaagcccagacacaattcaaacaaaagataaacaacccacgactatttttcgatgatgagaactacgctgaaagtgtagtaaaaggtttaattgaggatatccccaacgttttgacaccgaatttactagcgttgacgtacatatctatggggtgctttgcgtatacaagcaacaaagatcagcatacaaagattatacggcgtaacaatatcatgcttgttccttatattcaagaaatcgttcacgcttttaagaagattgctataaattgtagggatgataccagaaatttgaaaaagcagacaatcttactattttactcatcaacaatcctctattttatatccgccatttgtatcaatggaagagatgaaaacccagaagctgttgagcaagttatacatgcatttgacaacatggatttgatagagtttttaaccaagtatattgaaagttggagatggaatagtaagttagctatgcgcataagaaatatgattttattgcttttcaagcttatagttttgcaactcggtgatgactcggtgtacaaaaaaacaaaatcagccatttataaactccatggactgaaatacccattaaatcatccagaaaagttatctatttctccattacattatcaagcatttagggaagacataacttctcgttttcccgactataacatgccatcttctcatttgcctaaagatgtcgacaaatcggagtctttatctcaatttttggaaattcctcgcccaaaatcaaagaatcctctaaatatgacgttgaatgttcctgaaaagcatataactacacctgcgccttcgccaccgacctccccacagttaatgcatttaggggaaggttctaggccaagaaaatccttccagacaaatatggcatatccatgtttatatccatctgataatgaagagcttgaggatgatatcctagaagatagaatggacctccattccaacaaaacatctaataatgacataattattccgtttagcacggaggaagcagccaaaatattaagtgacaacttggaaattaagctaagtacaaaacagctttggcatgagagagatttatttatgataacagagcgcggttggaaacttcaatcagaaaacgaaccatacaattactctaccttcgatatcgacagcaattcttcaacaaaggaaagagatgctattcgcatcatgcaaagaattgacaaatactataaaggctgtctttcgagcttcaattctcttgttttcgtactactacaaacaatggaatcaagcttaacaaacaactttcacagaaaaactgaggtttccgacaaaaatctattaagtatgttagcacctcaactggagattgtaagagctaaggaattatccctaaagtcggctgctggaatactacacgcattattaaagtggtttaaactaagccatattttgaagtttgaacatctgtcagtagttattcacgattcgcgatacattaacacatgtgcgtctattttaagcaaatattctgaaatttattctgaaaaggttttcaataaatatgtgcaaactcctaattcattttggaaagaatgttctttgcataacgaattgtatcgtgaatcttacggaacggaagactcgaaagagatcaacacagaggtgcttccatcttttgcatatcttttaaggatcttgagaaaaatcacaggaaataaaacgcaaagattaaaggaactgcccttatccattggaattttattcaaacgctactatcgacttttcaaccttgacatgtaccatccgatattgaagataacaagagaactcacaccttttaaaaataagaggtggaagtcagaacacatggaattgatatccggtgtttatctttacgaaaagttggaattgacagacaactgggtaacaggtaaggatatatctggggagttgagcgatgcttgcggacaggaaattgcgctcagagccttacttcagttttacaatttccaacattatgaaatctccatggaagatcttggatatggacaccgtaacaattctagtcaggatctcttaaataaggaatctgagtacttgaatatttag

SEQ ID NO: 2169 - DNA, 2013 bp, Saccharomyces pastorianus
atgtcactgcaatcgaataattacgtctctgctcgctcagggatggcctccgaagacgcatcggaggtctcctcgataaattcttcattgcccgcatcctactctaaggagtttgctgctggtccagcgcctctttctgatctgcaaagcaccaagtcgaacgatggctcaagaggtttgtctataacgagaaccttgactagccggtttcacgacatcaagaaagcggtcgatgacgacaacgcacagacagatgaggcttctgcagacgtcaataaactattagaatcgaggttcgaagtggccgacgctcttagactacagcacaatgagtcactccaatcagatttgaacctccccgctacatattccactactgcaggagcttcctcgtccacgcagtctgtttctccatcttctgttcgaaacgacaccacacggcacaaaacctccatggactccaaacttatgaggaacaggctatgttcagcgtccaccaaaggctccgccaaggacctcgaggcccagggaatatctgagttcgaacccgacgagccgaccgtaaaaagagtctttaccaacaagtctaccgggcagttggagctgcctcccgatggtgggtatggctgggtcgtgacgttctgtgtctttttgaccatgttctccacgtgggggtgcaacgcatcttttggtgtggacctggcttattatctgaaccacgacacttacccaggcgcgtctaagtatgactatgccttaatcgcgggtcttactgtgtgtcttggtcaaatcctgtcccctttcgtgatggccctgatgagaataatcggtctacggactaccatgctttttggtaacgccgtcatgcttgctggatatatcttggcttctttcacaaccaagctatggcaattgtatctcacccagggggtcatgatcggttgttccatatcgctaatttttgttccagcaacaaccgtcttaccaggctggttcttaaagaaaagggccgttgcgatgggagtctcattattaggcactggtgccggtggtgtcgtatatggcctggccacaaataaaatgctttccgatttcggtgatacgagatggtgtcttcgtatcttgggtatatcgtgtaccctaagtattctcgttgccactgcattaattagggaaaggaaccccacccccgctgtcggcttaaggtcattccgagccatggttggtcaactaaaggcaatgttttcattaaaagttataacaaaacctttcgtttcattaattgcgctatggttcatgttcgcactgtttgcttataatctgatgatttttactctatcttcatatgcaatctcgaagggtttatcttcacacaacgcctccacattaactgccattttgaatggttctcaagctattggaagacctataatgggtcttgccggcgacaggtatggtagagctaacgtaaccatcattttaaccactttgttagcggtatacatgttcgcgttttggattcctgcacataccttccttcaactgattttcttttcaatcatggttggttcatgtgtcggtgtcgctaacgtcatgaacacggtcttgattgctgatatggttaaaccagatgagtttctacccgcctgggccttcgtcaactattgcggtgctcctttcctgttggtttgtgaagtaattgctcaagctttaactgtggaagacgataaaagcaacccgtatttacatacgcaaattttttgcggttgttgtttcattgctgcactaattttgatttccatccttcgtgaatattctattaaattgaaattaacagaaagacaagcaactacaaacgagcaattacaggattggaagacaattgattatgacactgattctgctaatgaagattggagtaagctgaataagagaaaattaaaatatgaccttcttttgggtcccggtttaaaaaaatacctaatgagaatggtatacccaatgaaagtttaa

SEQ ID NO: 2170 - DNA, 2994 bp, Saccharomyces pastorianus
atgactatatcgttgagcaatataaagaaaagggatcacgccgaggtttccgatggactttcagctgaaacatcgcccgtgaagaggaaacagttggaatgcgccactggagaacaagatgaagactacacagaccacgaggttgtcatagagccacttcattttgctaacaataatgctgcggtgctcacggactcagaaaattacttgagatggcaaaacactatttccaatgtggttcaatcagtagtctccattcatttttcacaagttgcaccattcgactgcgattctgctttggtgtctgaagctacgggattcgtggtggatgccgaattaggtatcatcttgacaaacagacacgttgtcggaccgggcccttttgtaggttacgtggtttttgataaccatgaagagtgtgatgttataccgatttatagagatcctgttcatgatttcgggttcctgaaatttgacccgaaaaagataaagtactctaaaattaaagctttgaccttgaaaccaagtttggctaaagtcggttccgaaattagagttgttggtaacgatgccggtgaaaagttaagtattctagcaggttttattagtagaatcgacagaaatgcgccagaatatggtgagcttacatataacgatttcaacactgaatacattcaagctgctgcatccgcctccggtggttcaagtgggtctccagtggtgaatatagatggatatgcagtagccttgcaggctggtggttcaacagaagcttccactgatttttttctaccactagatagaattttgagagcattggtctgcgttcaaaacaatcaacctatcactcgtggtacaatccaagttcaatggttattgaggccatacgacgagtgtagaagattaggtttaacttcagagagagagagtgaagcccgcgccaaatttcccgaaaatatcggtctcttggtggcagaaactgtcttgagagaaggcccaggtgacggtaaaattagagaaggtgacactttaatttcaataaacgacgaaactatttcttcattcatgcaagtagataaaattcaagacgaaaatgtgggaaatgaagtcaatttggttatccaaagaggtggtgtcgaacataacgtcgtttgcaagattggtgatctgcattctatcagtcctcatcgttatgtagaggtttgtggagctacttttcacgaactgtcataccaaatggcaagattttatgcattgcctattcgaggtgtatttttaagtagcgcatcaggatcgttcaattttgattcaaaggaaagagtaggttggatcgtggattctataaacaacaaagaaacacctgatttggatacatttattgaaataatgaaaaccattccagatcgtaagcgtgttactgtacgataccatcatctcacagatcaacattctcccctcgttacatctatttacattgaccgccattggtgcaatgaatttagagtatacacaagaaatgacactaccggtatttgggatttcaccaatgttgcagatccacttccagctgaaccattgaaaccacgctcagccaaaattattcctattccaatcaaaaatgatgaaatagctaaactatcatcttcattatgtacggtggccacaatggctgcagttccattggattcgctttctgcaaatatctggaagacatctggtttgattgtcgatgccgaaaaaggatatgtgcttgtctccagaagagtggttccgcatgactgtctcgataccttcgttaccattgcagactctcttgtggttccagctacagttgaatttcttcacccaactcataatttcgccgtagtcaaatatgatccaaaattggtagaggcccaagtaatcactcctaaattatccgccacaagaatgaaacgtggcgataaacttcaattcataggttttactcaaaatgagagaattgtcacgtcagaaacaactgtcactgacatttcctctgtaagtatcccaagtaatctaattccaagatatcgtgctactaatttagaagccatttccattgactgtaacgtcagtaccagatgcaattctggtattttgacagataatgatggtaccgtaagaggcttgtggctcccatttttaggtgaacgattggaaaataaagagaaagtatatttgatgggtttagacataatggattgtaaggaggtcatagatatcctgaaaaatggtggtaaaccgagaatgagtatagttgatgctgggtttggttcactttctgttttacaagctagaattagaggagttccagaagagtggatcacgcgtatggaacaagaatcaaataatagactacaattcatcactgtttctagagtgtcttatacggaagacgaagttcacttagaaacaggtgatgtcattttatccgttgatgataagttagtcattgaaatgaatgatttgaatggggttataagctcggcagatggtattttacccccaaccatactgaatttcaaagtggttcgtgacggtaatattgtagatttgaagatcaaaaccgttgaggtcaaagaaactgatcattttgtaatatttgccggtagtatcttacaaaaaccacaccatgctgttttacaagcaatggctgatgtcccaaagggtgtctactgtacatttaggggagaatcatcaccagcaattcaatatggtatctccgcaacgaactttatcacacatgtcaatgaaattgagacccccaacctagataaatttctggaggttgtcaaaacaatttcagacaatagttattgtaagatgagattgatgacatttgacaatgtaccatttgctatttcactgaaaacgaattaccattacttcccaaccgcagaattgaaaagagacaacgtgacacgtaggtggattgaaaaggaatttaccggaaatagccaaagcgaaaaatag

SEQ ID NO: 2171 - DNA, 1854 bp, Saccharomyces pastorianus
atgaagagttttatttcaaagaacaaaactgccattttggccaccattgccgctacaggtactgccgttggtgcatattattattacacccaattgcaacaacagcaacaacaagggaagaaggaaacgctctctcgggatgaaaagaaggaggaaaaggggtctcagaagaaagctgaaagtgctaagaaatcggcaagtgaatcaaagccccccgtttatccagtcactgctaatggggaaccagatttttcaaaaaaagcagattttactgctgaagaaaaggataaatacgcattagccttaaaggacaagggtaatcaatactttagaaataagaagtatgatgacgctattaaatactacaattgggcattggaattgaaggaagaccctgttttctactcgaacttgtccgcctgttatgtttctgttggcgacttgaaaaaggttgttgaaatgagtaccaaggcccttgagttaaaacccgattactcgaaagttttattgagaagagcctctgctaatgaggggttgggaaattttgctgatgcgatgtttgatttgtctgtattgtccctaaacggtgacttcaatgatgcttctattgaaccaatgttggaaagaaacttgaataaacaagctatgtcaagattgaaagaaaagttcggtgacgttgatgccgctactgctacaccaacagaactatctacccaaccactaaaagaacgtaaggacaagcaagaaagcttaccttcagttacatctatggcctcattctttggtattttcaagcctgagttaacctttgctaactgtgacgaaaccaatgaagctgataaaaaattaatgaacgggttagctaatttgtacaagagatctcctgacagttacgatagggctgatgaatccttcacgaaagctgtaaagttatttgaagaacaactggataaggataatgaggacgaaaaagtgaaagaaaaattagctatctctttggaacatactggtattttcaaatttttgaaaaacgatccgttgggagctcatgaagacatcaagaaagccatcgatttgttcccaagagtcaattcatacatctacatggccttaattatggctgatagaaatgactctacagaatattataactactttgacaaagctttgaaattggatttgaataactcttctgtgtattatcatcgtggtcaaatgaacttcatcttacaaaactatgatcaagcaggtaaagacttcgacaaggctaaagaattagacccagagaacatcttcccttacattcaactagcatgtttagcataccgtgaaaataaatttgatgactgtgaaaccctgttcagtgaagctaagagaaaattcccagaggcaccagaagtaccaaatttcttcgctgaaatattaactgacaagaacgatttcgataaggctttgaaacaatacgatttggctattgaattagagaacaaattggaaggtatttacgttggtatcgcaccattggtcggtaaggctactttattgacaagaaatccaacagttgagaattttattgaagctaccaatctattagaaaaagcatccaaattagatccaagaagtgaacaagctaaaattggtttggctcaaatgaaattgcaacaagaagatatcgacgaggctattgcattattcgaagagtctgctgatcttgccagaactatggaggagaaattgcaagccattacttttgctgaagcagccaaagttcaacaaagaatcagatccgatccagtattggctgccaagattcaagaaactctagctaaattacgtgaacaaggtttaatgtaa

SEQ ID NO: 2172 - DNA, 2988 bp, Saccharomyces pastorianus
atgtcactaccgctacgacacgctttggagaacgtcacctctgttgatagaattttggaggacttgttagttcgttttataataaattgtccgaatgaagatttgtcaagtgtcgagagagaactgttccatttcgaagaagcctcatggttttacacggatttcatcaaattgatgaacccaaccttaccgtctttgaagattaaatcatttgctcaattaatcataaagttgtgccctttaatttggaaatgggatataagagtagacgaagcgcttcagcaattctctaagtacaaaaagagtattccagtgagaggtgctgctctattcaatgagaatttgagtaaaatattactggtgcaaggtacagaatcggattcgtggtcatttccaagaggtaagatttctaaagacgaaaatgatatagattgttgtattagggaagtcaaggaggagataggctttgacttgacagattatattgatgagaatcagttcattgaaaggaatattcaagggaagaattacaaaatatttctgatatccggggtctcagaaatcttcaactttaaaccacaagtaaggaatgagattgataagattgaatggttcgatttcaaaaaaatctctaagacattgtacaaatccaatgttaagtattatcttatcaattctatgatgagacctttatcaatgtggctaagacaccaaagacaaataaagaatgaaggccaattgaagtcttatgcagaggaacaattgaaactattactaggcattacaaaagaggagcagattgaccccggcagagaattattgaacatgctacatactgctgtacaagcaaacagcaacaatatcataacctccaacgaacaggtgccctcgaatcaacaaggagaacaagaaaaacaagaagaacaatttcaacaagaacaggagaaacaacagttaccaccaccgccaccaccactgcaacaacaacaacaaccagtctttccttctctctcagaaccatttgcaggcgccaacaatgttataccacctgcaatgcctatggtgaattcattcatgtcaaatcctcagctgtttgcttcaatgaatggtcaaccgtttgcacctttcccattcatgttaccaataaacaacagcaccaacaacaacggtggtcacaacactcttccaacgcagatacctcctaacttcaatgcccctccaaatccaatggcatttggtgttccaaacatgcacaatttttcaagaccaactttatcccaacctttttccctaccccctgctccaccattacatcacaatattttgcccactaattctgttgaaaatagttcttcttcaagacaattattgaacttattaaactcaaaaaagtctgaagaaaatgaacagattagcgaaaagccaaaattaaaaattttgcagagaggaactgatttgaattcaaccaaccaaaacgttcctcatgattctgccaactcaaattctcaagctttattaaatttgttgagaaagccggcaccatctcaagaatcccattcttccactgtagatacttcgtcactatcaaatgactcttattctgatacacaacaagaggattatgaagattttgaaagcagttcagatgaagacatggagccaatcaaagaaagaagaaactcgtcaaatgaagaagtcaaagtcaacattataccaagcgaaaaagacggccaaagaaggccaaagaaagaacaaagaacagaaaccaaaaaattcaaatcaggcgactcaacggaatccgacatcatggaatggagacctacgaagtctttagtttcttcgcaaagtaaacaaaactcattagtaagagctcctaataaagagaccagttcatatcgtcaagaaatgcacatcaacaataacagcgcgtatgaagctttcgaaagcagttctgacgaagaagacgagaagaaattaaaagaattggaacaaaagcaagacagttctaaaggaataagccaagaaatattgaaagagaataactttcaggatggcgaagttcctcacaaaaatatgacaaccgacagtaacaaatctatcaatgaaacagccaggttttcatcagctacaagtactataaaaaagacacctaaggtgaaattactaaaacgtggtgaaacaatccccactttagcaaatgaaaacaaaactcttggatcaaactcgaaccagtcttcgtcaaaagatttattgcaaatgctaagaaatccaatattttccactgtatcttcaaatcaacaatcacctaagtcacaacaactagatggggatgaagaaatcatgatgatgctgaagagaaattccgtgtctgaacatcaaaacaatgaagaatctccatcaaaattgccaaaaaaaaatgaagcaaacgcagctgaattactaggaatgttaagtcaaaaggacgctgcatctccaaaacaacctggtagtattgacgcgaacatggaaggtaattcagcaaaaggactgttgagtatgctgggaaaaggtaacgtttcaaagccacctccgactaccgataccccatcaaatgaattgttcaacttgttgaagcaaaacgaaattactgaaaaccaagaatctaataataactcgtctgaattactaagttacttgaatcctaattcactcgaaaatagatattcaaaagtctcaagcgaagacaactcccacgaattactaaacattttgcatggtaataaaagtaacaacaccttcaataatagtatatacaccacgccaacagccacttctaaggccgctgcaaccggattccccctaatgtctgctagtcaaggaaattcttcaaacgaattactaagtatgttacaaaacagaccaacagctacaaatgcacaaacgtttgacatacgttccaatgggaacatggaatctaacgaattattgaatatcttgcataggaaatga

SEQ ID NO: 2173 - DNA, 1665 bp, Saccharomyces pastorianus
atggtaaagatcagtttagataacgtcaaattgttggttgatgtggacaaagacccattcttcaagccatccaccaccacagtgggtgatattttgactaaagatgctctagagttcattgttttattgcacaggactttcaatggcaagaggaaacaattattagagaatagacaagttgttcaaaaaaaattggactctggatcttaccagttggatttcttacctgaaactgagagcatcagaaacgaccccacctggcaaggtccgattttggcaccgggtttgatcaaaagatctactgaaattacaggccctccattgagaaatatgttaatcaacgccctaaatgcccccgtgaacacgtacatgacggattttgaagattctgcttcccccacttggaacaacatggtctatggtcaagttaacttgtacgacgctatcagaaataaaatcaattttgacactccaaggaaatcttacgaattgaacggcaacgtcgctgacttgcccacgatcatcgtgagaccccgtggttggcatatggtggaaaaacacctttatgttgatgatgaaccaattagcgcctctctgtttgattttggtttatatttctatcataatgccaaagaactgatcaacttgggtaagggtccttacttttacttgcccaagatggagcatcatttagaagccaagttatggaatgacgtcttttgcgtggcccaagatttcatcggaatccccagaggcacaatcagagccactgtactgatcgaaactttaccagcagcttttcaaatggaagaaattatctaccaattgaggcagcattccagtgggctgaattgtggacgttgggactacatcttctctacaatcaagaggctaagaaatgaccctaaccacatcctgcccaacagggacctggtaacaatgacctcccccttcatggacgcatacgtgaaaagactgataaacacttgtcaccgtagaagcgttcatgccatgggcggtatggccgctcaaatccctatcaaagacgatcccgtggccaatgaaaaggccatgactaaagtccgcaacgataaaatcagggagttgacaaacggccatgatgggtcttgggttgcacatccggcactggctccgatctgtaatgaagtcttcatcaatatggggactccgaatcaaatctacttcgttcctgaaaatgtcgtcacggcttcaaacctcttggagaccaagatccccaatggcaaggttaccaccgacggcattatacagaacttggatattggcctgcaatacatggaagcgtggctaagaggctcaggttgtgtgcccatcaacaacttaatggaagatgccgccacagctgaagtgtctcgttgccaattgtaccagtgggtgagacacggcgtcacactaagtgacaccggcgaaaaggtcaccccacaattgacccaaaagatcctggaggagcaagtggaaagactatccaaggcaagtccactaggcgacaagaacaagttcgcgctggccgctaagtatttcttgccagaaatcagaggtgagaaattcagtgaattcttgactacgttattgtacgacgagattgtgaccaccaaggccacccccactgacttaagcaagttgtaa

SEQ ID NO: 2174 - DNA, 1632 bp, Saccharomyces pastorianus
atgtatacgcccattcctgccaataccccggcacccactgctccagcctcgtcgatggcttctaactcttcatccggatcgaatgccaactctagcagcactacgggcaacaactcgaacatgaggaacgctggcaatggtagagctagcggtacgtcttccaacggaagagctcgttctgggtcaggtatcagttcgtttttgaatactttcggaattagacaaaacaaccagacggcctcgtcttcttctgtggctccggatcagcgtctatttggcaccactccatccaactcaaatatgagttcggccatggaaaacgctaatgctgctccacctcagcaggaaccccgcttgcatcaccccatacaaatgcctgcatcggtccagtttcacgttcaccgtaactatcagcttccaatttccttatcgctaaccgcccccatgtccgcagatcaacaccaacatcatcaacaacagcagtctccacaaaattttgaaaatagcaatgctgcgagtattcaagaagccttgaatcaacaacagactgccactacatccaataacaatactactaccactacaacgtctactactctattgataccagcggatgtagcaagaaacaatacaggtctcgcagcctctggcttggaaggcccggcctccaccactaataatcaggaaatgtataagaatctgcgtcacttgatatatgctgcaaaccagccaaatgggacggaaattttgcatttggacttacctgcgacaatcgcaggagattcaagcaatactattaatgttgatgaagatactttgaagcaaagaaaggacaagcatggtcttttcagtataaggttaacgcccttcattgacagttcttccaccacaaatcaaggtttattttttgaaccgattataagaaaagcagggccaggatctcaattggttattggccgctacactgaacgtgtccgcgatgcaatctctaagatacctgaacaataccatccagtggtatttaaatctaaggtcgtatcaagaacacatggctgtttcaaagtagatactcaaggtaattggtatataaaggatgtgaaatcttcgagtgggactttcttgaaccaccaaagactttcccccgcttcatcgttgtcaaaggatacccttttacgggatggtgacatcctgcaattaggaatggattttagaggcggcactgaagaaatttatcgttgtgtaaggatgagggtagaggtgaacagatcatggaaactgaaggcaaactcgtttaataaagaagctttgcaacggttacagaacctacagaaattaactacaggagttgaagaagaagattgctcgatttgtttgtgtaagatcaagccatgtcaggctattttcatatctccatgcgctcatagctggcatttccgttgcgtaagaaggctagtcatgctctcatacccgcaattcatatgtcccaactgtagatcaagttgcgatttggaagcttctttcgaaagtagcgacgaagaggatgaaagtgatgtggaaagcgaaggcgatcaactggttgatcaattgagcgtactaatggaaacttcaaaggatgccgtcgaccatccctaa

SEQ ID NO: 2175 - DNA, 1956 bp, Saccharomyces pastorianus
atggaggccaacagtttagataacgaacctacaaggaaaccagcacaggcgggtgcacatgacaagcatccggaagtacaaccgcttctaaacaacaaccacaggacgcttgggggcagctcctctatcaacggtccgtcttcagttaacgaaagtcgtgatatcgaatctgaagggtttataaaggataggctattccaaattcgtaagggttataggattttcatccataattccaagtggattttgaacgttctaattttaatcaatactctttggttagtcaccacgttgatttcggatttctttttcaacatcgatgttcttttcgggtttagcaaccgatacgcaagtttcaatgacctgactttaatatttatttcaattgttgcgaactcttttaacctctggtttaacaagttgggactgtattcggccctagattatggcttgaatgtgaccctctgtgttttgacgctgttcaatctggctctgacgtatatgatcaaatataccagacagagaatcgggtttgtcggtacatttacctatttatggacatcattttcatttttcgttggcgccatatttgactggtacctcgtattttacaatgattcaataaatgaaccgttggaggaacgcagtattgaagatactactattaccgtgaatgataacaatgcaaatgtcgaaaatagcaacaacatcaacaacagcaacggaggccaatacgggtcggccccaacaactcctacgcgcgaggttagaccagtacaaggcaagcataccttaacagaatgggtattcattgggtttagaaattcaatcaaatctgccattctgatattcttcactctatttactttaaacaccctgttgactacattagatacctacagattgacgcacaaattaccaataactgttcaatcgccttcatacgaggcatttcactacgtcgacgctgctaagacttacaaattgcacataacttgttatggtgacgtgtttaatcaaagcaatgaaacagagtcaactgacaggaaaaagaagcagcaaccgataattttgttcgaacatggaggttacgataccggttatctgtctgctacttggatcgaagaactataccatttagatagagttcaaaggtactgtttatacgacagaccagggtacggattgagtgattctcctcctgcaccaatttcaattgctatggtagccgaatccctaaggtacgcactgattaaggacgctaaaattatgggtccattcaccacggtaggatacgatcttggcggactattcacaagggtgtttactgccaaaaatgttgatatcgtggatagcatgatgctcgttgaatcatggcacgaggaactgctgttaaaaaactatgttcagagactattacccccaggccgtggcgacggcgatgatggcgatggaaacgatggcgataaccgtgatggtcgcaatcatgataaaacttggttgccttccgagattgaaagacacaatgagttcagactatggtggaagggtatttggtcgagtttagggtggagattacaaacctcttggttgttggctcatcatgggtctaaagagcgtatatttggacgtgatatgaaataccagggacgtttcttgcgttctaaatttttggaaagtgtcactagctccattttaagttataaggatgtgacaaacaatagagagtccttacaaaacgtcaaaacaagcattgtcagttctaaagaaatggtgaagaagtcagcattgtggggtgactggcaaagggaattgacaaaaatctctcacaagacccaagaatggaaaatcgtagagggtggccatgaagtatacaagtatggtcttggtaagcaacaaacccaagaagttttgctaagattgataggtgagctggataagttttcacaggactaa

SEQ ID NO: 2176 - DNA, 429 bp, Saccharomyces pastorianus
atgactgaagatatcgaaaacaagaagactgccctagaggaaacaacacaggagccaaaacctgcccaggaagaggaggatcaggatgtcgagatgactggcgatgaagagcaagaggacgaaccagacagagaaaagatcaagcttttaacacaggccacgtctgaagacggaaccagcgcctctttccagattgttgaagaagaccacacactgggcaacgctctgcgttacatcataatgaagaacccagacgtagagttctgcggttattcgatacctcatccttctgaaaacctgttaaacgtcagaattcagacctacggtgaaactaccgctgtggaggccttacagaagggattgaaggacttgatggatctgtgcgacgtcgtggaatctaaattcaccgaaaaaatcaagagcatgtag

SEQ ID NO: 2177 - DNA, 363 bp, Saccharomyces pastorianus
atgcctcaagtttacagttaccaagaagtcgccgaacacaacggtccagaaaactgctggatcatcatcgatgacaaagtttacgacgtttctcaattcaaagacgaacatccaggtggtgacgagattataatggatttgggtggtcaggacgctacagatagttttgttgatattggtcattctgatgaagctttgaaactactgaaaactttatacattggtgacgtcgacaaaaccagtgagcctgttgttgtaaagaaggctgttacctctgaaagtcaaagtcaaggtagcgctacattggtcatgattttggccgttgtaatgctaggtgttgcttattatttgttgaacgaataa

SEQ ID NO: 2178 - DNA, 666 bp, Saccharomyces pastorianus
atggtcaagtcagtaaagaagagttccaccaaggaagtcgtaaacaaaataaccaaagaagaaaaaccagtacagaaaaaagaagaggaattacagttagaatcatcatctaccagttcagatgaagaagacaaaatcgatgaagacaaaattgaaggtttggctgtttctgatgatgaacaagacggtacgcacaaaattaaaaagttgaatcctaagaagaaagttgatcaaaaaatatcaaaggacaagaagaaactcgacgaatattctgccattatttatgttagcagattaccacatgggttccacgaaaaggaactaagtaaatattttgctcaatttggtgatttgagggaagtgagattagcacgtaataagaaatcaggaaactctagacattatgggtttttagaattcgttaacaaagaggacgcactggttgcccaagaatccatgaacaattacttgttaatgggccatctattacaagtacgtctattaccaaacggagccaaaatcgaaaaattatacaagtacaagaaaagagtcttggtagagaagggtgttaccaagccagtgaagcaactaaaggaaaacatgaagcaaaaacatgaagaaaggataaataaattggccaagtcaggcatcgaattcaaatggtga

SEQ ID NO: 2179 - DNA, 813 bp, Saccharomyces pastorianus
atgactatagaaaatatatacatcgccagacatggttatagatccaattggttaccaaaggggccatatccaccacctcctaccggcatcgataacgatgttccgctttcagaacatggtgtcgaacaggcgcaagaattagcaaactatatctcaaaactggatgtcaaacctgagatcattttttgctctccgttttatcgttgcctggaaacgagtagacccacagttgagtctcttaaaattccattatacgtagatcgtggtgtgggagaatggtacaaacctgatagacccattatcccagaaccagcaactcatgaagtaatgagtaaatttttcccagctatgataaatccaaattgggaatctagtatcattcctagtagtagaggtgagacagaagaagacatttttgaaagatgtcataagttctggcccattttcatcgaaagggtagaaaaaagatttccagaaatcaagacgattatgattgttacacatgcagccactaaatcagctcttggtatgaatttattgaaattctccagtgctaaagagcccattgatgataaaggtacctttataagaaacggaagttgcgctattgacaaatttgaggtgttgaaagcagaaggtgaaaatctgccatttgaaaagagggtatggagaattacgatgaatggtaatacatcttttctaactaacggagaagaaatgaattggacatttatgaatgcctttgaagccggatctgacgccgacattaaggcaagaagagcagcagaaagcggaaaattgaaaatggaataa

SEQ ID NO: 2180 - DNA, 3549 bp, Saccharomyces pastorianus
atgaaaatactcatatccaaacaacaaggtagaagtatagcgatagtttcagaatcgtatggattagtatttagaccaattggtgataaaatctcccgaaaatctacatgtgccgtggaattcataccgaaagctgacttgagcagtcatggtttccaaagactctccagccatgaaatattcgggttcattggtcttattgaacttgaaggtcttatatttatagcgactattaccgggaaatctaaaacggcccaaccgattcctaataagaccgtcaacaaaatatatgctgtggactttttttgtttaaacaattccaaatgggatttccaggacattgattcttctggctatccaattatgaccaacgatggagattttgaaccacgctcacgtaccaatgcctccatacggtcatctagatcatcgctgcattcttcttcctcgagtagcttgaaccgccaagatcaagttcctaagcatccatgctacgaattgagaaaactactgtcgaatggttccttttattatagcacagatttcgacctgacttgtacgttgcagaaacgtggattcactgaacattctttgagttttgatgatttcgatagggagtttatgtggaactcgtttctcatggatgatattatcacatacagagataggttagatgtgataactaagcaactcttggacgaacaaggattcctcacaacggtaatccgtggatttgccgaaacagttttcagctacatcaataagttaaaagtggggcttactatcatttcaagacaaagttggaaaagggcaggtacgagattcaatgcacgtggtatagatgacgaaggctacgtagcgaatttcgttgaaaccgaaatgattatgtattcttctcagtattgttatgctttcacacagataagaggaagcgtcccagttttttgggaacaagacacgtcattgataagtccaaagattcaaattactagatccatagaggctactcaacccacgtttgatgaacactttatgagattattcagaaagtacgggcctgttcatataatcaatttattatcatcgaagtcctcagagcttcaattatcgaggaggtatagggagcatttgaagaactctgataaaatgaaaatcggaagagatgtgttcttaacggattttgacttccatagagaaattcatcaagacgggttctcagcggcaaaaaagattatccccaaaataaaagactcgatcatggctgcaggctatttttcgtacgacgtgaaagaagggcgattgatatctgaacaggatggtatcttcagaactaactgtttggattgtttagatagaaccaatctgattcagcagacaatttctttatcagcattcagattatttttggaagattttagattaattaggcccaatattctcacaaactttagcgaattcgtgcaaaaggagaacgttttatgggctgatcatggagatcagatatcacagatttacaccggtacaaacgctctgaagtcttcctattccagaaaaggtaaaatgtctctatctggtgctctttcagacgccacaaagtccgtcagtagaatgtacattaataattttgtggacaaaggaaagcagcaaaatattgacacgcttttggggaggttaccacatcaacaagctgtcgaactgtatgatccaatttgtgagtatgttaatgaaaggctattggaactagaaaacgaattcactacttgttctaatgtaaatctgcttattggtacatttaatgtcaatggtaactctagaagagcggacttatcagagtggttatttccaatcggcgacaaattcaagccagacattgtcgtgctagggttgcaagaggttatcgaattgactgcaggatctatcttaaatgcggattatacgaaaagctctttttgggaaactatggttaccgactgtttaaaccaatacgaagaaaagtatcttctaattagagtggaacaaatgtcctctctcttgatattgttctttgtaaaatctgataaggcccacaacgtgaaacaagtagggggatctactaaaaagacaggtttcggcggcatcactggtaacaaaggtgcggtggctattagattcgattacggggcaacgtctttctgtttcgtcaatacccatttatcagcaggtgcaaataacattgacgaacgtcgtcatgactacaacaatatttacaggaatataacatttccaaggtctaaaacgatacctcatcacgattcattgttttggttaggtgatttaaattacagaataaccttagtaaacgatgaagtaagaagagaactgaggactcaggaagatggctatattggcaaattacttcaatatgatcaactaactcaagaaataaacgaaggtgtagtatttcaagagtttaaagaaccaaccgttcaatttcgccctacctataaatatgattatggaactgataattacgatacttctgaaaaggcaagaacgccatcctggactgatagaattatctataaaggtcagaacctgcatccattagcatattcagatgcacctttgagaataagcgatcataaaccagtttatgctgcgtatagagcagacgtgaatttcatcaatgaggataaaaaacgtgatctagttgagaaattgtatgcggaatacaaaaagacatatcccgaaggatcaataaaggattttaaaaaatcacataatataaaagctgagattcaaaagaaaagcatacctttggacgtaactgttcaatcagctggtataaaattaatcgacctcgatgacacatcttcatgtgtttctcctccacttcccatttcgcgttcttcaaggtcgattgctggatctagttcagaagcactcttcgagaaaagtaagcccaatgtttctccaccgcccatttcaagaaatagtaaggaaacttcgcttaggccggtaatatctgtaaatgagatccctataaccggagtgtcgtcgcataaagttgaaggtactcttactgccttagagggacatgctatgcccaaacctctaccccctccacctgtttcgtcaaggtcagccacttcctcaaaaagtacagcattagtagtcgatcatacagagacaccagagagtaaggaaccaattccccctccttatacacaaaggagaaggaagagcagcatttacttgaatgaaagtgccatttccaccgatagctcacgcctatcttcaaggtcaaatactccgaaaaacgcagatgcttctccaaaggcccctacacaatctgagaaaccaccaattgtcaagaagcctgcttatctaagcgctgctgctactaaggttaacaatagcgatggacgcttatcaaaagtaacctcatcggatacaacatctgacgaggaggtctcatcgaaaaagaagtctacacctaaagtacctgcaaaaaacccagaattagagaaactaagcgtagattcgtggaaaccccttaagcctagttag

SEQ ID NO: 2181 - DNA, 2154 bp, Saccharomyces pastorianus
atgaccaacagcaatgaggatgatgagcaccttggaggcaggagacaagggaatttgaggcacgcatctaataacatgaaaattcctggaagaagtcaatcaacagttctcaattcaaatccattttctagtagaaaatactcgatgtgtactttaacacccaaagatatatgtcgaagcgttgattctagggttttcgtggatattgcatcgcccaattttcagactctcgaggatccccataaagatgaaataataaatagtgtacggctcaactatttgaacaataatagcaaaaggaattctatcagcctgcacgggcaggaagaaaaagccagagctgatcgaactaagaattcttctggaagtttcagtactagaactgccgcaaacatagacagcgaggacgatgaaactaatttgaatagtgctggtggtgacataacgcatgatatttacaaaatggttaaagcagaaaatcctcagcggcttagacgccttcattccatggaagatgtaaactccaaaattgaacatcataccaaactgtcatcagcaagcggactaaatgttcccggtggctttagaagagaatttatcgttaacaagaaaagacaagaacatcaactaaatgattctgctagctctgatttccattcgcaggaaagcgattcgattaatcagccatcttcatcttctaagcaagatattgataaggtcccgtttctgacaagaaactttttggaatttctatacgtatttggacattttgctggtgaatcctttgaggatgactttatctctgatagctcgaaccttttattgcagggagaagatgaacgaagtgcattattatctcggccagatcatatgaaggtcctgccctccgccaagggtacaacttcaacaagaaaagtgttcctgatattgctcaaatcctttatcggaacaggtgtcttgtttttacccaatgcgtttcataatggtggtttgtttttctcagtaagtatgctcacattctttggtatttattcatactggtgttattacatattggtacaagccaagtcttcgtgtggtgtgtcctcctttggtgatattggtttaaagttgtatggaccttggatgaaaatcataatcctgttctccctagtgataactcaagttgggttttctggagcgtatatgatatttactgctaaaaatttacaggccttccttggaaacgtatttcatgtgggagcacttcctttgtcgtacttgatggcatttcaaacagtaatttttatcccactttcatttatcagaaatatctcgaaattatcattaccatcgttgttggcgaatttttttattatggctggtttggtcattgtgattattttcacttcaaaaaggttgtttttcgatttaaaggcgataccagcaatgggggtggtatacgggttaaacacagatcgttggacactgtttatcggaactgccatctttgcttttgaagggatcgggctgattattccggttcaagactcgatgaggaatcctgaaaaattccctctagtacttggattggttattctcactgccacagtacttttcatttccatagctaccctggggtatttagcttatggctcggatgtcaaaactgttattcttttgaatttgcctcaaagtaacatttttgtcaacttgattcaattattttattccattgcgatcatgctgtctacacctttacaattatttccagctattaaaatcattgaaaacaagtttttcccaaagtttgctaaaatatatgtcaagcacgatgacttgacaacaagagtagaattacgtcccaactctgggaaactgaattggaagataaaatggttaaaaaattttatacgatccatcattgtcatcatcgttgtatcgattgcttactttggctctgacaatttagataaattcgtttcagtcatagggtctctcgcctgtattccattggtatatatatacccatcgatgttgcatttacggggtaatagtcttccagaggctaaagggaatttttggaaattcaaaccaattttggacaccattttaatttttttcggcataacaagcatgctttatacttcctatcagagtatttttggcgtttaa

SEQ ID NO: 2182 - DNA, 708 bp, Saccharomyces pastorianus
atggtaaatttttacaacgacgttaatgaatctacgaattcaaacggcgaattgcccttaatacctattgcgtttcaggattcatcagaattattagtcaggactatatctacgggaaatgaaatcatcgaatcagtacacttgacgaaatggttacagaaacgcagaactgcgtttgctgatcaacttgaccgctacgaaaaaaaatgggaaaccaatacagctaactttagacttcaagttcaacatattatcaactattcgagaaaaaacattttcaatgatgaatttgaaaataagcatactgtggtcccaggctcactaatagcactgggtgcctttttcgctggcagtttagcagtcaataaatctaactggggagctaagagattgttattcagtcataagtcaagcattcttgaaaaactgtgtacatcattaccatcgagaatgttgctgccttgggtattggcagcagcaacgtttaaattctgggcacctcaaacatcacagaatctagttagtgccacggaaaatgatctactaccacgcgactttgtaagttcatatcatgatgcttggaaacaactctacgaagaaggatatgttgcgaaaaagaataccttgaaatgccatattgatcagactctacaaaaaagtatcaaatacgcaagggaacaactttatgaaaagttggaacaagcatga

SEQ ID NO: 2183 - DNA, 723 bp, Saccharomyces pastorianus
atgacatctaatgttgcagaatatgaacacgttccagacgatgagtcctacctgacaggggaggacgtatcgatgcctgaagaagaagaagaagaagaagaagaagaagaagaagaggacgatgacgatgatcacatatatatcaacgaagaaacagaatccggacgtgaaaaagtcttagtctcgcatgctccactagagcgtattgttcctcctttgaatttttgtcctgtggaaagatacctttataggtcaggccagccctcgcctgtgaatttcccctttttattgaatttgaagctgaagacaataatatggctgtctaatgaagaacctcaggatacccttttagagttttgtgatagccatagaataaacttacaatttgcggccataaacccggatgccggtgaagacgataatccttgggacggtctcactgagcactccatcatcaacgtactgcaaaccatcgttactcaagagaattatcccttgctagtctgttgcggtatgggaaggcatagaactgggacggttattggatgtctaagaagaatcatgggttggaatttagctagtgtgtccgaagaatataggcgctttacgggtagtagaggcggcagaattcttgtggagttgcttatagaggcctttgacactaagctagtgaaaatagacaagaacaaggcgccaagttggttgctgacagccctagagtaa

SEQ ID NO: 2184 - DNA, 969 bp, Saccharomyces pastorianus
atgcctttgaacaagtcaaacataagagaatacaaactagtcgtcgttggtggcggtggtgttggtaagtcagccttgaccatccaattgactcaatcgcactttgtagatgagtacgaccccacaatcgaagactcatacaggaagcaagtgatcattgacgatgaagtgtccattctggatattttggacactgccgggcaggaagagtactccgccatgagagaacaatacatgcggaacggtgaagggttcctgctggtgtactccataacgtctaagtcgtccctcgacgagcttatgacttactaccagcaaatactgcgtgtcaaggatactgactacgtgcccattgtggtggtaggtaacaaatccgatcttgaaaatgagaaacaagtctcgtaccaagacgggttgaacatggcaaagcaaatgaacgctcccttcttggagacttctgccaagcaggccatcaacgtcgaagaggccttctacacattagcgcgcttggtgagagacgagggcggcaagtacaacaaggcattgtctgagaacgaggcttccaagcaggactctcaaacgactccaggggtcgttgccaattcgttgccaagaaatagcaacggaaacagaaaggcaaacaatgtcgccagtgccaacaacatcaatagctccacgactgctgtaaaaacccacaatacaggaatagaagctaatacggggtcgatgggcaaccaagcaaccaatggccaggcgcggtccgatcgtgccaacggagacaactccgccggtaacgctgatggtgcctatgctagaactgccaatacggccgatgatcgtgtaaataaaaacaccgaggcaggtcagggttctgctgccaaacaagccagaaaacagcaagctacatccagtggcaccgccagtgaaacctccaagagtggatcaggcggctgttgtattataagttga

SEQ ID NO: 2185 - DNA, 987 bp, Saccharomyces pastorianus
atgagttcaccagcaaatcttttccctgggctgaatgacataacggacgtcctggaggaatttcctctagccacgtctaggtatttaaccttattacacgagatcgatgccaaatgtgtgcattcaatgccaaacctgaatgaaaggatagacaagtttttgaagaaggacttcaaaaaagaccacgagacgcaagtagggttgctcaataacataaacaaaatctacgaggaactgatgccgtcgttggaagagaagatgcacgtatcatcgatcatgttggacaatctagacagactgacatcccgattagaattggcatatgaggtcgcgatcaagaatacagaaattcccagaagccttagattgggcgtggacaatcatccggcaatgcatctacaccatgaactaatggagaagatagaaaccaagtcaaacagcaaatcgtcgcaagcattgaaaagcgaatcgagaagagaggccatggccgccaacagaaaacagggtgaacatttcccaccaactccacaacaacatgacgatctaaagaatgatctcagctacgcagccggcagacaggatagccagggccaggttggcagtagcacaagttcgagaaagagaataaacaccacaaatcccaatatcagcgaaacagaacccaaaagacgcaagcgaagagtcgccactacttccgtctccccggccacctccaacaccaccgcccacagcagcagaatggccggctctgcggtgtcccgggctgtcagcagcgctggcagcagcaacaacagcaggatatcaaggccgaagaccaacgactacggcgaaccgctctactgctattgcaatcaggtggcgtacggggaaatggtgggttgcgatggagcagactgcgaactggagtggttccacttgccgtgcatcggcctcgagacgcttcccaagggcaaatggtactgcgacgactgcaaaaaaaagctgtga

SEQ ID NO: 2186 - DNA, 1893 bp, Saccharomyces pastorianus
atgctgcacataacattaggtcaagccatttgggcttctgttaagccgatcataaaaatttacttgattataggtgtagggtttttaatggctaagatggggatcctaacagtggaggcgacacgaaccatttccgatgtcgtactaacggttttgcttccctgcttatcattcaataagattgttgctaacattgaggataaagacatcaaatccgtagggattatttgtctgtccgctgtacttatctttgtgacaggtctatttttcgcatatatggttagactatttctgccagtacccaaacagtggtatggtggtattctcgctggtggcatgttccccaatatcagtgacctgcccattgcgtatttacaatccatggaccaagggtttatattttcagcagaagaaggtaacaagggtgtagcaaatgtcattatatttctgacaatgtttttgatttgcgtcttcaatttgggtggatttcgactgattgaaagcgattttggatacaacgacaatgaaaacgctgcaagagtgtcagaaacgacaggcacattgcccgccacagatacgaacagtactactaataataaaaattcctctccgtatgaacgcaagattttcaatgacaaatataccgcatgtaacagcctcactgaagctacaaacgcatcatcaataacaagtccaagaagaagtataggccccttatcagttgcgggcactcgttccggttccatagtcacaaaacctgctcaggcaaggacaaaggatactgttgaacgcatacaaggtgaagaatcacatatagcatctggtttaaactcattggagaaccaatcgtccgcttcgacagtgcattcctataatacgtcagagagttacaatagcagcctggatactatgagggcacggagaataccaagcctaccgagagcttacaataccgtttctgaagaaaagagtctagacgagtacctcccaggaaatatatctatgtcagccttggagcctatccgctccattgatatgcgtgcattgcctcctcaagacatacaccatctcattagagaatactccaacgttgaccaatttgggcacagaagaaggaactctagtttgatcagttccgatatgaatgatgcacattcaatcaagtcgatctctactctacaaactataaaaaatgccaatctaactaggattttaacctcggatgccaccgtaagtaaaaaggatattgaaacttcgggcgaatcattacccaaatgggtgagaaagttcccactaactcccttgctagtatttttcttgaaaaattgtttgagaccgtgttccatggctgtcattctcgcactgattattgcgtttatcccatggctcaaggctctatttgtcactaccgctaacaccccgcacataaggcaggcaccagacaacgcacctgcattaagcttttttatggattttacaagttatgtgggcgctgcatgtgtcccattcgggttaatcttgttaggggcaaccttggggagattgaaaatcggcaggctctatccaggattttggaaagccgccgtggtacttgtcattttgagacaatgtgttatgccgatttttggtgtcttatggtgcgatcggttagtgaaggctggctgggtcaactggcaagatgatagcatgctattgttcgttattgcgattagctggaatttgccaacaatgaccaccctcatatactttaccgccagctatacacctcctgaggtaactgagccgatccaaatggagtgtgtgtccttcttcttgatgcttcaatatccactaatgactgttagtttgccatttttagtttcttactttctgaaagtacaaatgaaactttag

SEQ ID NO: 2187 - DNA, 1776 bp, Saccharomyces pastorianus
atgaatggccaagactacgatgaaagttcttcttctgcagctgcttccactaatcctgtttcagtcgaccaacggatggggaagaaacagcgatttatgaatctcatgaggactacgaaggacgtttacattcccaatctaacgtcatccatatctcagaaaacaatggatggtattagaagcactacgaattcttttgagggctccaatgatatgttgccgcagttgccgtacaacaccatgatatcattttacccgacgtataccacaacgaacttagtcgactcggacggcgtaagtgctccacgaaaagattttgaaactaccgttagatgtgctgtatcttatccagggaaccccacgagtaggagaaatagatggctggtttctctctgtaagcaatatcttaggacaggaaccgtggaagccgatattgcggccgtggttcccgcacgcctcgaagacgatgctgaagacttgatggattctcaatcaagtatagatagctcgtcatcttcgaaaagtggcaatacgtctccccatacgggcacccaagaggaagatgttctgaatgagagaattcaaggattcttggcaaggaaagttccgaatactccgatagtagttgatcttttgcccaaagatagccttcgcggtgatacagcttcgttttttggtaccacagactattacggtaacttattgcttaaggcagaaacagatttcttaccctcgaaaatcaacattacgttggacacccctgtggctggccgcccagattcaatatctcagagttttcccgtcaattatgtctcaccctatggtgttggtttaatcagtgacatcgacgacactatcaagcatacaggtgttacaggtgacaagagatctatgtttcgtaacgtgtttattcatgatgtgaaatcatgggtaatagacggtgttcctctttggtataagactctgcatgacgttgccgacgtggacttcttttatgtgtccaattctcccactcaaacattccccattttgaaaagttatatttacacaaactatcctccaggtccaatctttttgaagcagtattctggcaattttttttcaactattatgacttcgagcgcaaatagaaaaattgagccaataatgaatatattgagagattttcccaaaaagaaattcattttggtaggagattctggtgagcatgatttagaagcttacaccacgactgcgttgcaatttccaaaccagattttggctatttacataaggtgttgttctaattcaatgagtgattccccgttgcatgaacaagaagtaatgagagaagtgaacaatatcatcgagttgcatcaagaacctatccaaacaccgaaatcttctctgcacaccagaagaagaccggcccctccccctccccctcctcctgtgccttccagtcggaagccatcgctaacaaaagagcagaccgaaagtattagattatcacgtcacaatgaagttgaaaataccaccaacaaggctatacccccgccactaccgaaaagaactttacctaacgtagaggcagacgattactgtttaccatcttctcaaaacgattacggtatgtatggtgcttttatggacagaaaagctgacgaatggaaaagaagagtaatggattcaattcaaaagttgagcaatcaggatactacgttgatgtttttttctgatccagcaattagtttagaagatagcatccgtagaattagggagaagtacgcaagttaa

SEQ ID NO: 2188 - DNA, 657 bp, Saccharomyces pastorianus
atggataaaagtatagcaggcatgccaactttgacaattaaagtggttttacttggagaatctgcggtcggcaaatcatcaatagtcctcaggtttgtatctaacgattttgcacagagtaaggaacctaccattggtgccgcctttttgacaaagaggatctaccggaacgatgaggccataaagtttgaaatctgggatacggccggccaagagagattcgcccctttggcaccaatgtactataggaacgcacaagctgctttggtcgtcttcgatattactaatgaacaatcttttcataaagcccaaaactgggttgaacaattacacgaaagggtaggaaatcatattattattgcgttggtcggcaacaaaacggatttgttgggtatgcaaaacttaaacatgggtgtaaaaaaagagatgatagaagatttttgtcaacgtgagaacctgtcatatttcgaaacgagtgccaagactggtgaaaatatacacgaagtattccaagccattggagaaaagactccacatcccacacagaaggcaagaagaaattccgatcacgacctgaccattactgatgatcaacgaatcgacctcgaatcaacaactgtggaaggtgcaagggaaactgggggttgcagctgttaa

SEQ ID NO: 2189 - DNA, 3735 bp, Saccharomyces pastorianus
atgccaccaaactctaagaataagagaagaaagaataagtccaaacagcacaacaaaaagaccgagagtttggaccctgaacaacatattaaccctactcatttagtccctcgaatggaaccagagctgtaccatacggaatccgaatatccaacgtcaagagtaataaaaagggcacctaacggtgatgtcattgtagaaccaataaatacagacgatgataagaaaggacatgtggcgacattaaccgacgataaagacactatggactcagcctcttctttggcttttactctggattcccattgggaatcactatcaccagaagagaagaaggctattttacgaattgaaaagggcgaagtattcaatgtgataaggaactatcaggatgatcacagttgcagttgctcggtttgtgggcgtcgccacttagctatggaccaagaaatggagcgtatttacaataccctctacgcgatggataaagataaagaccctgaaactaaccccgtcaaatttcatctaagtataataaaagagctacagatttcaaagaatcaacaacagaatgatgtgcatcctgcaaagggtgaagttgtaaataactttctttcctcgagcacggttgactccttaaaagaggaagtactgcattttaagcagaaacaattatccaaacaagaaccaatacacaacgaaatagtcaatagtgcttcactccttgaagaagatttggacaatgtacatatcagcgagacaccaagagccgtttccccaagttttgactctatgaacgatgaggaactgaagcaaaaatactctaacttcacaaaaacgtttatatcgtcacacccaaaaatagcgcaagagtacgttcaaaaaatgatgatgtatccaaatataagaacattaactgatgatttgatgaataataacggacaaggcttcctaaacgcaattgaagattttgtgcaagacgaacaattgtcaaccccgcatacagatgacaacatatctggcgataagtcgtcttacgcggatctcactgatccaaaggagtttacgacaatgttacatagtgggaaaccactaacaactgatgaatatgctgaccttcagcgcaatattgccgaaaggatgaccaacgcatacgacacttcgagtaagcaattcaaagatgtatcacagttggagaaggagctattcacgcgatttatgtttggtaccgataagaaatactttagggagttaataattcaatcatttagaaataaatttgacggagaattgggcccatctgtcatggcagccactctaagttcgtgcttttcatctcaaacgaaagataattcactggatacggattccatatacgaagatgaagaagatgatgattacgactattcagaatatgctgaagatagtgaagaaatatctgattacgaaggaatagacgacaaaaagagattttcacactttgatgacgaaaatagtgaaacacatgacgtactgcatctgaaccacgatcccagacataaacaacaagaacatcctcatcatcatcacaatgttagcgcccacagcgaggatgaagcagtgagtgaggaggaatacatttccgatgtcgatttacatcatgaccctcaccaagactaccatcaccaggatggcataatcgacgaagatgaagatgatttagaggagggtgacgaagatggagaacaggatgaggaagaagacgaagaagatgcatatgatagtggtcttgacgaaacggatcgtttagaagaaggtcgtaaattaatacagatcgccattacaaaattattacaaagtaggataatggcttcataccatgagaagcaagctgacaataataggttgaaactactgcaagaactagaggaagaaaaaagaaagaaaagagaaaaagaggaaaagaagcagaaaaaaagagagaaagagaaagaaaagaagagattacaacaattggcaaaagaggaagagaaacggaaaagagaggaagaaaaagagagactgcaaaaggaattagaagagcgtgaaatgaaaagacgggaggcccaaaggaaaaaggtcgaggaagctaaacggagaaaggacgaagaaagaaaacggaggttagaagagcaacagcgtagagaagaaatgcaagaaaaacagcggaaacagaaagaagaacaaaagcgcaagagagaagaggagaacaaacgtgttagagaagaaaagagactggaacaagaaaaattacagaatgaaaaagaagaggaggaaaggcaaaggacactagctgagaacgcgctaagacaaaaagagctgagtgaagaacaaatgtcttcaatagtcgatcctactaacttcttcgccgagagtgggatttctaattctgccacaccacaattacttcctagcattaatagataccaagagaacaataatcgcagcatcaatgacgaaatacttaaaatggtcaacagcgtagcggcatctaaaccagtttcaccaacaggtttcaatgttcatgatttgctccgctcgtccaatgatacccagattgtagaaatagaaaacatgcagtcatctcaaccagccatcacaaacaacttatttgggagtacaactatcccaaatactgtggatttctctactaaatcttcttcgcatgttgataacgattatttgatgaactcgtgggcccaacataataacagtatgttgatgcccaatggttcatcttcaaccaaaagactaccagatgattttgggttaccatcctggaatggcttggcaaatccactgtctacaaactctacatgtaactcatcgaatatccaagcaacaggcctgtcaccacaacctcaacagcccagccctgaaccaagcgtaccatcatttgggttatgtaatgatggtgctcatcgaaaatcatttgccgaggaattgaacactttgactagtatgctctcttccactgggttcgtggacacatcccttacatcatcggggttcccacaatcacagcgttcagtgtggaacgaccaacagagctcattttcggggcctacaacggctggaaacttcaataacagcaacataccaggtggaatgatgctcccacccacgatggcaaatgttgaaccgctcccacacagaacttctatttgggacagcagtccttcttctctgctaaacaaacccgacgtcactgatcgcagtatcgcaagtgccgctcgagacagccctgcgttcatgacatcgaacatctggtccaataacaaccactatagctcaccatatttggctagcaatactctccaaccttcgggaactccgaatggaatggatgaaagtcatattttagatagcatttacaacacttacttgtctatctcttcccaggacagtttaaaccagtacgtagctgttggaacgctataccaaagcttattgggattgaatctggattatccagcgtttatcaacaagcttataagcatgcaagctgcttataattgcgaatttttcactgatgggaacggaaccattactcatgttcgatttattaggcagagccccgtgagtcactcaaaagggttactaagtcaattatttaatggcatgaacgaccgcaccaatacgcctttcacatcaagacctcatacttcgacacccaccacttttccaatagcttcttcgacttcgcaaacgagttaa

SEQ ID NO: 2190 - DNA, 579 bp, Saccharomyces pastorianus
atgtccgaaaaggccgttagaaggaagcttgttattattggcgatggtgcctgtgggaaaacgtctttactatatgtatttacgttaggaaagttcccagaacaataccacccgacagtgtttgagaattatgttaccgactgcagggtagacggaataaaagtgtccttaactctttgggatacagcggggcaagaagaatatgaacgtcttcgtccattttcatactcgaaagcagacataatattgattgggtttgccgtggataactctgagtccctaatcaacgcaaggacaaaatgggctgacgaggcgttacgatattgccccgacgcgccgatcgttcttgtgggtttgaagaaggatttgaggcaggaggcccatatcaaagaaaatgctgtagacgaaatggttcccgccgaagatgcaaaacaagtggcgagagccattggtgccaaaaaatacatggagtgtagtgcattgactggggaaggtgttgatgatgtcttcgaagtagctacgagaactagtctgttaatgaagaaggagccagggacgaattgttgcataattttataa

SEQ ID NO: 2191 - DNA, 4260 bp, Saccharomyces pastorianus
atgtcagttgaaccgaaaagtgcttctgacaaataccagaagatttctcaactggaacatatcttgaaaagaccagatacttacatcggctctgttgaaagtcaagaacagcaacaatggatatacgatgaagagaccgattgcatgattgagaagaacgtcattattgtcccggggctgttcaagatctttgatgaaattctagtcaatgcggcggacaataaagttcgtgatccatcgatgaaacgaatcgatgtaaacatccatcctgaagagaataccatagaagtaagaaacgatggtaagggtatccctgtggagatccatgacaaggaaaaaatttatattcctgagttgatttttggtcatttgctaacatcatcaaattacgacgatgatgagaaaaaagttacaggtggtagaaacggttatggtgctaaactttgtaacatattttctactgagtttatcttagagactgcggacttgaatgctggcaaaaagtatactcaaaaatgggaaaacaacatgagcgtttgccaccctccaaaaatcacatcctacaagaagggtccttcatatactaaggtcacattcaagccagacttgaccagattcggtatggaaagtttagacaatgatattttaggtgtgatgcgtagaagagtttatgatatcaatggttctgttcgcgatatcaatgtttatttgaatggtaaatttttgaagattagaaatttcaaaaactatgtagaactttacttgaaatcgctcgaaaaaaaaagacagttggataacggccaggacgctaccactcagaccaacattccgactattctgtatgaaaaaatcagtgacaggtgggaggttgctttcgctgtttctgatatttctttccaacaaatctcatttgtgaattctattgccactactatgggtggtacacatgttaattatatcactgatcaaattgtcaggaaaatcgctgagcttttaaagaagaagaaaaaaaatatcaaaccttttcaaataaaaaatcatatgttcattttcattaattgtttggttgaaaatcctgcattcacttcacaaaccaaggaacaactgacaacaagggttaaggactttggttctcgttgtgatgttccgattgaatatatcaataaaatcatgaaaactgatttagcaactaaaatatttgaaattgccgacgcaaatgacgacaatgccttgaaaaaatccgatggtacaagaaaaagcagaattaccgattatcccaaattagaagacgctaataaagctggtaccaaggatgggtacaaatgtactctgatattaacagaaggtgattctgcgttgtcattagctgttttaggtttggctgtagtaggtagagaccattatggttgttatccacttcgtggtaaaatgctaaatgttagagaagccagtgctgatcaaatcttaaagaatgcggaaattcaagccataaaaaaaattatgggtttacaacatcgtaaaagatatgaagatacaaaatctttaagatatggtcatcttatgatcatgacagatcaagatcatgatggttcacatattaaaggtttaattatcaactttttagagagttcatttcctggtctcctagatattgatggctttttgcttgattttatgaccccaattatcaaggttactattactaaaccgacaaaaaatactatttcattctataatatgccggattatgaaaaatggagacaagaagaatctcataagtttacttggaagcagaagtactataagggattgggtacgtctttggcgaaggaagtgcgtgggtacttttctgatttagacaggcacttgaagatatttcattctttacaaggtgacgataaagatttgatcgatttggctttctccaagaagaaggccgatgaccgtaaagagtggttaaggaaatacgagcctggtacagtcttagatcctactctgaaggagattccaatcagtgactttatcaataaggaattaattcttttttctttggcagataacgtacgttccattccgaatgttttagatggattcaaaccaggtcaaaggaaagtcctttatggttgcttcaaaaaaaacttaaaaaatgaaatcaaggttgccctattggcaccatatgtgagtgaatgtactgcctatcatcatggtgaagattcgttgtcacaaaccattattggattagctcaaagtttcgttggttctaataacatttatttgttgctacctaatggtgccttcggtacaagagctaccggtggtaaagatgcagcagccgcaagatatatctataccgagttgaataaattaacccgtaagattttccatccttctgatgatccgttatacaagtatgtacaggaagacgaaaaaaccgtagagccagagtggtatttgcctattctgcctatggtcctcgttaacggtgcagaaggtattggtaccggttggagtacaaatattcctccattcaatccattggagatcgttaagaatttaaaacatttaatgaatggtgaagatcttgagcaaatgcatccgtggtttagagggtggaccggttctgtaacggaaatcgaacctttgcgttacaggatgtatggtaaaattgagcaagttggaactaacaccttggaaattactgagttgccagccaagacgtggacatcgactattaaggaatacctgctattaggtttaagtggtaacgataaagtaaaaccttggattaaggatatggaagaacaacatggtgataccattaaatttattatcagcctatcgccggaagaaatggcgaagacaagaaaaattggtttttatgaaaggtttaaattaatttctccgattagtttaatgaatatggtcgcgtttgatcctcatggcagaatcaagaaatacaattccgtaaacgaaattttgagtgacttttactacgtcagactagagtattatcaaaagaggaaggaccacatgagtgagagattgcaatgggaagtggagaagtattcttttcaagtaaagttcatcaagatgatcattgagaaggaattaacagtcaccaacaagccaaaaaaagttgttatccaagaacttgaggatttagggtttccaagaatcaacaaggaaggtaagccatattatggtagccccgagactgaagtggctgaacaaactgacgacgaaggtgaaggtgaggagagttctcttgaagacaccgaaagtatcgtaaatggtcctgaagaattgtacggtacatatgaatacttactaggtatgagaatttggtcgttaactaaggagagatatgaaaagctgctgaaacagaaacaagaaaaggaagtcgaattggaaaacttattaaagctttctgccaaggatatatggaataatgatttagaagcctttgtaaccgggtaccatgaatttcttcaacgagatgaagaagctcgaggtggtaatgttccaagcaaaggaagcaaagcgaaaggtaaaaaaaagagaccactgattgatgatggtgaatacgacccatcaaaaaagggtaagaaatctactggaagaaggagcaagaaaatcaaattagaagacaaaaattttgaaagagtattattggagcaaaaattagtgacaaaaggaaagggacctacgaggattaaaaaggagaaaactccttctctgttaaaggctccagaagatgaccaaagcgctccttcttcaacaggttcgtcttctattttcgacataaaaaaagaagaagataaaaatgaaagtggattaagcaagatgtctaacaagttcaagaaaataagcacaattttcgataagatgggttccgcttctgcaacatccaatgaaagcacaccagaggaaattgttacggctaccgcaacaaaaccagccgctgtcaaagaggctgtcgcaaaacccaaaccagccaggaaaccaaaaaagaccgtagagttatctgatgaaagcgatttagaaattctagattcgttcaattctggtgaagacgaaaatgaagacgaggatgacgctgtaccgcaacgcccaagaagacaaaggtcagcaagagccgcatccgcccctaagaaatcttactcggaaactatagaattgtctgatgatagcttcatcgaagatgatgaagaacaaggacaagaagaagactcggacgtgtcttttaatgaagaagattag

SEQ ID NO: 2192 - DNA, 3540 bp, Saccharomyces pastorianus
atgtctccaaattcttcgaaagatcgatcgagccaaatagggcctacgcccgaagttgttaaaaccactaagatagaaagcaagaatgccgtaaaggatactgttcccgtagtatctgaagctgaggttgatggtacttcaatagcaagagaaaaacaagaggcatcttatgtcggttggaagcaagttggcggctgggaggaaaaggacgagctaacacccgaggatcttctggtggatttaagcaaagacacatacgtaggtaacctcctaccagagaaactttacggtgattggtaccacgatgtcgctatccttaccataggtgctttaggctcttttgcattaggttatttcaaattttctttaacatctgttcttattgtgatccttgccacaggagttctatacagatcgtcgtcgaaaaaatacagagaaaggttaagggatttggctcaaaaagagcagactgtagagaaaattagtgacgactatgaatcaatcgagtggttaaacacctttttagacaaatactggccaattattgaaccttctgtctcccagcaagtcgtcgatggtacgaatactgctctgtccaagattgaggcaattcccaaatttatcaaagctatatggctagatcaattcactctgggtgtaaaacctccaagaattgatactataaagacattccaaaatacgaagtccgacattgtggtcatggatttatgtctgtcattcaccccacatgacatgtctgatcttgacggcaaacagtccagaaactacgtaaattctaatatcgtattgaaggcaaaaatgtttggggtggatttacctgtatctgtctccgatctttcctttagagtttttactaggctccgcttccaactaatgaccaccttgccacttgtcgaaactatgaacatccaattgctagaaactccagaaatcgatttcattggccgtctattaggcaattccattttcaactgggaaatattagccattcctggcttaatgagattaattcaaaaaatgacacttaagtacttgagtcctgttttgctcccacctttttctttacagctcaatattcctcagctactttccaagactggtttacctataggtgttcttgaaattaaagtcaaaggagcttatggattaagaaagcttacagatatcatagacaaaacagtagacccatatttgactttcgagctatctgataaaatagtcggtacaactaaggtcgttaaaaactctataaatcctacctgggatgaatctgtttatattttactgcaatcattcaccgatccattaacaattactgtatatgataaaagcgagactttgaaagataagaaaatgggcgtaatagttttcaacttgaataaactacatgcaaatcattaccaaaaggatgaaaaggctcattttctgagaaattctaaacctgtcggccgtttggcatttgatttgcggttctaccccactattgaagcaaagaagttaatcaacggtgacgaagaacctttaccagatctaaatacaggtatcaccaaaattgttatcaatgaaatcaagggactgaatgaaccttccgataaagaatcggtctttgctgaattatacgtaaatgcacaattggtgatgactacaaaaaagaaaaaaagaactgctgacataaactgggactcttgctactattctgtaataacagatcgtagaaaggctatttgcaggtttgtcattaaaaaccaaagcggcaaagttatctcgtcttcagtacaacctttgaatgatttgatagatagaacagaagttgataaagaatggattccactaaaggatggaaaaggtgaattaaaaattacgacgtattggaggccggtggccatagatcttggtttgaaaacggtcggctataccactcctatcggcatgttaagagtatttatcaacaaggctgaaaacttaagaaacccggacagcttaggcaaaattagtccttatgccaaagtatctgtgaacggtataacaaaaggaaggacaaatcaaaaaatagaaacgctgagccctatctggaatcaagcaatttacgtttctgttacatctcctttgcaaagagtatccattgactgtttaggaacagatacgaatggcgatgtccttcctctcggcagttttaatatacaaactcagaatgtattccataaagacaatgatgacaaatatatcgattttatcgacaacaccccaagaaccggcaatttagtaggaaaaaaaggcgtaaaggggattgttacatactatttatcattctacccaattgttcctgtactaagtttggaagaggcgagggaagtcgatgacatcaacgagaagaaagacaagttggaaaaggaaaagatctctttggatgacaagactacctcccgggaggagaaagaaaggattaaaaaagaagaagccatgatcactgagaagtacgacatgtatagttataagatgaaactggatctagatgaattgctgcaatacaatgctggcgtattgggtgtaactgtattgggcggagaattgccccaacctggtctctatgtccaaaccttctttgattcttgtggttacgctacaataaccagtgcaaagaatgcaattaggacaattaagacaggctggtctggcgatttcatgatcaaagagcttgaatggtctgtgactacattcagagtgacaaaggtcaaagatgcaaacaaggctgaagacttcgtttgtgaagttaacatcccaacacttgagttggtgaaaaactgttattataaaccctcggtattgaacctgatagacaagaagagtgccaagctattggttcaggtatcatggtttcctataagtgcttcggaattacctcagtctgacctaatcacaaactcagggaacttgaagattaccgctaagaatgctgaaaacttgaccggtatcaacaggaatggttattccgatccatacttggaatttttcttaaatgagatgaatacatcggctgttttcaaaactacagtccaaaagaagacactgaatccctcttggaatgaaagcaagactatcgaaatctcaaatcgtgtcaatgactatttgacaattaatgtaatggactatgaatcaaccaattccaacagatgtattggtaaagcggtcgttcccttatctactatcgaaccagaagaagatgctgatttagatgtagcattagtaggaccaaagggagaagatggcggactattacatcttaaatttgagttcgaaccccactatactagcaatgtagttaaacgtgaagctaagttcgggaattttgctacaaaagggttaggtacgggtatcaaagctggttctacggtttttgccttaggaaccaatgttgtaagcactgggtttggaaccatcgataaggtgagattgggggtcttcggtggtggtaaaggacgtaagcatactgaggacgaagagcccaaagagaaacaatag

SEQ ID NO: 2193 - DNA, 2496 bp, Saccharomyces pastorianus
atggcaatcaagtcattggaatcattccttttcgaaagaggtttagtaggctcctatgccattgaggccctgaacaactgtaccctaggtattgatgttaaccattatgtttctagattattgaccaataaaagagagcagtacttggatgctattggtggtttccctaccagtttaaagatgtacttggaaagtgatctgaagatatttaaggatttcaatattactcctattttcgtcttcaatggaggtttgacttacaatcaattagaagcatccggccatttcactgctgcggcttctgattcagcctctatctcaccagccactacctctaccaatgggtctaacgcaacaacaagatcaaacaccgaatccgttcttttacagagaaacagaggttggacacaatggaacaacttgattagttcaaaccaaaactcctatatcgatcaacctattcaacctcaagagccattcagacataacactactattgattccaaggcataccaaaatgatttgatagctttcttcattgagcatggttatatgtaccaagtggctccatactcttcatggtttcaactagcatacctattgaacagcggctatattgatgccatctacggcccaactgattgtttgatgttagattgtgttgatagatttattttgggcatggaatttccaaacaaagagtttagattcattgatagatcaagagtcatgaaggatttgcgttgtactcatgaagaattcattgatattgccatggctgtaggtaatgacttacaaccaaaaactttaccaccattacaaatttatcccgttcctcaattattcggcattgcccttgaaatggttttgaatacagaagcaaacttttatgcttatcaattatctacaccgttacaaaacgattcgaaagagaacgttcaaagttatcaaaaaggcatatctgctttaagatatatgccagtcttgaaagatacaggtaaagtagaactttttgtgcaagaaattgttgtttcagaggaggaaaacgaaaaaatcaataaagaagaaaagaagagtaacctctcttcaccaacctctacatcatccagtgcctctccttacgccagtggaactaaaactgctggcgaaacgtcagcttacgaaaaatctggtaccaaagaggttaagaaaccaagagatattcctaatgacgtccatgattttattggccaaatgttacctcatgagtactatttctatagatccatagggctagttactggtaaactatttgacgcaattgttacaggtgtttatcctgaagagcctccattaggtggcggatctgctgcttcttatagaaagttggtttctaaatccgttgagatcttcaaaaataaggaaattaacctattaacccaaccaattaacagatactaccaaatcaaacaaatcaaacaagttaaatggtatgcgccaaatgaaccaaccactttaagtaatagaatgtcaccttccctgtttgaaactattaaccgtttgatcattaaaacagaaggatcggccgaaaaagagttttcaatttctgattttattacaacaatcactgcctccaacgatatggcaaaagatttcatatctgagaacgttatttttccaaattccgtaccagttgaatccaaattgaatgcgccctatgatttattgttaacaaatttcttaagattgctagtactattggaattcttcactttcgattccaaggaaaaatcattaaaacctaccaaatggggggaagtccttttgaaattaaataagcttgatattgatgctaaatatcacgaatcagtgatcatctttttggtatatctgaaatgcgacgttttgaagctcgacgaagaagttcagccacccgctccttcagcgttgtctcaagcaactcttcgttcataccctgaggagtcattgtatgtgctattgattacacgtgtattgactttatttcaagtggaacaaaaaccatcgaactaccatggtcctattgataagaagactttgatttttagagatcatctttctttcataaaggaaaacttaaatgaactattcgaagctgtgttaatctcttcattaacctcaggtgaattcaatagattgtcacttgataattttggttgggaaaagaaggtcgttagacgcttaccatttaaattagattctccaaatactatcatggccatgatgtgggaattcttcttgcaaaaatatctccacaatggtaatgctaaaaatgatgccttatctttagttgcgacagaattcaatacttataaatccacacctaaccttgacgaacaatttgtcgaatcccataaatttttactagaaattgaaaaggttgcgcacgagttaaatgatgcaaagttgatcaaagataatgagtttaaactgttcaccaaagcaattgaatttgctaccactgccctttctagctaa

SEQ ID NO: 2194 - DNA, 1050 bp, Saccharomyces pastorianus
atgcccaagctggaacaattcgaaatcaaaaagtactggcaaatattttcaggtttgaaaccaatagaaaacaaggtaaaccatgaccaggttttacctattctttataattctaaactggattcttcggttttgaacaagatctggtttctagctgatatcgatgaggatgataatttggattttgaggaatttgtcatttgcatgagattaatatttgatatggtcaataaaaacatcagctctgttccagatgagttacctgattggttggtccccggaagtaaagtaaaactgattaaagagaggaaaaagcgtgaacaaatagaaaatgcagacttgcctccaaaaaaggaaattaaagtagactggtacatgtctccagaagatctggatcaatatgaaaaaatctactcgagctgtgtaaaacttaccgatggtaccataacattcaacgagctatccacaaagctttcgactaaatttttcaacatcagtaagacagacttgaataaagtttggagcttaattaatcctcaaaatttaccatcagttgatagagatcccacattctacttcattcattgtttgaggcaaagaaacgatttgaatgcggaaataccagcaagcttaccaaactcgctagccgaaatatgtaataaaaaacaggtgaattataatctagagctctctcaaccaagtgcgaagaaaaaagacccagtaaggggagtggacaatgtacatgataacgtggtcgactcaaatgctgataacattagtaacaatgcctttacagatgacaacagtataaagcaaaaatatgctactctaacagacgagcaagttgtcaacgtgagagagcagttagaaggtcttatgcaatacaagaagaatgaagagactcaaggaggttcaaaccgttcaaaaaatgtcaacatcaactcgataattgatgatttggataacatggaacaacaggtagaattattggagagctacttaagcaacaagaggcacgagttgcaatcattacaagcagaaattagttga

SEQ ID NO: 2195 - DNA, 432 bp, Saccharomyces pastorianus
atggttgttcacatcttggggaaaggtttcaaaggcaaggaggtcatccaaatagcgctggcttccaagttttatggtattggtagaacaacggcggaaaaagtgtgctcgaaattagggttttatccatggatgagaatgcaccaactatcggaacctcaaatcatgagcatagcaagcgaattgtccacaatgaccatcgaaggtgacgccagagcgatcgtaaaggataatatcgctttgaagaagaaaattggttgttatagtggtatgagacatgctttacatttgcccgttaggggtcaacgtacaagaaacaacgcaaagactgcaagaaagcttaataagatcgatagacgcgggtttcatactgtctctcaagcggaaacacaacacaatccgtctttttggtcatatttctttggcaaataa

SEQ ID NO: 2196 - DNA, 600 bp, Saccharomyces pastorianus
atggataagatcagagagaagctaagcaacttgaaattggaggccgagtcatggcaggagaagtacgaggagttgaaagagaagaacaaggacttcgagcaggaaaccgtcgaaaaggagaaccagctcaagtctttgaccgtcaagaaccagcaattggaggaagaaatcgagaagctggaagctggcctctctgagacgaagcagaccgagcaggacaacgtcgagaaggagaaccaaatcaagtcattggcggtgaagaactctcagttggaggacgagatcgagaagttggaggcggaattggccgagtctaagcaattgtccgaggactctcaccacttgcagtccaataacgacaactactccaagaaaaaccaacagttggaggacgacttggaggaaagtgacaccaagctgaaggagactaccgaaaagttgagggaatccgacttgaaggcggaccaattggagagaagagtcgccgctttagaagagcaaagagaagaatgggaaagaaagaacgaggaactgaccgccaagtacgaagaggccaagaaggaattggacgaaatcgctgcatctctagaaaacttgtga

SEQ ID NO: 2197 - DNA, 873 bp, Saccharomyces pastorianus
atgttaagaagacaagctcgtgaaagaagagagtatttataccggaaagcacaagaattacaagattctcaactgcaacaaaaacgtcaaatagttaaacaagcgttagcccaggggaagccgttacccaaagaactggctgaagatgaagccctacaaaaggattttagatatgaccaaagtttaaaggaaggtgaagaggtagatgacgtacaaattgatgacgaatatgctgcgacgagtggtataacagatccaagaattattgttacaacatcccgtgatccaagtacccgtctgtcacaatttgccaaagaaatcaaactcttgtttccaaatgccgttagactaaacagaggtaactatgtgatgccaaaccttgtggacgcttgtaagaagtccggtaccacggatttggtagtattgcatgagcatagaggtgtcccaacatctttgactatatcgcatttcccacacggacccactgcacaatttagtttacacaatgttgttatgagacatgatataataaacggtggcaaccaaagtgaagttaacccacatctgatatttgataactttaccaccgatttaggaaaaagagttgtctgcattttgaagcatatgttcaatgcaggacctaagaaggactccgaaagagtcatcacttttgctaataagggtgacttcattagtgtcagacagcacgtatatgtgagaactagagatggtgtagagatagcagaagttgggccaagatttgaaatgagattatttgaactgaggttaggaactttggagaacaaggatgcggatgttgagtggcaattgagaagatttataaggactgccaataaaaaagactacttgtag

SEQ ID NO: 2198 - DNA, 1731 bp, Saccharomyces pastorianus
atgaattggctgttgagaagaggcacttgggcactggcgcccgcatggctgcggtgccggtgtcgtagcggcagcagaagactgtattcgctagcacatgaggtggacacaagcaagatggaagctaccaggaggaatgctcaaatagtgaagaacttggccggctactacccttcggtttcacaaccggcgctgcgtgaattatgtcgtgggtataaggaggtcagtatagatgagttcaacgagaaattcctggacaatccctcggttttgaaccataaggacaatccggactggttgtttaccattaacggcaggatcaagagcattaggttttcgggccagaagattgtgttcattgatttgtacagcacaaacaatgggctgaaaaatcattcgaaactgcaattgatcttgaactacagccaaatcaacgggagcgacaaagacgaggtgcagtttcaagagcatatgagctttttgaaaaagggcgactacatcaaagtgttcggataccccgggttttcccagtctaggcttaagatgttatccctgaaatgtaataggctgcccataatcttgtcagcttcgcaactacctttaccttccaaattgaatgacgaggctaagatcaagtccaatagagtgatcgattatcagttaaatggtattcaggcgttgctggtaagagcgcatgtcatcaaacttttaaggaagttcttggataataaaaatttcgtggaagtggagacccccatactgtcatcaaaatcgaacggtgctatggcaaagcccttcataacgtcctccaaggacttcgatcacttggaattgcgtattgcgccagaattatggttgaagagactcgttatcagcggcgtgcaaaaagtgtatgaaataggtaaggtcttcagaaatgaaagtattgattccacacataacgccgagttttccactttagagttttatgaaacgttcatgtcaatggatgatctgattgcaagaactgaggaactgttcaagtttttgatcacaaacatgcagaagttctttcaagatacgcatttccccgttcctaaaaccttcgatgagctgcactacgcattatccaagaatgattggaagtttaagaaggtcgagtttctaccaacgctaaagaaagaactcggtattgacttaatggcccccgaactcgatatcaacagccctaaggagatcttgagaattttgccgaaagacgtcaaagacgaatacttctcctccgcagaggatctagagcagctttcttcactacaaatattgaataaactatcagacgttttcttggagcaacgctattgccgctcgatactacccactataatataccaccaacctacaattctatcgcctctggccaagacagactcacgcaatgaccgaatcaccaagagattcgaagttttcatcaaggggaaggaatatataaacgcctatgaagaggaaaactgcccacaactacaactagagaagttcctacagcaaaagcaaatcaacgaaatgacgggaaacaaaatcgagactttatcaccggtcatagaccaccagtatatcgagtcgatgaaatttggtatgccccccacaggtggctttggtctcggtatagataggctttgcatgctcttctgcgacaaaaaaagagtcgaagaggtcctgccctttggttgtgtagatgatgtaaacaggcagtga

SEQ ID NO: 2199 - DNA, 924 bp, Saccharomyces pastorianus
atggtccctcccacggtagaaccatcactggactctgaatccaccaaatcctatttctcaccggtcccgccacaactcctagaacagaatgactcgcccgtgataatgggtatcgatgaagctgggagagggcccgtgatgggacccatggtctacgccgtagcatactccacacagagataccaagacgaaacggtgatccccaattacgagtttgacgactccaaaaagctgactgaccccatcagaagaaagctgtttgccaagatgtacgaagacaacgaggaactaacccagatcggctacgcaaccacatgcatcacgccgctagacatctcgagaggcatgagcaagttccccccaacaagaaactacaacctcaacgagcaggcgcacgacgtgacaatggctctgatagatggcgtgacgaagcagaacgtcaagctggatcacgtgtacgtggacactgtcggaccgccagcgtcctaccagaagaagctggagcagcgcttcccagacatcaagttcacggtcgccaagaaggcagactccctgtactgcatggtcagtgtggccagtgtggtcgccaaagttaccagagacatacttgtcgaatccctcaagagagatcccgatgaggtcctgggctctggctacccctccgacccaaagaccgtagcctggctgaggcgcaaccagacacgcctcatggggtggcctgccaacatggtgaggttttcgtggcagacgtgccagaccctcttggacgacgttagtagagaaagcatcatcatcaagtgggaagagcaatacatggacagcaggaagaacgccgcgcagaagaccaggcagctgcagttgcaaatggtgggcaagcctgcgaggaggaagacgctcagaaccctggacaactggtaccagtaa

SEQ ID NO: 2200 - DNA, 1449 bp, Saccharomyces pastorianus
atgtctgcatttgtcagggtgcttccaagaatatccaggagctcggtgctcaccggatcattgagattacaattgagatgctatgcatcgtatccagcgcacactatcattggtatgcccgcgctgtctcccacaatgacccaggggaatctggccgtttggagcaagaaggaaggtgaccaattggcccccggtgaggtgattgcggagattgaaaccgacaaggctcagatggacttcgagttccaagaagatggctacttggccaagatcttggtcccggagggtaccaaggacattcccgtcaacaagcccattgccgtctacgtggaggacaaggacgacgtggcagctttcaaagatttcaagttggaggactcaggcccggatgcgaagaccagcacgaaggcccagcctgctgagtcacagggggcaaagaaacaggatgcgccatcagaaaaggccaagtctcctgctccagaggcaaaagaacgcactaccgccgctcctcaaggtagagtctttgcctctccactggctaagacgatcgctttggaaaagggtattgccttgaaagatgttcagggcacaggcccccgtggtagaatcacgaaggctgatattgagtcatacctggaaacatcttccaagcaatcttccgttggtggagcttctgtgactgcttcggctgcttctgccgctccacaggttgcggccgctgctgctccatcaggcacttccacagcatcatacgaggatgtcccaatctcgaccatgagaagcatcattggagaacggttattgcaatccacccaaggtatcccatcatacatcgtctcgtccaagatatccgtctctaaacttttgaaattgagacaatccttgaatgccacggcaaacgacaagtacaaactatccatcaacgacttgctaatcaaggccatcaccgtcgcggccaagagagtgccagacgctaatgcttactggttacctaacgaaaacgtcatccgtaaatttaagaacgtcgatgtctctgtcgcagtggccaccccaacaggtttgttgaccccgattgttaagaattgtgaggctaagggcttgtcgcaaatctctaacgaaattaaagaactagttaagcgtgctagaattaacaagctggccccagaggaattccaaggcggcaccatctgtatctccaacatgggtatgaacaatgctgttaacatgttcacctcgatcatcaacccaccacaatctacgatcctggcaatcgctacggtcgaaagagtcgccgtggaagacgccaccgcagaaaacgggttctcctttgacaaccaagttactataacagggacctttgaccatagaaccattgacggcgctagaggtgctgagttcatgaaagaattgaaaactgtcgttgagaatcctttggaaatgctattatga

SEQ ID NO: 2201 - DNA, 183 bp, Saccharomyces pastorianus
atgaattttctaccatctttcattctaagcgatgaatccaaagaacgtatttccagaatcttaactttgactcataatgtagcacattatggctggattccatttgttttatatttgggttgggctcacacacccaacagaccaaacttccttaacttgttgtccccattgccaagtgtttaa

SEQ ID NO: 2202 - DNA, 2622 bp, Saccharomyces pastorianus
atgtcaaacagaaattttaacgagatgaacgaactgaacatgaccaacacaaattatggcaacacaaaatataccgctcagcagcatcaaggcgtagtgaatgccatcatctcttcgcttacagccccggaccagcccaccactgtgtctttacaatactctaacgacaagaatatggccactgaaatacaagcttatgctaaactatctgggcccacttggacatactacgtgaaagaattagaggtttctataggcagaaacgcggagcctatgagcaacccactacaggaaaattcagagggcgtgaagaactcgtaccgagtgaatattgatcttggaccagcaaaagtcgtctctaggaaacacgccataataaaatacaacatgaacattggcggttgggaattacacatattgggtcgcaacggtgctaaagtcaattttcaaagagcccacaatggacccaataatccacccattagattgtcttcagggactttattagacataggcggcacacaaatgatgtttatcctgcccgatagtgacccagtgattgcacccatatgtatggagcatttgatgcctaacctgataggtatgtacgggttggatggtaacaacaatcctttactaagagacatcatcaaacaatcaaactatgctaaacaaaaacaattcacttctaatcaacaaatcaaagggttcaagctttacggaagtggtactaatgttccctttggcaacggaacaaacttgggatctaacgagcaaggtgtcttcaacaacggtaacaacaagaacaaaaacggttatttcacatctacggatccaggttacgcagcatctgcaacggctgataccgtcaatcaaccatccggatcaccacaggggccttcaaatacaattatcgctgcaaactttgttgattcatacaaatctgcaaatgtttatcctcaagcgttagatttcacttccgatttgtcccatgatgaaaacagaaacgtgaaaccaccccattcatacgcgaccatgattacacaggccatactgtcagccgcggagggcgtcatttcattagccgacatttacagatacatctcttcgaattatgcctattaccggtttgcaaaatccggctggcaaaattccattagacacaatttgtcattaaacaaggcattcgaaaaagttcctagaagaccaaatgaaccaggtaaaggcatgaaatggagaattagtgaatcttatcagcaggaatttttgaataaatggaatacaggtaaggtggggaaaataagacgtggatcctcagtggcaaggcagttacaactacatatggccaaatttaacactttacccatggaaatggattataagttgtcactcaacatgacgcagccgccgaaacgacaactgcaatctcacaatattttagaaccatccagcaataacgttgtaggagggttcgtaccacatataccgtctcaaacagctctccccccaccgtcacaaccacaacctcttataccacagcagccgtcaccacaaccaccgcaacaacgccaagacattcagtttacatttaccgatccgcaaaatcgaaatacagcactcgcaagacccatcaagacaccgcgattacaaaatacaagctcaaactcaaattccttaaatgtctataaggaaacactccacccgcctgtagtatcgatagcacaaatgaatagacaatctccaaacaatgctctagtctccttcactaatgcatgcgctacttccaaagtaatacacaacaacaacgatagcacaagcaatctgacggataatagcaccagcagtaaaatgattctacctgcgatttctacgtctttgctagacgaaaatagtaattcagaaccaacaacgaccgcatcatccgggaattctaacctagcaccccattctggcacaacaacgtcgtcactcgcaccaaacaaccttcacctttcccaaccttatgacacactactacggtctcctactaaagcatttcatattacggcaatggaagcatatacaccagagagaggaagcgctaatcggaatagatcacccctccatagtaacaatatcaataacaacaacaacatcaacaacaacaacaacaacaacaacaacatcatcaacaacaacaacaacaacaacagcaatctgaacaattctaacttacaaactaatggaacggagaacaaacactcaggctccatattggattctaatgtgttgaagaacatggaatcaaacaatgacaatagacggcttactccatctacaaacaagtcacaaagcataaaaagttcccctggtgtttggaatctcttgcaatttagctctgtgaacaacacacccgctactaataccgtaagcaataagaagggacttcccacaaatcaagatatcaaaagtgctgatgaggagaacgctccttctgaaaaggattcagacacaaactcaaatgacttggagataaaagatgttaactcttcgcctttgaagaaccaaggtggaggtgccgcgaatgccaaggaactaatattagatacagatggtgcaaagatcagtattatcaataactaa

SEQ ID NO: 2203 - DNA, 576 bp, Saccharomyces pastorianus
atgaagtacattcaaaccgaacaacaaatcgacgtcccagaaggtgtcactgtcaacattaaatcaagagttatcagagttaccggcccaagaggtactttgaacaagaacttgaagcacattgatgttactttcaacagaatcaacaatcaattgattaaggttgctgtccacaacggtgacagaaagcacgtagctgctttgagaactgtcaagtctttggttgacaacatgattaccggtgtcaccaagggttacaagtacaagatgagatatgtttacgcgcatttcccaatcaatgtcaacatcattgaaaaggaaggtgctaagttcatcgaaatcagaaacttcttgggtgacaagaaaatcagaaacgttccagtcagagatggtgttgccatcgaattctccaccaacgtcaaagacgaaattgtcttgtctggtaactccgtcgaagatgtttcccaaaacgccgccgatttgcaacaaatctgtcgtgtcagaaacaaggatatccgtaagtttttggatggtatctacgtttcccacaagggtttcattaccgaagacatgtaa

SEQ ID NO: 2204 - DNA, 1230 bp, Saccharomyces pastorianus
atggttaaagaaactaaattttacgatattctaggcgtttctgtcaccgccaccgatgtcgaaatcaagaaagcttatagaaagtgcgcgctaaaattccatccagataagaacccaagtgaagaagctgctgaaaaatttaaagaagcttcatctgcatatgaaatcctatcagattctgaaaagagagaggtatatgaccaatatggtgaagatggcctaagcggtgccggtggtgccggtggtttcccaggtggtggcttcggtttcggtgacgatatcttttcacaattcttcggtgctggtggtgctcaaagaccaaagggtcctcaaagaggcagagatattaaacatgaaatttctgcttctcttgaagaattatataagggtagaaccgctaagctggctttgaacaaacaaattctatgtaaagaatgtgagggtcgtggtggtaagaaaggtgctgtcaagaaatgtactggctgtaatggtcaaggtattaaattcgtgacaagacaaatgggcccaatgattcaaagattccaaacagagtgtgacacttgtcatggtactggtgatatcgttgatccaaaggaccgttgtaaatcctgtaacggtaagaaaatcgaaaacgaaagaaagatcttggaagttcatgttgagccaggtatgaaggatggccaaaaaatcgtcttcaagggtgaagcagaccaagctccagatgtcatcccaggtgatgttgtcttcctagtctccgagagaccacacaagcatttcaagagagatggtgatgatttagtatatgaggccgaaattgatctattaactgctatcgctggtggtgaattcgccttggaacatgtttctggtgactggttgaaagtggccattgtcccaggtgaagtcattgccccaggtatgcgtaaggtcattgaaggtaaaggtatgccagttccaaaatacggcggttatggtaacttgatcgttaagttcaccatcaagttcccagaaaatcatttcacaactgaagaaaacttgaaacaactagaacaaattctacctccaagagccactccaactattccaaagaaggctacggtagacgaatgtgtactcgcagactttaacccagctaaatacaacaggacacgtgcttctagaggtggggcacattatgattcagatgaagaagaacaaggtggtgaaggtgttcaatgtgcatctcaatga

SEQ ID NO: 2205 - DNA, 594 bp, Saccharomyces pastorianus
atgaaatacatacccccattaaatttgtcaccagtggtaagcacagatgtatcgttataccgatcagggtacccaatgtcgctgaactatagtttcatcaaggaccaactacatttgaagacaataatatatatcggcgacaaagaaacgccgctggaggagtatcagagtttcttggacctagaaaggataaaataccaccatattttcatggattccagtcgtgatgaagggattcaagaaaggatgaaccaagtattaaacttggtactggacgttaggaactaccccattttagtgcattccaataagggcaagcatcgtgtaggagtggtggtgggaatcataaggaaactactacaaggctggaccactgcaggcatataccaagagtacgggttgttttccggtgggatgaaagatggagtggatttggagtttatcacgatgtttgaaaccaatctgaagataccaagagacattattcctgggtttgctagaagatgtttgtatttaaatgagctcgaaggtgaggaaggaagtggtgacgaatcgggaagcgaatccatacttaccgcgaagcagtcaatgtga

SEQ ID NO: 2206 - DNA, 3666 bp, Saccharomyces pastorianus
  modified_base (1093)..(1190): a, c, g, t, unknown, or other
atgaccgaagaagacagaaaactcactgtggagacggaaacagtggaggcacccgtggcaaacaatcttttactgtcgaataataatgtaacggttacgaaccccaatgttccctcagcttccacgtcaacttcccctctgcacagggaggcgatgggtgatgctgcgactaccgctagcaccacgaatagcaacgccgttttggagcataacgtatccagcatagataacaacctaatggacgccgatgctttgccacataaccttgcagatcattggcacccagatatcaacagggcgggtacttcgatgtcgactagcgatattccaatggacctgcattcggaccacatcccttctctgtcgtcgagcaacaacaatagcaacaacgccttgatcaaccataatcctctgtcatctcatctctccaacccgtcatcttccttgcgaaataaaaaaagctccttgctggtagcgtctaaccctgtgttttcttcagatatcgaactgtcgaaaaagaaggctccactcgtctccagtaatatccctacaggaaacactgctctgtatcaaacagcaagatcggcgaacgtccatgctccgtcttccacgtcggcaaccaaggctttcagaaaggcttccgctttctctaataatacagcccctagcacgagtaacaatattacttcaaacacgtcacctgctcctcttttacctttgccctctctctctcaacagaacaagccaaaaataatggaaaggcctacaatgcacgtcaccaattcgagagagatacttttgggtgaaaacttgctagacgatacgagaacaaaaatccctcttgtaaatacaaacactaatgataatgattcaacggcgaacgacgattcgcacataccgacccactcaaacacagataataacgaagacgatgataagacgaggaaaagcaaaaacaaaaatagcagcaatgaaaatagtaacaatgacgccaataacatatctactgcatccgcaaaaactgtacctccgacaacccctttcacgagtgctgataacacccaggccctcgctaccaatatacccagcaacnnnnnnnnnnnnnnnnnnnnnnnnnnnnnnnnnnnnnnnnnnnnnnnnnnnnnnnnnnnnnnnnnnnnnnnnnnnnnnnnnnnnnnnnnnnnnnnnnntaatagtaacaataagaagaaaacaagcaataatagcgcaagcaataacaacaccaacacggccagcaaagtgccgagtaatggtgccaagaaggccaattctgaagtaagtgcatccaattctaattctaataataataccacaagtgaagattcgcatgatatttcagaaaagccaacaaaggctgattttttcgctgcaagattggcatcagctgtgggtgaaaatgaaatcagcgactcggaagaaacatttgtatatgagtctgcggctaattcaactaaaaacctgatctaccctgattcttctactcagcagcagcagccgcaacaacaacagcagcagcagcagcagcaacagcagcagcaacaacaacaacagcaacaaaagcaacaaaagcaacaacagagccatggtataacttccaagatgagtgctccattattgaacaataataaaaaattattgagtcgactgaaaaactcgagacatataagcactggtgccatacttaataactcaattgcaaatctgagcacgaacttgaacttgaatcctagttcgatgctaaacactaacaacctgacgttggggcatggtcatttggacgagttgggcagcataaagcagcaacaacaacaacaacaacaacaacaaccaacagatgtacaatccgtagattcatacacctccgacaacccagacagcggtattattcccaaatctcctgacaagaggtcaagcttaatatccttgcctaaagtttctccacacctacttccatctactacaactaacagcaacacgagttcgtgccctaatgtagcaacaggatcacaggacatggaatcaaataacgatatttcaactaagaaatcgttttccaattcgaccttaagacactcttccgccaatcgaaactcggcttataacgacaataagagacctcttagaacaaccgtatccaaaatatttgattcaaatctaaacggcgcacctttacgaagatactctggggtgcctgatcacgtgaatttggaagattatatcgaacagtcaaacaactattcgacaatccccaatagtgtcaaaaaggatgaattttacagtagcaggaacaacaaatttcctcatggtctaaatttttacaacgatcataacatcattgaagaagaacataatggtgagttggtgaatcggcctcaacaccatcataatcttcagcatgaattcattccagaggacaatgaaagcgatgataacgatatacactctatgttctattataatcacaagaatgatttagagacaaagccccaaatatccgattatggtgaagatgaagacgcagacgattatgaccgtcaaaacgcgacttataatagttactatgggtccgaggccaacacacacgaattgccgttacacggtagaatgccatcaagatcaaacaatgactattatgatttcatggctaacaacaacacaggcaacaataaccaagtgaatgaatacacccccttaagaactaaacgtatccaaaggcacttatcaagagcaaacaacagcatgatgaatggtagcattcatatgaatgtcagcgatgatattgctcatcctaatatcatcaataatgataacgtcggctattcgccacacaacttttattcgaggaaatctccctttggcaaactgaagaatttcctctacgttgcctttgtaatatcatcattattgatgactgggttcatccttggatttttattggccacaaataaagaactacaagatgtggatgtggtggtcatggataatgtgatttcaagctcagatgaattgatatttgacatcactgtaagcgctttcaatcccgggtttttcagcataagtgtttcgcaagtcgatttggacatattcgccaagagctcgtttttaaaatgtgatcctaatggagactgtaccataatagagcaggaacaaaagattctacagatcacaacgaacccctcgcatgtagacgagagtttcaaaactgatgtcattggtgaaaatatagagacggtgttgttagggactgtcaaaacgctagaaacgccattaaaatttcaaggtggagcgtttaatagaaattatgatgtctctgtatcgagcatcaagcttctagaccctggatcctctgaagccaagcatgacaacgacgatggcgatgacaacaacggcagcgatgacggtgatgatgacggtgacggtgacgacgatgaaagcggcggtgaaggtatacaggggagacaatacaaactcaaaacaaatgtcagagatgacaaagaggacgataccaagaagtggaaactactcatcaagcacgactacgagttgatagtccgtggcaacatgaagtacgaggtgcctttcttcaacacgcagaaatccacggctatccaaaagaactctatggttcatcctggtaagaaataa

SEQ ID NO: 2207 - DNA, 462 bp, Saccharomyces pastorianus
atgttgcgtaactcttttactaaggctggtcgtttatcacgcgtcacatccgtcagattcgcccaaacgcatgccctttccaatgctgctgtaatggagctgcagtccagatgggaaaacatgccctccactgaacaacaagacatcgtcaccaagttgactgaacgtcagaaattgccatgggttcagcttaccgagccagaaaagcaagccgtgtggtacatctcctacggggagtggggaccaagaagacctgtcttgaataagggtgactcaggtttcatcgctaagggtgttgctgctggtctactattgtctgtggggcttttcgctgccatcagaatggcagctggtgaagactccaagactatgaccaaggaatggcaaatgaagagtgacgaatatttgaaatccaagaatgctaatccttggggtggttactctcaagtccaatctaaataa

SEQ ID NO: 2208 - DNA, 2652 bp, Saccharomyces pastorianus
atgtctcatcataagaagagggtgtacccccaggctcagatcccgtacgctgcgaatgttccaatagttgcagaacaacaacagtttcaacaacagatagatcaaacggcaaatgctataggcaatttccaattgaacgacaactcctactcgttcgcacagccagctgaacagcctcaacaacccagctctaggaaagtggccaatcaattgtaccctgtagacttgtttacagaattgcctcctccaattcgtgatctgtcattaccgcctcctccaattactgtctctccggatagcattgtggccctatcagagacatccaatgtcccatatcagtatgtcagatctactttaaatgcggtgccaaagacaaactctttgttgaaaaaaacgaagctaccgtttggaatcgtaataagaccatacttgaacttgcaagattcgaatgaatacgtgcccttgaacaaagacgggatcatagttcgttgccgccgttgtcgttcttatttgaacccctttgttgcttttattgaacaagggagaagatggcaatgtaatatttgtcgattcaagaacgacgttccatttggcttcgatcagaatttgcaaggtgctccgattaatagatacgaaagaaacgaaatcaaacactctgtcatggagtatttggcgcctgtcgagtactccgtcagagaacccccaccatctacctatgtttttattttggacgtttctcaaaacgctgttcgaaatggtttactagccacatctgccagaactattttagaaaatttagagtttttaccaaaccatgacggaagaactagtgtttccatcatatgtgttgaccatgctctgcattatttctacgttcccctagatgatgactatgaagaatcggatgacgatgatgatgatgatgatgaggaggaggatgatgaagaagaggaggaaggcggagacgaagaggatgatgatgatgaaagcatggctgaaacagtccaaatgtttgatgtcggtgatttaagcgaaccatttttgccaatgcccagtgaggacctcgtggttccattaaaatattgtaaaaagaatttggaaaaactactaaaaacgatacctgaagttttccaagacacacacataagcaaatttgcacttgggcctgctcttaaagctgcttcgaatttgatcaataacacgggaggtaaaattgaagtcatttcatcgactttaccagatactggtgtcggaaaattgaagagaagaagtgagcaaggtgtattgaacacaccaaaggagacctcccaattactatcatgccaggactccttttacaaaacatttacaatcgagtgtagcaaattgcaaataacagtcgatatgtttttagcgtccgaggaatacatggacgtagcgactttatcccatctgggccgcttctctggtggccaaacacatttctatcccggcttcaatgctactagtctgaacgatgttaccaaattcactagagagttatctcagcatttatccatggatatatccatggaagctgtcatgagagttcgtggttcgacaggtttgaaggctacatcgttttttggtcactttttcaacagatcttcagatttatgtgcattctccacaatgcctagagatcagtcctatctgttcgaaatttcgatcgaagattccataacggctgaacattgctacttgcaagtctcaactctattaaccttaaacaccggggaacgtagaattagggttatgacgttggcactaccaacaacggaatccgctagggaagtatttgcgtctgctgatcaactggccattactgattttgtcacacaaaacgcggtagacaaagcattgaattcaagcatggattctgcaagagatttaataacaaaatcactccaagatattttaaatgcctacaaaaaagaaatatccatgtcaaacatcactgctgtgacttctttgaatttgtgtgccaacttgaggatgttgcctttattaatgaatgcgctaggcaaaaacatagcctttagaccagggatggtcccaagtgactaccgtgccagttcactgaataaattagaaacagagccgcttcactacttaataaagagcatatacccaactgtatactctctacacgatatgcctgatgaagttggtttgcttgattccaatagagaaataaaattacctgatcctatcaatgctaccgcatccctctttgaaagatatggattgtatttaattgacaattccgcagagttatttttatgggttggtggggacgctgttcctgaattactgaacgatgtctttaacaccgataacatctctggcgttcccgttggaaaaagcgagctgcctgttttgatagattccccattcaatgacagattaagaaacataatcagtaaaattagagaaaacaatgatacgataactttccaatcgttgtacacaataagaggaccatctatcaatgaacccgctaatctaactgcagagagagagatggcttctctaaggttatgggtatcaagcacccttgttgaagacaagattctgaattgtgccagctatagagaatacctgcaaagtatgaaaacggctattaacagataa

SEQ ID NO: 2209 - DNA, 2523 bp, Saccharomyces pastorianus
atggactttgtcgtagactaccagacctatgcaatggctgattctgccactgcagaactaccagaaccagagccaagactgaacttgacctctgaatcacagctggaatctatgaaaaaagtggatctagactttaaattgcccaacctaaaaaaaaatttaaacaacagttcagacacaccaataaataatgatagtgcgagttcaaaagacttatacaaaagaatgacacattatgcaatgtcttctattgataaaatacaggcctccaatccaaacaaagcattacaacaaagcactttaaataacaagttaccgcggcaagagtctcataattttacaaattacgagtcgaaaaaccttgatttgtccaagttagtatcttcgtcaaacgaccctactataaatacaacaaaccttgttctttcgaacaaactttccaagatcctaaacaactatacgttagtcaattatcaagccacaatccaactgagaaagtcattgaaaattttggaagataataaagaaagactgttacttgatgaacagaagcttatgaatcctgaatacctagggactttggctagaaggactttgagaactgatttggagtcccaattactaaaggaacacatcaccgtgcttgaagaattcaaacctattatcaggaggattaaacgattgtcttcttcggtggaaaatatacaagaaacaagcgcgcatttaataagtgacgagaacggtaaaatacctactgataatgtgacacttcatgaaatagatcaatatcgtttaaaggctgagggattgaagttgaaaaagaaaatcctattatccgttagagacaaatatactttaagtcaggtggaagacgatttaattaccaatggtactatagacgagacatttttcagtgtaataaacaaagtgatcaatatcaaagatgggtcaagttttttattaacactccccaatttgaacgctgggaatgccttgattgtgggggttaatgaaatactacaaaagacaaacaagaaaattttcaattgtttgattgactttctatatagttttgaatccacctcaaacttgttgaatgaccatggcaccagtgaacaaaaaaaccaggtcgttttccaaaagagcctgatttttctgtcaaatgatttagaactcttcaatgaatttttgaaaagaatgaccacattaagatcaaagaatattttagatgaatttttgtcccaatttgatatgaatccagccaactctaaaccaatcatgctatcagcacatgacccaattagatatattggtgatgtgcttgcttcggttcattctatcattgcgaatgaagctgatttcgtcaaatcattatttaacttccaggatgaaaacttgaaagatacgccaatttccataattcgacagaatgggacatttttgaacggtattgacaacaaactactaaacgatatcatccagtctctatccaattcatgtcgtattcgcattgaacaaattgtaagatttgaagaaaatccaatcattaatttcgagatcgtcaggttattgaaactttatagagtcatgtttgagaggaagggcatccatgatgatagttctattatcaataatttgaaatcgttggaaaatatctccaaaaacagaattattggatactatgaggattacatcaaacatgtaacctctgtggaaacagcacactcttcggatgatctattaccaccagaatggttatcagagtatatgaataaattggttgagttatttgaaatatacgaaaaaacacatgcagctgaggatgacgaatccgaagatgataaactactagcatataagagtttacaaacaattgtagaacaaccaattaaggaggtattattaaaacatttacaaaaaactttccccttggcaaggaaaaatgagaacattagagcatcattgttgaccgtcgaaatcaattgctttgacttgattaaatctagaattcaaccttttaccaaaggagtctttgaacaggatgagaatacggaagaaattttcaactggatttctcataaactggacgagttcactaaacaaatgcaaactttacaaataaaattcttattcgaaaacacgggcctagatctttataacaatttggtaaatatgattttccccgtggactcagtaaaggacgaattggattatgatatgtacctgcctttgagggataattcgttgatgggattagagacaatcaaaaaaaatgtacatgatcaattgaatgagtatttgcctcaagcattgaccgatgttcaaagtaatttgctatccaaattaacctcaccgacaatagccgatcacatttgcgatgaatgcttcaagaaactatcgctcttctataatgttttcaggaaagtattggtccacttgtacccgaatgaagaagaccaaatttttgagattttaaacttttctaatgatgaatttgacacgttagtgggtatcaattactaa

SEQ ID NO: 2210 - DNA, 1083 bp, Saccharomyces pastorianus
atgcttaacagaacgattgccaagagatctttagctaccgctgctcaagcggagcacatgctgcccaagaagtacggtggccgtttcaccgtcactttgattccaggtgatggtgtcgggaaagaagtcactgactcagtgaagactatcttcgaggccgaaaatattccaattgactgggaaaccataaatatcaaacaaacagaccacaaggagggcgttcacgaggccgtcgagtctctaaggagaaacaagatcggccttaaagggttatggcacactcctgcagaccaaacaggccatggctcattaaacgtcgccttgcgtaaacagctagacatttacgccaatgtagctcttttcaagtctttgaaaggtgtcaagaccagaattccggacatagatttgatcgtcatcagagaaaacaccgaaggtgagttctcaggcctggaacacgagtctgtccccggtgtggtagagtccttgaagatcatgaccaagcccaagacggaaagaatcgccagattcgcctttgatttcgccaaaaaatacaacagaaaggctgttaccgctgtgcataaggcaaatatcatgaaattaggtgacggtcttttcagaaacataatcaccgaaatcggcaagacagagtaccctgacatcgacgtctcgtccatcatcgttgacaacgcctccatgcaggccgtggccaaacctcaccagttcgatgtcctggtcaccccttcaatgtacggtactatcttgggtaacatcggtgccgccttaattggtggtgcaggtttggtagccggtgctaacttcggcagagactacgccgttttcgaaccaggttccagacacgttggtctggacatcaagggccaaaacgtggccaacccaaccgctatgatcctttcctccgccctaatgttaaaccacttgggtttgaacgaatatgctactagaatctcaaaggccgttcacgaaactattgcagaaggtaagcacaccactagagatatcggcggttcttcctccactactgatttcaccaatgagatcattaacaagttatctaccatgtaa

SEQ ID NO: 2211 - DNA, 867 bp, Saccharomyces pastorianus
atgttttgctcgaaagaatcaaggatcgccgtccttgctattgcactcatatgctcgttgaccgtggtttctcactcaatagaggtcactaaagtgctgactatcacctccacgactactgacgtcgtcgttgtcactgccccaccgctccctccaaacaaagcggaaaccgttttgaacacagcaaccaacataatccagaccatgcagttcatattcaactgcgcgcccttcaaatggaagggccccctgaagatcacctcgtgcacactgaacttcatcgtcttgctactcacggcgtggggctacttactgaagtacctacaagactacaagctgaccaatgatgccgatatggaacgcatggtgagactcgactttggggagatggtcagcagggtcattgggaagggagtcggcaaggcttttacaaagatggacatcacccagaagctagtgtatcccttcgggggaaccaatagccagaaatgtctggtcatgaccgtaggagagaattcgatggtgccgttccacgctctgtccacggagatatgtttcgaccgcaacaccctcggttcgctgtctcgtcgtggccatggtcacggcaacgtgtttgctttggatacggactccgtgagcagtttggggttgttggcgaacatcccgtcaggaatgtccatggtaaatgaactatacgcccattttggagactatacggtagaggttctcggcggtgtcatgaagctggcgtcagccatcaacagagagggctggcagagggaaaagcacggtttcgtggtcccatcgagggaccgacccaacgaaacactgctaagcgttcacatgtatagttcagacctgttatag

SEQ ID NO: 2212 - DNA, 846 bp, Saccharomyces pastorianus
atggattcatatcaagcaagcaatgacaaagaaagtgagccgaagggtagcagcaagattgacgatctgatagagaatgaagcggagatcatacggtttatcaaagaggacggcaagttactgctagataacggtgatggtagagacatccataacataattcaggaagacaaactactcagtgtagaatataatgaggtattgaaacggtttcgcggccaaaaatcgtcactgaccacaacaggcgtggtggacgaagatgaagatgataaatatgactctaaagaacaccaagaaaagactttacaggccatgaacacgttgagacagatcatcaataaagaagtgattccgcccgaaaacttcagccatgtcgtgggggagatatatcgcagcagtttcccccgactagaaaacttttcgtttctgcatgaaagactaaagttgacatccatcttggtgctcatcccagaggagtatccacaggagaatttaaattttttgaagttgacgggcataaaactattccaagtgggaattagtggtaataaggagccgtttgtcaacataccgtccgacttgttaaccaaggcgctagaaatcgtgcttgatccggcaaaccaaccaatactgatacactgtaatagaggcaaacatagaacggggtgtttgatcggatgcataaggaaactgcaaaactggtcgttgacgatgatattcgatgagtataggcgttttgcgttcccgaaggccagagcgcttgaccagcagttcattgagatgtacgatgatgacgaaataaaaagaattgccaggggaaacagttggttacctctaaaatggtaa

SEQ ID NO: 2213 - DNA, 411 bp, Saccharomyces pastorianus
atggccagaactaaacaaacagcaagaaaatctactggtggtaaagccccaagaaaacaattagcttccaaggctgccagaaaatccgccccatctaccggtggtgtcaagaagcctcacagatataagccaggtaccgtcgccttgagagaaatcagaagattccaaaaatctactgaactattgattagaaagttgcctttccaaagactggtcagagaaatcgctcaagatttcaagactgatttgagattccaatcttctgctatcggtgctttgcaagaatccgtcgaagcctacttggtctctttgtttgaagacactaacttggctgccatccacgccaagcgtgttactatccaaaagaaggatatcaagttggccagaagattaagaggtgaaagatcataa

SEQ ID NO: 2214 - DNA, 312 bp, Saccharomyces pastorianus
atgtccggtagaggtaaaggtggtaaaggtctaggtaaaggtggtgccaagcgtcacagaaagattttaagagataacattcaaggtatcactaagccagctatcagaagattggctagaagaggtggtgtcaagcgtatctccggtttaatctacgaagaagtcagagctgtcttgaagtcctttttggaatccgtcatcagagactctgttacttacactgaacacgccaagagaaagactgttacttctctagatgttgtttacgctttgaagagacaaggtagaaccttatacggtttcggtggttaa

SEQ ID NO: 2215 - DNA, 1572 bp, Saccharomyces pastorianus
atgttgctagtacgaaggttgaggaacacgctactgcgatgcttccaatgcaacattatgatggtatgcatgttagttgccctcatcatcaccatatggatagtactggtctctgaaccggtatctacgagggattatatggacaatcttctttcgttttccaagatggatctggctacaaaaagggacaagccattttattcgaactgtgtggacacccaggattatttatcgaatccattgtatgccaaacagaatgcctcgtttgttatgctgacaagaaacgaggagctagaagacgttatcaagactatcaaaagtatagaggaacatttcaaccagtggtttcactatccatacgtgcttttgaatgaccagccgtttacagaagacttcaaaacaaaggtacgcgatgtgacaaatgattctattgtggaatttggcactgttgatgaaataacatggaatttccccagcgacgtgaaggacaccttcgaattttataacgccattgaaaaccaaggtgatagaagcatactgtatgggaacatggaatcgtaccataagatgtgcaggttttattcaggactgttttacaagcacccgctgatccaaaaatcagaatggtattggagactggagcctgatgtggaatttttctgtgatattacatatgatccgttctgggagatggcgcagaacgataagaaatatggatttactatcgtaattcctgagttgtactggacagtgccgaatttgttcagacacaccaaaagcttcgtcagacagaatgacgtgacacccgggtcattgtggaagttgtttacgaaggactatgacatttttgaatccgatgatcccgagttgcgtgactcgatcaattatgacttcgacgtcaaacccaaggtttccgagaagattgccatcgaacagttgctggaaaagggcaatgagtcggaaagaataaatgccgatgaagaggggataatgaatttagtcaacagggctcgctccaagaagcacatcgtggaggacaagttttcgaatgaagaatacaacctgtgtcatttctggagtaattttgaaattgcgcggctaagcgtatttgacaatgaggtttacaacagttttttcgaatttttagaaaaaagtggcggattttggaaggagagatggggggacgcccccgtgcattccataggactatcgctaaccttagacttggacgacgtgcattacttcagggacatcggatacagacattcttccatacagcattgcccgcataatgcgatggggggcgaggagtttccctacgtgacgagcgatccgaggttccagcgcaagaagaacgcagcatacgacatgggtaaggattttggatgcggttgcagatgtaagtgccccatgaacaaactcgatattgaggactccactgggttctgtctcaatgtttgggtcgacttgataaagcaagagaagggccgcgaacaccgcgccgagacgtttaacggtaaccagatcgaagcgaacgttaggaaagactacttgaaagagtttggaaactag

SEQ ID NO: 2216 - DNA, 2007 bp, Saccharomyces pastorianus
atgtctttcagtaacagtaatatggcatcctacatgaccggcaacaaggaaaaggacaagactataaatagtaataacggcagggacaacagtggtgctaacggtgccaacaggggcactaatatcagggacagtagcgaggcgagattgaatgcgtttcaattatcagactttgatttggacgtggatatgaagatggatttctctaatccatcgcaggatataacaaggaatttttcctctggcgtcgcagaaccgtttgatactaatgtaaacgctttattgtccccatcgagtggttcgtattccgcggacttgaactatcaaagtctatacaaaccggaccttccacaacaacaagtgcagcagcagcaaaaacaaacgcctactttaaaagttgaacaatccggcgtattccaatgggacgatgtcttaacgcccgctgtccgtcaacatcggccgtccctcaccaaccagttcctatctccaaggtcaaaccacgatgccgctaacagaagttcaggtaatgactccaattatagcgatactgaatcaagctatcatactccttatctgtatccacaggatatggtttcttcaccagccatgtcgcatttgaccgcgaataatgatgatttcgatgatcttttgagtgtcgcgtctatgaattcaaactatttactaccagtgaactctcatggctacaaacatatttccaaccttgacgagttggacgatttgctatctttaacgtattcagataccaatcttctgccagcatcgaataatagcgatttcagtaacagtaataataataatattgctactaatgcttacaatagtactattgagaataataccagtaaacctgccgctaatcaaaaaatgctgttgactataccaacatcttccacgccctctccttccacctacgctgccccagttacacccatcatttctatccaagaatttaacgagggtcattttccagtcaaaaacgaagacgatggaactttacaactaaagcttccggacaatgataattatagtggtaccaacaaaaacaatctacttcgtccgaacgagaatgactacgctaacgaagctcttagtgatatcgaccgttcttacgaagatattattaacggcagaaagttgaaactaaaaaaatcaagaagaaggtcttcccaaacttcgatttccaataatagtttcagtagtagaagatcttcaagatcaaggagtatatcgcctgacgagaaggcaaaatctatcagtgcaaacagagagaaattgttggaaatggctgacctcttaccttccagccaaaatggtgacgttgaccaggaacatcttgacgaagataataacactagctataacagcgctaccatcagtgttcataataacgacgacgaaagtaacaacaatttaccaacccatcacgcagaagttaagccagatattgttgatattaaaagtgagctggatgatgctaataacaatttcggtgtgcttctaaacatagatgacttggaccagtttgaaccaaaggtgaattttaaaaatgatgataatgatgaaaataacgataatagtgcattctcttcgaagaaaaacgacgatttagagaggctagacaatttaacgaataataggaagaatcctgcaaattttgcttgtgacgtttgtggaaagaagttcacaagaccgtataacttaaaatcccatttaagaacacatacgaacgaaaggccattcatatgttctatttgtggtaaggcatttgcacgccaacatgatagaaagagacacgaagatttacatacaggtaaaaaaaggtatgtgtgcggtggtaaactaaaagatggtaaaccttggggttgtagcaagaaatttgcaagaagtgatgccctcggtaggcatttcaagaccgaaagcggtagaagatgtattactcccctgtacgaggaagctagacaggaaaaatctggacaagacacttaa

SEQ ID NO: 2217 - DNA, 1455 bp, Saccharomyces pastorianus
atgacgttagcctctgaaatgagcgatgagatttccttggacaacccgacacctatatttaatgaaggtaatgcttcaaagccaattagggttgccggcgtcgtaacaacggggacatataatatcgaccctaccgtgctacaaagttacctagacgatactattttgaaatccattactttaggtcagctggtgaaaaatgcagacgtgctaaacaaaaggttgtgtcaacatcatattgctttggatgctaagcagtcgtttcacttccaagattacaaatatatttctgatgaaaaaggcatacacgacatggtacccttgatggaagttgtatcacaattggatgtactacctcctaaaacatttacagcaaagacaggtacgaattttggcaacgataacgatgcagaagcttatttacaattcgaaaagctaatcgataagaagtacttaaaattgcccacgagggtgaatttggaactactgagaggtacaaaaatacactcttctttcttgttcaactcttattcttctctttctccccaatcgattttgaacttaaaactcttcagtcagttctataattggaattcaaacaaaggtttggatatcggccaaaggggagcaaggttaagtttgaggtatgaaccactgtttttacacccacttttacacaatccatactcggatgaacgccctacgttgtttcatgaatggttcctagagtcttgttggagatcttccaagatatgttcaccaggaactagcgcaccatatatgtattcagatacaatgttatctcaagcaggcgatcaattaaggaccgtattgggtcatacattcgtcctggacaagaggaatcattttatgtgtcctacaaagggttcaatgctaaaatggagtaatgaactttcaccaggaaaacactggaagacccaactagaattgaacaacgtaaagagttggttaagtgacgatttcattactttctctaccacttttaaaacaggatacctgaaaaatatatcttcacaacaatctttgcctgtacatatatgtgataaatttcagaatggtggaccaaatgacatcagaagtttccaaacatttgggttaggcccaagagatttatatgatgccataggtggcgatgcttttgtttcatatggagttagtgtttttactcggttaccttggaagaaagtccaaaaatcgaactttaggttacattggtttttcaatgggggtaaattaatcaatcatggcaatatgtctctaagcaactgcatcggtcagctttctaaggaacattctacctctacaggtatcggacttgtgctaaggcatcccatggctagatttgaactaaacttcagcttacctattgccgcccacgaaaacgatttaatgagaaagggatttcaattcggaattggtttggcatttttgtga

SEQ ID NO: 2218 - DNA, 972 bp, Saccharomyces pastorianus
atgtcaggaagtttctggacatctacacagaggcatcactggcaatatacgaaggcatcgttagccaaagagaggcagaagttatggttgttagagtgccaattgttccctcaaggcttaaatatcgtaatggattccaagcagaacggtatggaacaatccattactaaaaacataccaataacgcaccgagatttacactatgacaaggactataacctaagaatttattgctattttctgataatgaaacttggaagaagacttaatattcgacagtatgctttagctacggcacatatctatctttcacggttcttaataaaggcttcggtgagagaaattaacctatacatgttggttactacgtgtgtgtatttagcgtgtaaagtagaggaatgtccgcaatacattagaactttagtgagtgaagcccgtactctatggcccgaattcatccctcctgatcccactaaagttactgagtttgaattctatttgcttgaagagctagaaagttacttaattgtccatcatccttatcaatccttgaagcaaatcgtccaggtcttgaaacagccaccttttcaactaaccttatcatccgaagatttacaaaactgctggtctttgatcaacgatagctatatcaatgatgttcatttactgtacccacctcatattattgctgtggcatgtctgttcattaccatttccatacacggaagatcaaccaaaggatcatcattagcgtctatggcttccgaagccatcagaggttctgaatcttctggttcgcctgctcaattagctttcaaccgttttatggctgaatctctcgtagacctggaggaagtcatggatacgattcaggagcagattacattgtacgaccattgggataagtaccatgaacaatggataaaatttttgctgcatactttatatttaagaccggcttcagcaatttaa

SEQ ID NO: 2219 - DNA, 219 bp, Saccharomyces pastorianus
atgtctgcgttgtttaattttcgttctcttttgcaagtgatattactactaatttgctcatgcacttatgttcatggacagtggccatctctgttagatcgctacaaaaaccatgaaggttttggtgctttctggaaaatggcacgtattggtgagagggccagtccgtatgtaagtttggcatgtattttgatggccatcagtcagtttaatagttga

SEQ ID NO: 2220 - DNA, 2121 bp, Saccharomyces pastorianus
atggattcggcaaccgttaagaatgaagtactggaaactccagaccaagatttaaaacatgggctggaagaaatgaaagaggagcaaaatagtctctctactacatctaagaataaaaggcaggtgatcgttcccgcgtgtacgccaaaggtccactatacaccactaaagactggtctttgttacgatgttagaatgagatatcatgcaaagattttcacctcgtacttcgagtacatcgaccctcatccggaagacccaagaagaatataccgtatatataaaatactggcagagaatggcctgattaatgatccaactctgagcggtgttgatgaccttggtgacttaatgttaaagatacctgtcagagccgcaacgtccgaagaaatcctgcaggttcatacaaaggaacatttggagttcatcgaaagcacggagaaaatgagccgagagcagctgttaaaagagactgaaaaaggagactccgtatacttcaataatgattcctatgcaagcgccagattaccttgtggtggtgcaattgaggcatgtaaggcagtcgttgagggacgtgtaaagaattctttagccgtggtaaggccacctggccatcacgctgagcctcaagctgcaggcggtttttgccttttcagtaacgttgccgttgcagcaaagaacatcttgaagaattatcctgaaagtgtaagaagaataatgattttagactgggacattcatcacggtaatggtacccaaaaatcattctatcaagatgaccaggtgctgtacatctcattacacagattcgaaattggtaagtactatcctggaaccattcaaggtcagtatgatcaaactggtgagggtaaaggtgaaggatttaattgtaacattacttggcctgtcggcggtgttggtgacgctgaatacatgtgggcattcgagcaagtagtaatgccaatggggagagaatttaaaccagacctggtaatcatatcgtctggatttgatgctgcagatggtgatactatcggacaatgccacgtcaccccaagctgttatggtcacatgacacacatgctaaagtctctagccagaggtaatctctgtgtagttcttgaaggtggttataatttggatgcaatcgcgataagcgctttaagtgttgcaaaagtgttaataggagagcctcctgatgaattacctgatcctgtaagcgatcctaagcctgaagtcattgaaatgatagataaagtcattcgtttacagtccaaatattggaattgttttagaaggagacatgcaaactctggttgtaattttaatgaacccattaatgactcaataatatcaaagaattttcctttacaaaaggctattcgtcaacagcagctgcattatttaagtgacgaattcaatttcgttaccttgcctctaataaacatggaactaccagacaacatcgtgttatgtactccgaatgtttccgaatcaagtactttgctagttgtcgttcatgatacttccgatgtttgggccaagagaaacgttatatctggtacaattgacctgtcctcgtcagttgtcatcgataattgtttagacttcatcaaatggggcttggataggaaatacggcatcattgacgtaaatatacccctaactttgttcgaagctgacaattattcaggaatgattacttctcaagaggtattaatatacttatgggataactacatcaagtactttccagccattgctaaaattgcatatattgggataggggattcttactcaggtattgtacatctcctgggccacagagataccagagctgtgaccaaaacggtaatcaattttctgggagacaagcaactaaaaccgctggttcctttggtcgatgaaacattaagtgaatggtactttaaaaattctctagtatttaccaacaacagtcatcaatgttggaaagaaaatgaaagtagaaaaccaagaaagaaatttggcagagttttaaggtgtgatacggacggactaagcaatactgttgaagagaggtttgaagaggcaacggatttcatactagattcgtttgaagagtggagtgatgaggaatga

SEQ ID NO: 2221 - DNA, 1884 bp, Saccharomyces pastorianus
atgaatcaaccgcaaatcggtacctacaacgtaggtacacaattaacggttggatcacatcaggtcgaaatcatcaaatacctaacaagcggcgggtttgcccaagtatattctgcgttaattagtccacctgatcatcatactaattcaaatattgcgtgcttgaaaagagttattgtaccggataagactagtttgaatacgttgagagcagaagtagatgctatgaagttgttgaggaataacaggcacgttgtgtcttacattgattctcatgctgctaaggctaccttacataacggttcatatgaagtatttgttttgatggaatattgtgaaaggggtggcctcatcgactttatgaacacaaggttgcaaaacaggttgcatgtatctgagattctgcaaataatgtgccaagttactcaaggagttgctgctatgcatgctcttcaacctccgttaattcatcgtgatataaaaatagaaaacgttcttatctcagcaaacaatgagtataaactttgtgattttggttccgtatgcggtgttataagacctcctaggaatccgcaagaactatcatacgttaagcaagacattttaaaaaatacaacggcacaatatcggccaccagaaatggttgacatattccgtggtctgccgatcaatgaaaaatctgatatatgggccctgggtatttttctatataagctttgttactacacaacgccgtttgaaaaaggtggtgaaccagccatattaaacggacagtttgaatttccattgtacccagattatagtaagcagttgcggaatttgatatgtaaattactggcacagaatccttcccaaaggcctaacgttttccagctattaaagcaaatagcaaacatgcaaaatgtcccatatccaatacaagacatacaagcggtacaaaggcctagtaatcatttgaatttaatggaactccatcaaaattctgccacgcaaaatattcaaagcttaaattcccactcaattatcgaaaattcgatgccgaacccaaaattccaatatggtatgcctgctaatgtaattacaacgcaatcccttccaactagagaaaactctcaagcatttattaatgcttcttcaagcagtttggcgagaaattcttcaatatttgaatcaggagtgtgcaatgccccaaacaatattaatcagcccaatgcgaattccgcgactaagttaaagcaggcgattgaatcagaagcgcatagcttcagagaaagcggtcccataaacgtatccctgcgaaacataattcctcaagacgatgattcttcgtcctcttcagatgaatcctatacaggaggcgtggatgaattaaagaaaactcgatctctaggttcttattccacccacgaaaacgctaagagaggagagtctgtcatagcatctcttacctcatcaagtactccaggaagtagctccgctcctacacctgcaaaaataaaatctaaacaccaaagtctacctgaatcggcattcgttggtatcgttgacagtggcaaagatagtcttccgagtgattcaaataggaatcaaccagtaaaagatggcgcgagtgtatctaaacaagatttgaaaaactctattcaacagcgtatgatcaacctgctcagttcttctgaggagtcattcaacgctagaaagttgtccagagcgaaggcaacaaaagacgagggtccaggcaagctaatagcatcgatatcaagagccccagttttgaaagagaaaaaagccaagccaattcctccgcccaagcctttccacttaaaacctaaaccgcctctaaaaccatcgtttttagcgggtcaaaaattattttcagaggaataa

SEQ ID NO: 2222 - DNA, 228 bp, Saccharomyces pastorianus
atgacaaacaactttatcgttactctaaagaagaacaccccagacgtggaaactaaaaagttcttggattccgttcatcgtgtaggcggttctatcgaacacgagttcgatattatcaaagggtacaccatcaagcttccagatgttctcaaattgaacaagttgaaggaacagcatagcgatgtcatccagaacgtcgaagaagataaagaagtccataccaattga

SEQ ID NO: 2223 - DNA, 1338 bp, Saccharomyces pastorianus
atgaatgtcgttgtatgctccggaggaactgccacaaactcgatcacaccttgcttttcaaacatttcaatctctaaagggcacgagctaacttatattttgcctatatcagataatggtgggtccacaagtgagattttacgaatagttggtgggcccgcaattggtgacattagatccagaatagtgaggcttcttcaagatgaacagctcgttaagctattcggatataggctacctaatgacaaaatgcaagcgaaaaaagaatggaatgaaatagtagaaggatcacatcctatatggaaaagcatttctatagaagtcaaagagatgtgtcgctcttttattattcacatgcaagcagaactgttgaaaaagatcaaacactcaaacccgtttcaattcgagagtgcatccatcgggaatttcttcttaacgggcgctagattgtttttgggatcccttgatgcgtccattgaactgatgatgagaattgggaggtgtagtcctctagtccacgtcgtcccatgcataaataccaaccacacgcatcatatttcagctttattgaccaacggtgatatgataactggccaatcacaaatatcacacccttcagcatctgtaccaaaggcaaacgacatagcgcattccgctaaatttgtccatctacttggttcttacgatgatcatttgaaaattctcttggaagacgaagacgaagaagaggctgaagaagagtatgccaacccaatctatattcttccagaactaaagaactcgcagttacatttcgataagattgacggatctcaaaatttacctgccccggtaaacagaattctatacattaatccatacggagaagagattaaaccaatgggaaatcccagagctatttctaaagtgaaaaaagcagatatggtcgtttattctatcggttctttaatgacaagtctactgccaatcctcattcttggtaatcttgccgaggtaatcttggaatcaaccagtacaaaaaaagttttgcttatgaataataaatatgatagagaggtatccggtctagatggttcacattatgtccaaataatcatcgattccatgaccagagcaataaggggttatagacaatctaagggtaattatttagaaaatacgaactttgagtggcaagactttattacagatattgtttatctgaaaaacggtgaaattaaaattgatgaaacaacgttcaaagagcataatattagatgccaccaaattgcttcttctgataagatggaaagtgaagaacttgaaaaggttctaaacgaaattggctctcaaaactga

SEQ ID NO: 2224 - DNA, 726 bp, Saccharomyces pastorianus
atggtcaaagctgttatctttaccgatttcgatggtactgtcaccctagaagattctaacgattacttaaccgatactttagggttcggtaaagaagaaagattaaaggtcttcgaaggtgttttggacggtaccaaatcctttagacaaggtttcatggaaatgttggaatccatccacactccatttcctgagtgtattaagatcttagaaaaaaaaatccgattggatcctggtttcaaggacactttcgaatgggctcaagaaaatgatgtccctgtcgttgttgtttccagtggcatgaagcccatcatcaaggttttattgactagattagtcggacaacattctattcataaaattgatattgtttccaatgaagttgaaatcgaggctcatgatgaatggaaaattatctataaggatgagagtccttttggccacgacaaatccagaagtatcgacgcttacaaaaagaaattcgaatctgctttgaagccaggtgatgaaagacctgtatacttttattgtggtgacggtgtttccgacttaagtgctgcaaaggaatgtgacctgctattcgctaagagaggtaaagacctggtcacttactgtaaaagacaaaacgttccattccacgaatttgatactttcgaagacatcttagccagcatgaagcaagttttagctggcgaaaagacagtcactgaattgatggaaaattaa

SEQ ID NO: 2225 - DNA, 1254 bp, Saccharomyces pastorianus
atgaacaaaatcaaagtagttaaccccatcgtggaaatggacggtgatgaacaaacaagagttatttggaaacttatcaaagaaaagttgatactaccatatctagatctggatttgaaatactatgatctttctattcaagaacgtgataagactaatgatcaggtcacgaaggactcggcttatgcgactttaaaatatggcgtggctgttaaatgcgctaccataactcccgatgaggcaagaatgaaagaatttaacttgaaaaaaatgtggagatcacccaacggtacaatcagaaacatattaggcggaaccgtcttcagagaacctatcattatcccaaaaatacctcgtctggttcctcattgggaaaaaccgataattataggccgtcacgctttcggtgaccaatatagagctactgacatcaaaatcaaaagggcaggtaagctaaagctacaatttgattcagatgacggtaaagaacacattgatttgcaagtctatgaatttcccgaaagcggtggtgttgctatggcaatgttcaacacaaacgattccatcaaagggtttgcaaaggcttccttcgaattagccctcaagaggaagctcccactattcttcaccacaaaaaacactatattaaaaaactatgataaccaattcaaacaaatttttgacaacttgtttgatgcagaatataaagaaaagtttaaagctttaggcataacatacgagcatcgattgattgatgatatggtagcacagatgttaaagtccaagggcgggtttataatcgccatgaaaaattatgatggtgatgtccagtccgatattgtagcccagggatttggctcccttggtttaatgacatcaattttaattactccggatggccaaacatttgaaagtgaggctgcccatggtacggtgacaagacatttcagacaacatcaaaggggcgaaaagacgtcgacaaattcaattgcatcaatatttgcctggacgagggccattatacaaagaggtaagttggacagtacaagtgacgttataaaatttggagatttactggagaaggttacattagatacggtacaaaaagatgggaaaatgaccaaagacctggctttgatgctaggaaagactgacagatcatcgtacgtaactacagaagaatttattgaggcagtttccaaaagactcaataagacgatccgtagctctactggaagtctgtgcaaactgtaa

SEQ ID NO: 2226 - DNA, 1092 bp, Saccharomyces pastorianus
atggtcaaggagacaaaactttatgatatgcttggagtatctccaaccgctaatgagcaggaattgaaaaagggatatagaaaagctgctttaaaataccatccagataagccaacaggggatactgaaaagtttaaagagatatcagaagcttttgaaattttaaacgaccctcaaaagagagaaatatatgaccaatacggtatcgaagctgccagatcaggtggtccaagctttggtgcaggaggtgccggaggtcctggaggcgccggtgggttccctggaggcgctggcggattctctggcggccatgctttcagcaatgaagacgctttcaacatattttcgcagttctttggtggcggctcctcattcggtggtgcagatgatggcggattcagtttctctggctacccatctggcggtggtgctaatatggggggtatgccaggtggaatgggaggcatgccaggtggaatgggaggtatgccaggtggcatgggaggaggcatgggaggcatgcccggtggtttcagatcagcatcgagctctccctcatatccggaagaagaaacagtccaagtcaatctgccagttagtctagaagacttatttgttggcaagaagaaatcgttcaagattgggagaaagggtccacacggagcatccgaaaagacgcaaattgatattcaattaaaacccggctggaaagctggtacaaaaataacgtacaaaaatcaaggtgatttcaatccacaaacaaatcgcagaaaaactttacaatttgttattcaggaaaagagtcatccaaactttaaaagagatggcgatgacttgatttacactttgccactatctttcaaagaatcactactaggcttttcaaaaactattcaaacaatcgatggtagaaccttaccattgtcaagagtgcaacccgttcaaccttcgcaaacttctacgtaccctggccaaggtatgccaaccccaaagaacccatctcagagaggtaatttgattgtaaaatataaagtggactacccaatatcgttaaatgacgcccaaaaacgtgctatagatgaaaatttttga

SEQ ID NO: 2227 - DNA, 912 bp, Saccharomyces pastorianus
atgtccgttattttagtatccgctggttatgaccacacaattagattctgggaagctcttactggagtttgttcaaggacaatccagcactctgactcacaggtcaatcgcttagaaatcaccaatgacaaaaagctattagccactgcaggccaccagaacgtacgactttatgacattcggacaacaaaccccaatcctgtggcgtctttcgaaggacatcgaggaaatgttacatcggtttcttttcaacaggacaatagatggatggtgacttctagtgaggatggaacaattaaagtgtgggacgtgcgttccccctccattcctagaaattataagcacaatgcgcctgtgaatgaagtggtaatacatcccaaccaaggggaattaatatcatgtgatagagatggtaatataaggatatgggacttgggagaaaatcagtgtactcatcaattgacgcctgaggacgacacctctctacagtctttatcaatggcaagtgatgggtctatgctggccgcagcgaacagtaaaggcaattgctacgtgtgggaaatgcctaatcataccgatgcatcacatcttaaaccagtgaccaaattcagagcacattctacttatataaccagaattttattatcttctgatgtgaaacatttggcgacatgctctgcggatcatacggctcgtgtgtggtctattgaagatgactttaaattggaaacgacattggatggtcaccaaagatgggtttgggattgtgcatttagcgctgacagtgcgtacttagtaactgcatcatctgatcattatgttaggctatgggatttatcaacaagagagatcgtcagacagtacgggggacatcacaagggtgctgtatgtgtagcactgaacgatgtataa

SEQ ID NO: 2228 - DNA, 1116 bp, Saccharomyces pastorianus
atgtggaattttgttttgttagatacttgtggtatttcgtgtcgaaaaaatgtttctggtgtattcatccaggtgcgtaatgccactaaaagagctgccggttcaagaacaagtatgaaggactctgcaggtaggagattgggcccaaagaaatacgaaggccaagatattacaagtggcgaaatcattatgaggcaaagaggaacgaaattctatcctggcgagaatgttggtatagggaaggatcataccatatttgctctagaacctggtgttgtccggtactatcttgatcctttccatccaaagagaaaattcattggtgtggctttaagccgtgatcttaaattaccgtctcctcactttgaacccacgttcagaagatttggtcgttgtgagctaactaacaaaagagcatcttccaaagaagagagttctctctctagaaaagattaccttgcgaagcctgatattttaaaacgtctagaaagtagagattctaaaaggaaggaactacagaaggaattggcaaaagctcttacagaagaacttaagttaaacgtaaaggacatcggcttggcaacatcatatttaactcgcgtaagagcttccctgaagaatgggttctccgttgaagatgcggtgtttaatagcagatactttttaaaaacagaagagagtttaagagcaaagagagaaaactggccaagtgagaaattgacagaaagtttgtccaaaatcgacgagtgtagcgaccttttgaactcatctacttctttcaataataaactagaattaatcgggtacatttctgaacaagagaaacaagctttgaaggtaaaactaatagagagcctagagaaaatcccaagcctacaaaccaaaaaagataagaatgccaccaaagctcttttcaaagatacagggaactttttaactttatctgaagaggtacatctgcgtagaaaatatttgaagcctgtctttccagaaacagagaataccatcgaaaccaaaatcggaaagaagtcaattgtttctaggcgttttgactatatcagaaataaggtcgaagtcatcgctagaagcaagcaagcctttttgagcaagctttga

SEQ ID NO: 2229 - DNA, 1290 bp, Saccharomyces pastorianus
atgagtgatgatcgtggatatgaaagagacaaacgctcctcccgcggctcagacaatttcaacaatagacatagggattcaaatgcgtacaggggaaacagatatggaagtggatatagaggaggtagagacaggcctggttacagagtaagagaacccctcaatggtagagaacctcccagatctagagaccgttatgacgacagattcggaggaagagaaggaagtggtcgttacggaggtagacgtgatgattaccctaggagcttcaagggtaggcacaatccacgcgatgacagtaggagaggtggctttaataacgatgcagcaaggggtgattacggtcctttgttggcacgtgaattggatagtacgtatgaagaaaaggtgaatagaaactattccaacagtatatttgtgggtaatttgacatacgacagcaccccggaagacttaactgagttcttttcacaaataggaaaagtggtccgcgcggacataattacatcaagaggtcaccacagaggcatgggtacagtagagttcactaattcagatgatgttgacaatgccatccgccagtacgatggggccttttttatggatcgtaaaatttttgtcagacaagataacccaccaccttcaagcaatacaagagaaagaaagggactcgatagaggagagtctaaacaaaatcgaaaaacgtacgaaattattgtcaaaaacttacctacttccatcaattggcaagctttaaaagacatgttcaaggaatgtggaaatgttgcacacgccgatgtagaactagataatgaaaaggcctctacaggatctggtaccgtgtccttctatgaccctaaagatctccatagatcgattgagaaatacaatggatatgaaatagagggcaatattttagatgtcaagaccaaggaaggcgtggatgagtatagtaacgggggcgatattgatatcccaatggaagattctccggtaaatgaagaagcccgtaaatttaccgaaaatgtagtcggcggaggcgaaagaaatagcttgatttactgcagtaatttgccattttctactgcaaagagtgatctttatgacctttttgagaccattggaaaggtcaataatgctgaattaaggtacgactcgaaaggagcgccaaccggaatatctgtagttgagtacgataacgtcgaagatgctgacgtgtgtattgaaaggttaaacaactacaattatggcggttgcgatctggatatatcttatgctaaacgcgtttga

SEQ ID NO: 2230 - DNA, 1440 bp, Saccharomyces pastorianus
atgtcagcgatattatcaaccaccagcaaaaatttcttatcaagaaaccccgccagacaatgtcagaatgcacaaaaggctctttttgcactattgagctctcgccaatatagtagcgccactgaacaaacgttgaaggagaggtttgctgaaattatcccagcgaaggctgaagaaattaaaaaatttaagaaagaacatggtaaaactgtcattggtgaagttctcttagagcaagcttacggtggtatgagaggtattaaaggcctcgtttgggaaggttctgttctggatcccgatgaaggtattagattcaggggtcgtacgattccagaaattcaaagagaattgccaaaggctgaaggcagtactgagcccttaccagaagcgttgttttggctacttttgacgggcgaaatacctactgacgctcaagttaaggccctttctgcagatttagcggcaagatcagagattccagaacatgtggtccaacttttggacagtcttccaaaggatttgcatccaatggctcaattttccattgccgtaactgctttggaaagcgaatccaaatttgccaaagcatatgctcaaggtgtatctaaaaaggaatattggagttacacttttgaagactcgttggatttgctgggtaaattgcctgtcattgcttcgaaaatctaccgtaacgtctttaaagatggtaaaatcaccaccattgatcctaatgctgattatggtaaaaatttggctcagctattgggttacgaaaacaaggatttcatcgatttgatgagattgtatttaactattcattctgatcatgaaggtggtaacgtttctgcccatactacccatttagtgggttctgcattgtcttctccatatctatctttagccgctggtttgaatggtttggctggcccactgcatggtcgtgccaaccaagaagtcttagaatggttattcaaattgagagaagaagttaaaggtgattactctaaagaaacaattgagaagtacctatgggaaactttgaatgcaggaagagtcgttccaggttatggtcatgccgtcttaagaaaaacagaccctcgttatatggcccaacgtgaatttgctttgaagcatttcccagattatgaactattcaagttggtgtccaccatttatgatgtagcgccaggtgttttaactaagcatggtaagacaaagaacccatggcctaatgtagattcccattccggtgttctattgcaatactatgggttgactgaagcctcattctataccgtattgtttggtgttgcaagagccattggtgtattgcctcaactgataatcgatagggctgtcggtgctccaatcgaaagaccaaaatcattttctacagaaaaatataaggagctggtgaaaaaacttgaaagtaaaaattaa

SEQ ID NO: 2231 - DNA, 858 bp, Saccharomyces pastorianus
atgtctgacagagagcaaaagagtggtaacaccgccttcgagaaccctaaggcgttcgactcctcagataatgaatctatctgtgaaaacaacgagcacaacgagcacagccgccattcgcaggagtccctgtgcaaaatctataccgcgggcaaaaacaacgagtacatttatatcggtcgtcaaaaattccttagagacgatttggcagaagcgtttggtggtactttgaatcccggtttagccccagcgccggtccataagttcgctaatcctgctcccctaggtctttctggtttcgcgctcaccacattcgtactttctctgtgcaacgctagggctcaaggcgtcaccacccccaacgtcgtcgtagggtgtgccatgttttacggtggcctggtgcaactgattgcgggcatttgggagatcgctctggaaaatacttttggtggaactgccctgtgctcttttggcgggttttggttaagttttggtgctatttacattccttggttcggtattctggacgcctacaaggataaggagtctgacctcgggaacgccctagggttttacctcttgggatgggcactattcacttttggtctctgcgtctgcactatgaagtcaaccataatgttttttgccttgttctttctcttagctgtcacgttcttactattgtcaattgcgaacttcacaggtgaagttggtgtcactagggctggtggtgtcgtgggcgtcgtagtcgccttcattgcctggtataatgcttacgcaggtatcgccaataggcaaaactcatacatcatggtccatcctttcccgttacccagtaacgataaagtctttttctaa

SEQ ID NO: 2232 - DNA, 954 bp, Saccharomyces pastorianus
atgagtggagtgatagagaatggactacagctgtcggacaatgccaagacgttacatagtcagatgatttcgcaaggtgtgggcgcactatatacacaacaggagcttcaaaagcagatgggaattgggtcattaacagacctgatgtctattgtacaggaactgctggataagaacttgatcaaattagtgaaacaaaacgatgaactaaaattccaaggtgttttggaatctgaggcacaaaagaaagccaccatgtcggcagaagagtcattggtatattcttatatagaggccagtggcagggagggcatatggtccaagacgattaaagcaagaaccaatctccaccagcacgtggttctcaaatgtttaaagagtttagaatctcaaaggtatgtaaaaagtgttaagagcgtcaaatttcccacaagaaagatctatatgctgtacagtttgcaaccgtcggtggatattacgggggggccatggttcacagacggagaactggatatagaattcatcaacagtttattgactatcgtttggaggttcatatcggagaacaccttccccaacggtttcaagaacttcgaaaatgggcccaacagaaacgtcttttacgcaccaaacgtaaagaactattccaccacccaggagatcttggagtttattacagcagcccaagtggccaacgtggagttgaccccgtcaaatatcagatccctctgcgaagttctggtgtatgacgacaagctggaaaaagtcatgcacgactgttacaaggtgaccctagagagtattctacaaatgaaccaaggcgaaaccgacccggattcgggaaacaaagccgaggagcatgaagaagagttttccatcttcaactacttcaagatgttcccggcctctcagcacgacaaagaagtagtgtacttcgatgaatggacaatctag

SEQ ID NO: 2233 - DNA, 441 bp, Saccharomyces pastorianus
atggctgatttatacagtggctccactttagaaagtttactagacggattaaccgacttgaatagaatcccgaaggagtactctccactattagaaccatactttcaaaatatagcaaaagatgagaatttgaaatccaaagcccttgaaatttgtcgttctaatttccataaatggaaggcagaagatgaaaaaggtgtcgatcctgaaattacaagaagatgtcttaacctgtggtatgtcatcaaaggtaaagagtacaaaaaattaaagaatcccccaccggctgataacattattaaagatgagattgatgtgtcaaatattgaggacctgaatgtgggcagactggagttcgatgaatatggtaaacctataactaatccactagataatctgaccttagaagaggtcgaagttagtgacttcataaaagagtaa

SEQ ID NO: 2234 - DNA, 1899 bp, Saccharomyces pastorianus
atgtccgtcagtacgccaggtgagttggacacgttaatagaaaaagccactagcgaaagcattccgaatggtgacctcgatcttcccatagcattagagatttctgatgtcttaaggtctagaagggtcagccctaaggattcgatgcgttgcataaagaaaagaatccttaatacagccaataatccaaacactcaattgtcttcatggaaacttacaaatatatgtgttaagaatggtggaacaccatttattaaagaagtttgttctagagagtttatggataccatggaacacgttattttgaaagaggacaataacgaagaattgtctgagttggtaaaaaccatactatatgaattatatgttgcctttaagaacgattcgcaactaaattatgtagctagggtttatgataaattagtctctcgtggcattaagttccctaaaaagttgacaatttcaaattcgccaactgcaatgttcgattcaaagacgccagcggactggatagattccgatgcatgcatggtttgctccaagaagttcactttgttaaataggaagcatcattgtcgttcttgtggtggagtattctgccaagaacattcatcaaataatataccattacctgatttagggatttatgaacctgtgagagtttgcgataactgctttgaagattacgacttgaagaaacatgacaatagtaaacaatcaagaaaacatcgtcacaacaaaaaaaaaaaggataaggacagttcaacccctgaagatgaagaggaattgataagaagagctatagagctctctctaagggaatctagaaacagcacaagtggagaacctatagtccctattgtggaaccaagacctgcggaacagtaccatgagccagaaagagaagaagaattagaagaagaggaagatttagatttaaaggcagccattgaagcaagcttgagagaagctgaagaagcaaaaaaacgtagcgagcgtcagcagacacaccaacaaccacaccaacaaccacaactgcaacgactcccacaccaaccacaacctcttcaatctgttgatttaacgcatgaagaagaagacagcatatacatgtttgcatcgctagttgaaaaaatgaaatctagacccgtgaatgaaattttggaagattccaaactacagaatttagcacaaaaagtatttgcctccaaagctagattgaattatgctctaaatgataaagctcaaaaatacaatattttgatagaaatgaatgggaagatctctgaggttatgaatatatatgatagattgttggagcagcagctacaaagcatcagcttatcacaacaatacactcttccacaagttccctctgatccttataattattcagcaaatcacatgccaaatcaacagcaaagttatcaactacctcctattcagcaaccatcctaccagtatcaaccgcaacaagaggtttcacatcaacgaccagaacgggtggacccaccttcaactactaattttgaccatttgaaaaccattaatatagtaccacaagcagagcaaaagccccagccgcaagttgaactcgcaccttccgatccaccttatccaaaggaagaagaggaggaaggagaaagccaaatagaacccgaacggaaagcttccacacaagagtcacatgaaagaccatatcctgtggagacagaaacggaggaaaactcaataaatgaacggcctcaaggtattacacgctatgatttcccgactgttcccgcacgtaaagtcgtcgaaccagagctggccacaccaattgctacaagctcctctgagactccgatcaaagaagaaaggccgccaactcctcaagaggagttattaatagagctttaa

SEQ ID NO: 2235 - DNA, 942 bp, Saccharomyces pastorianus
atgattaggtctacactaagtagctggagggaatatctaactcccataacacataagtccaccttcttaaccacgggtcaaataactcctgaagagtttgtacaggccggtgactacctatgtcatatgttccccacttggaaatggaatgaggagtctttggacgttagttacagagaatttttgccgaagaataagcaatttttggttattaggaaagtcccctctgataaacgtgccgagcagtgtgtcgaagttgaaggaactgatgtagacgtgaaagactttgaaggcgatgaagatgaagatggtgctttggaatatataggtgctagaaccgaacacgtaaaaagtacgccggaggggagaactgaggctgcacacattgacgatatcgatgagctgatacaggacatggaaatcaaagatgacgatgaaaatgaagaagcagaggggcataatgctgcgaaccccttagctacagatattgctcaggaaaggtactacgacctttatattgcgtactcgacctcttatagggttcccaagatgtacatagtagggtttaatgccgatggttcaccactaacacccgagcaaatgttcgaagatatatcagcggattatagaacaaaaacagccaccatcgaaaagctgcctttttataaaaattcggtactatctgtttctattcatccatgcaagcatgctaacgtgatgaaaattttgcttgataaagttcgtgtggttagacagcgaagaagaaaagagcagcaagaagaacaagaacataaagaggtggacggtgtgggagattgggaggatttacaagacgatatcgatgattcgttacgtgtggaccaatatttaattgtgtttttgaaattcattactagtgttacacctagtattcaacacgactataccatggaaggttggtaa

SEQ ID NO: 2236 - DNA, 1977 bp, Saccharomyces pastorianus
atgggaacactatttcgaagaaaagctcagaacaagaaggaagattccggtgaagaaaattctgctcacgataggggagagaagaagaaccacatccatcatcagcaaggactgagccataagaaaagaaggaatggtagtggcagtggtagaagaaaagatcatggtaaaactgttgatagagaaagggttgaggatggcaggaaacgttggagagattcccgaagactcatctttattcttggtgcgttcctaggtgtccttttgccgtttagttttggcgcgtatcacgttcataatagtaatagcgacttgtttgatagctttgtgaattttgattccctcaaagtgtatttggatgactggaaagatgttttgccacagggcttgagttcatttattgacgatattcaaaccggtaactactcaacatcgtctttagatgatcttagtgagaatttcgccgtcggtaaacagcttctgcgagatttagacattgaagccaaacatcctgtagtgatggttcccggtgttatttctaccggtattgaaagctggggggttattggagacgacgaatgtgatagttctgctcacttccgtaagcggttgtggggtagtttttacatgttgaagactatggttatggataaggtgtgttggttgaagcacgtaatgctagatccagaaactgggctagatccacctaatttcacgttacgtgcggcgcagggttttgagtccactgattacttcattgcagggtactggatttggaacaaagttttccagaatctgggggtgattggatatgaacccaacagtatgacaagtgccgcttatgattggagactggcgtatttggacctagaaagacgcgacaggtattttaccaagttaaaggaccaaatcgaactattttatcagttgaatggcgaaaaagtctgtctgattgggcattccatggggtctcagatcattttttattttttgaaatgggtcgaggctgaaggtcctctctatggtaacggtggccgtggctgggttgataaacatattgattcatttatcaatgcagcggggacgcttctgggtgcccccaaaagtgttccggccttgattagtggtgaaatgaaagacactgttcaattgaatgcgttagccatgtacggactagaaaagtttttctccagaagtgaaagagtgaagatgctacaaacgtggggcggtattccatcgatgttacccaagggagaggaggtcatctggggggacatggaatcgtctgcagaagatgctttaaacaacaacactgatacgtacgggaacttcattcggtttgaaaagaacacgagcagtgcgttcgacaagaacctaacgatgaaagatgccatcaatttgaccatggcaatttcgcccgaatggttacagaaaagagtacgtgaccaatactcgtttggatactctaagacagaaaaggaactgagcgacaacgagctgcaccacaggtactggtccaaccccatggaggtgcccctcccggacgctcctcacatgaagatctactgtatatacggggtgaacaaccccaccgaaagggcgtacgtttacaaggaagaaaaagactcgtctaccctcaacctgactatcgactacgaaagtaagcagccagtatacttcacggagggcgacggaaccgtgccactcgtggcgcactcgatgtgccacaagtgggcccaaggagtttcgccgtacaaccctgctgggatcaacgtcaccgtggtggagatgaagcaccagccagacaggttcgacatccgtggtggagccaggagcgccgagcacgtagacatcctaggcagtgcggagttgaacgactacatcctgaagatcgccagcggccacggtgatctcattgagccgcgtcagctgtccaatctgagccaatgggtctctcagatgccctttccaatgtaa

SEQ ID NO: 2237 - DNA, 753 bp, Saccharomyces pastorianus
atgtccataatgaagcagaggttaccactgggagagttttctagctcgaagatcaacaagttggcaattgccaacatcgcggatgccagtgaggctaggggtcgtggggagaacagcgtcggcgctgtgtgcctcccctccatcaagagtttgatggtcagccctgaagtatacgaaaacgtaaagagtctgcctgttcccttgatgagaggtggtggtggaggtatgccgtgtcccgggaagcaacctgtccaggacgatgtccgcacagaggagctggacaagaactattctgagttatcgaaaaaattgcagattcgtttacagtttgcctactacaagtacaagactaagcaaacaaacaagatgtttactgatttaaagttgaaccacagcatgacaaggccctataagggggccgctcacacgaggtcggaacccttgaccaagaggaggaaattggtgctgtctcagggccattacaagactcctgccaagtctaagatcaaaaccccatcctctatctacagctcttacggcaatgcatcttcttttacatgctcccatggtgggagcgaacccttgagttctaccgcgcacacggacatcacagataccacaacgcctatacgcaacatcataaacgcaaagcatttcaatagtcataattgcgccttgtaccaggggcaagaaaccccgatgagcatcaaagctgccaaatctttaattcatctttttacgagcaaccaatag

SEQ ID NO: 2238 - DNA, 453 bp, Saccharomyces pastorianus
atgggtctacagaacaacgtactgaagcagatacagcaggtgctgctacccaccagtcccaatatcgatgagtccaatgctgacattacaaaacaagaatcttcgtcaacggaaaatgtagatggcaaagaccactccgctaccccacagcaggccacaaatctgagtactccctccaccaattccaatggtgaattcataccgcatattttctattcattacaccaaataagaaaggatccaaacaacctctcgaatcagttggaaacttcaacaggttctatcagacatcgtttaaagctttgcaaatctttgatatccgaacatgaagacactaaaaatttactgagcaaaagcccatccgagtgggaagatttcatccagcaacgcgaacaagaattgcaaattaagagaaacgttttggatgatttgtatcgcaaattacaacgataa

SEQ ID NO: 2239 - DNA, 1515 bp, Saccharomyces pastorianus
atgtctcaccgtatagcaccatcaaaggaacgctcttcgtcgtttatttcgattctagacgatgaaacgagagacacattgaagtctgatgcggcgatgaatagtgaaactgatgtaaaaaagagcgagaactttgaggggaaaagctctcgatatatcccaccatggacaactccatacatcattggtataggtggtacttctggttcaggtaagacaagcgttgctgccaagatcgtatcgtcaatcaatgttccctggacggtattaatatccttggataacttctacaagccgttgaatgcagaagatagggctcgtgctttcaggaacgaatacgatttcgacgaaccagacgccattgatttagatctggcatataagtgcattttgaatttgaaagagggtaaaagaacaaatattccagtttatagttttgtgcaccataacagggttcccgataagaacattgttatatatggggctagtgtggtggtcatcgaagggatttatgcattacacgaccctcgattgctagatttaatggacttgaaaatttacgtggatgctgatttagatgtctgcttggcaagaagactatctagagatattgtgtctagagggagagatctggatggctgtatccaacagtgggaaaaatttgtgaagcctgatgcagagaaatttgtgaaaccaacgatgaaaaatgcaaatgccatcatcccatccatgagtgacaatggtactgccgtaggtttaatgatcaatcacataaaatccaaactagagctgaaatcggacgaacatttgagagaattgatcagattaggctcttcccattcacaatacctgatcaatcgcgacatgattcacgaattgccgcgcactaatcaagtcatttcattgcataccatgcttcttaacaaaaatctaaactgcgcagactttgttttttatttcgacagattagctacattattgctctcatgggcacttgatgatattccggtaactcatacaaacatcataacgcctggtgaacattccatggagaatgttatttcgtgtcagtttgatcaagtcactgccgtgaacattatacgatctggtgattgttttatgaagcctttaaggaaaacaatccccaatatcaccattggtaaactgttgattcagtcggattcacagactggggagccacaactgcattgcgaatttttacccccaagcatagaaaagttcgggaaggttttcctcatggagggtcaaatcatcagtggtgctgccatgatcatggccatccaggtacttttagaccacggtattgatttggaaaagattagcgtagtggtttacttagcgaccgaagttggtattagacgtatattgaacgcatttgataataaagtcaacatttttgctgggatgattgtcaccagggaaaaactgcaaactcatcaatacgagtgggcattaaccagatttcttgattccaagtatttcggttgtgattga

SEQ ID NO: 2240 - DNA, 1146 bp, Saccharomyces pastorianus
atggtcacgtacgcggggaaactggtcctggcaccaatggtgagagcgggtgagctgcccacgaggttgatggcactagctcacggcgctgatctcgtctggtccccggaaattatcgataagaaactcgtccagtgcgtcagaagagaaaacactgcgctgcaaacagtggactacgtcgtgccctccaaggtccaggcaagacctgagaccctggtctttagaacgtacccgaaattggagtcttccaagctgatcttccagctcgggtccgcctccccggcactggccacccaggccgctttaaaagtgatcggcgatgtcaacggtatagacatcaacgcaggttgtcccaagcacttttccatccactccggcatgggttccgccctcttacgcaccccagacatgctgtgcctcatcttgaaagagctggtcaagaacgtgggcaagccccacggcaagcccatcagcgtaaaaataaggctcctggacagtgaacaagacaccctgcaactcgtcacctgcctatgtgccacaggtatcagcaacctgaccgtgcactgcaggaaaacagaaatgagaaatagagagcagcccatcacggactacatcgccgcgatctacgggatatgccagtcaaacaacgtgtcgttgatcgtaaacggcgctatccgtgaccgcgcccatttccatgagctgcaatccaaccactggaacaacaccaagatcggtggcatgattgcagaatgcgctgaaagaaaccctgcagtcttcgaccaccctaccagcgagacgaaagatgtccttccctgggttgccgcctgtcgcgagttcctgcaatgggcaaccaagttcgacaaccatattggcaatacaaaatacatgctaagcagaatcgtccctgggaaatccaagtttttccagttctttgcccgttgtaagaccccagaagagatcgattacgtgctggagcaactcaccgacgatggcctcacactgaccgatcccttggaatacttggaaaagtgcagaaccctggagaaggcctcgaagaacgccaacgccaagcaaaagaggaaacaggctgatcatacaaatgacaacgttaaaaagcaaaaaacacctcttccatcagatatataa

SEQ ID NO: 2241 - DNA, 660 bp, Saccharomyces pastorianus
atgtcgtggttttccggaaacaacacgccagccgctgacgcggcggcggtcgccgacacaggcaagcccaaggagctgtcgctgaagcagagtctgggcttcgagccgaacatcaacaacataatagcgggtcccggggggctccacgtcgacagcgccaggctgcaccccttggcgggcctggacaagggcgtggagtacctggacctggaggaagagcagttgtcttcgctggagggctcccagggtctgatcccgtcccgtgggtggaccgatgacatgtgctacggcactggggccgtgtatctgctggggctcggtgccgggggcctttccgggatgatacagggtctgaagaacatcccgcccaacagcccggccaagctgcagttgaacacggtgctgaaccacatcaccaagcgcgggcccttcctgggcaacaacgcaggcatcctggcgctgagctacaacatcgtcaactccaccatcgacgcactcagaggcaagcacgacgccgcgggctccatcggcgcaggggccctcacgggcgccctgttcaagtcttccaagggcctgaagccgatgggctactcctccgccatggtggccgctgcgtgcgccgtctggtgctccgtcaagaaaacactgcttcaaaaatga

SEQ ID NO: 2242 - DNA, 675 bp, Saccharomyces pastorianus
atgaagattttaacacaagacgaaatcgaagcgcacagctcgcacacaataaaaggtggtatcgagggggcccttgccgggttcgccatctccgccgtgatctttaaagtccttcccagacggtatccgaagttcaagccctcaacgctgacgtggtcgataaaaacagccctctggatcaccccgcccacggtcctgaccgccatctgcgccgaacaggcgtcgaacagcttcgatgccaccatgtacgggtccggggcctcttccgaggacgccctggacgaacaccgcagatggagggccttgagcacgaaggacaagttcgtcgagggcctgtctaacaacaagtacaagatcatcacgggtgcgtgggccgcctcgctgtacgggtcgtgggtactcgtcaacaaggaccaaatcatgaccagggcccagaagatcgtccaggcaagaatgtacgcgcaattcatcaccgtcggtctgctgttggcctctgtcgggttgagcatgtacgagaacaagctacacccaaacaagcagaaggtcaacgagatgcgccgctgggaaaatgccctgaaggttgccgaagaagaagagaagcttgagaaggagggccgtaggactgggttcgtttccaacgaggagagaatcaactccaagatcttcaaatcgtga

SEQ ID NO: 2243 - DNA, 1956 bp, Saccharomyces pastorianus
atggacaagaacaaggatctactggagaacgagcaatttctccgcatccaaaaactaaatgccagcgatgccggcagaagacggtccatactagtggacaacgaggacgagctgtacgggctgggctccggcagcagttcatctggcagcgagcacgaggacgaacagcctgccaagagcactaccacgatcacgaccacgaccgcggctacgcagaaccacatcgccgacgacgttgcattcatcccgggcacgactgcggacaacacagaaacagtaacacaggtggttgaaacagacgacaacgtgtttaagacgcacgttcagaccctgagctccaaggagaagtcgaggtacagaaagggctcgtctgacttcatctctttcttcgacgacatggcattcgaaaacaggcccagtatactggacgggtccgtgaacgaccccttcaagaccaagttcgtgggacccacgttggagaaggagatcaggaagagagagaaggagctcatggccatgcgtaaagatctgcatcacggcaagcccgctccggatgccgacacaccgggcctggacgcctctaccacctccatcaccaccaccgcccctgcctcggtcgccagcccagagacggtcgttaccatcgagactaccatcctctcttccaacttctccgggctgtacgtggcgttctggatggcaattgcatttggtgctgtgaaggctttgatagactactactaccagcacaacggcagctttaaggactcagagatcctgaagttcatgactacaaacctgtccactgtcgctttgatcgacctcataatgtacttgagcacctatttcgtcgtaggaattcaatacttgtgcaagtggcgggttttgaactggagctcaactggctgggctttcacctcgatctatgagttactttttgtcgggttcttcatgtacctgacagaaaacattttgaaattgcattggctatcgaagatcttcctctttttgcattctttggtcctgttgatgaaaatgcattcgtatgccttctacaatggctacctgtgggggacaaagcaggaactgcagttttccaaaagcgctctggccaaatacaaggattctgtaaacgatccagaggttattgacgctcttgagaaaagttgcgagttctgtagttttgaactaaactcccaatccttgaacgaccagaagcagaaattccccaacaatatcaacgtgagcaatttcttcatgttcaccatgttccccaccttaatttaccaaatcgagtatccaagaactaaagaaatcagatgggcttatgtgctagaaaaaatttgcgccatcttcggtaccattttcctaatgatgatcgatgctcagatcttgatgcaccctgtcgcaatgagggccttagccgtacgcaattccgaatggactggaataatggacagactactcaaatgggctggattgctcgtagacattgtccccgggttcatcgtgatgtacatcttggatttctatttgatttgggatgccattttgaattgtgtggcagaattgaccaggttcggcgacaggtacttctacggtgattggtggaattgtgttagttgggctgatttcagcagaatttggaacatcccagtgcataagtttttgttgagacacgtttaccacagctctatgagttcgttcaagctgaacaagagccaggcaaccttgatgacatttttcttaagctccgtcgtccacgagttggccatgtacgttatcttcaagagactgagattctacttgttcttctttcaaatgctccaagtaccattggtggccttgaccaacaccaagtacatgaaagacagaaccgtcatcggtaacgttattttctggctgggcatttgtatgggacccagtgtcatgtgcacgttgtacttgacattttaa

SEQ ID NO: 2244 - DNA, 420 bp, Saccharomyces pastorianus
atgttccgttctacccgagtgctcctaagtgctctgacaaagagaactcacagagtgaaggtccaggtgttaagggacttcccacgatttcaactatttaaaggacaggttaccaaagtcaaaccatctttgatgaggaactacttgcataatttcaacggggccaaatacataatcgacgaggaacatgacgtaaacatggaactattaaaattgcaccaagcgcatgagttgaaaatggaggaagaacgccaacggctctccaaacaacaagaaatggaagcacaaaagagaaataaggtacagagacaagctgtgtttggtcaaaaggcaaaggagagtccaaaagaagaaaagaagggtcttttggattccgggatcactatcgaagaggtcaagattccaggtttggatatttga

SEQ ID NO: 2245 - DNA, 1701 bp, Saccharomyces pastorianus
atgtccaaagtgattaagcccagtagcggaaagggttccagaaggagttcgaagggtaatacgcctgatgctaaggcttctgcccatgcaaagaaaaaggattcggttaaccaagataagcccaataatgcttctcagattacaccggcagtgccgcattcccatccatcagatatggtaattcctgaccatttgactgaattggttcctgagctgtcttctttccagcatttgatggactccgagaaaagattggaccagtttattcatttacaaaatttacatatgaagcaaatagtagcgttatggaataaccccaaggtctctcaagaatcttcctatcttcatttagataaaccaaatataaaatatctccgaatttttatttcaaatgttagtgaaaaccaaccttggcaaatggacacggacagtgatcctagccttatggcattagagaatgctttctggacaatgagaattgaaggccgattattggacacagtacaagctaacgatccaacaagagaaaagtttagctcttttatacagtctatagttgtagacttcaaagacaaggaagataatagcgtgccacccaggaaggaggattctgcttctgccgaagaaaataccaccgaaatacctaacgataaaagtgtgaatttgagtttgcctttgcaattttctctgccgaatggtaataaccccacaacgagcaacatggctcaaaataatggcatgaaggaagaagagactgttgggaaagacggcagttccacaacgctcaaactagaaccagtgaaatggcaatacgacccaaataatcctgtagatttcgatggactcgatattaagaggccggggtctgaaaacgttgaatgtaccatacgcatactacgcaaatcgtcccctgaggagccgtttatgagttattcccccgaactggccaggattataggattaaagagggggacattgcatgacgcgattttttccatatacaaatatattcatttaaatgagttgctcaccggggatgactctgcatttgaaacttcgatgaatattagaaacagtcacagtagtaataccaacactaataggtcactcgatgcaaaacacaaccaaacatccattgtcaaattagactttcagctattgactctattacccagtggcatgaaagaatcttcacgagaaacaatgaagttaatggatttactagctctaattaatgcacatttacttccattagagcctattgagatcgattatttggtacgtgtagataaagcatccacatatggtgagttgattcttgatatcgaagtgcccgataccgatgctctaaaactcaatagtaaacagagggaaagtcaaattggggctgccgaattacatctaagcaataaggatttggaacaaatcagatcaaagatagattcgcaagacaaagaaataagatctatcttgacaaacttacacgaaagtaacaaacgatatcgttttttcaaaaagattagcgaggacccagttaagacgttaaatgattgcatttcttctacttccaataccctgaaggtgttatccggtgatgaaggctataatgaagatatggtaagaagagcacagttctacacagaaaacgaagccatgttgcgtgaaaacatagaagttatattatcaaacgggcgaatgtaa

SEQ ID NO: 2246 - DNA, 954 bp, Saccharomyces pastorianus
atgactagtacgttacgcacaacgaagaaagtgctctcgatccaatcgcacgtcatacatggctacgtggggaataaggccgcgactttcccacttcagtacagaggctgggacgtggatgtgttgaacacggttcagttttccaaccatccagggtacgcccattttacagggttcaagtgcagcacggaggagctggtagagattgtggagaaaggattggttggggccctagacatcaagtatgatgctgtgctcagtggctatttgcccaatgtacaggccttgcagaaaatggcaggaatagtgggacggatgtgtgaggaagacgacaacgtgcagtgggtgttggatccggtactgggcgataatgggagactttacgtggaagagcaatgcgttgcggtataccaagatattatgcacaggtctaagatcttcttggccacaccaaaccagttcgagatggaactactggttgggatgccaatccgcacgttggacgatgccaagcgcggcttcgagcagtttcacgaaaagtttcctagagtgacgcgagtcgtcgtcactagccttgaactgtctgactttttcaacgacaatgtatacgtagtggcaggatttgattcatcgcttagcgacgaagtgttcttttacaagatccccaagatcaacgcaaccttcagtgggagcggcgacctgatcagtgcccttctcacagactcgctactgaacggccacggccccatccagcagccactgagcacgtctttgggccaagtactgtggctcgtcaccaccatcctgcagaagacgtacgaattgaacgtggttgatcgggtcccgcatgacgaggccataaggatcaaagacttaaagctgattcagtgcaaagacattttgaagcggaacctggtgccctcgatcggcaagccagagaccatcaagatatag

SEQ ID NO: 2247 - DNA, 924 bp, Saccharomyces pastorianus
atgaagcctattttcctgtatatttatatggcactgactattgcctgcacaatggcctcgccattacctgtggataacaaaagggtttcctccgattccctggatctgactaagaagtatgcacctgaacctcccactacacatcacgttgttctcggaatcgtattcacgggtactgatcatgatcctaggacggagcttgcccccataggcatagatttatatggaaccatggttcccaggactgcgttgaatttctatcagtatgctgacactaaaaaatcttaccgtaatagcgagaacccgtgggaccgtgatttagacaggattttaccgactggagccatagaaagtgtacatttttctccctcccctgctgaagaaacatccgatatggcttctctgtttcaagaaaatttcggtttgactcacgatagaccaggtagggtttccatggccagcgatgacgagggttctaagtttatgatatggacgagtggaatgccttatgaaggcgacaatgttgtgttcggacaagttacttccggtttgaaagatttgatggatagagtggctaatgtgaaaaaggacgaaaatggcaaaccagaccaaccaattacaatatcctacacctcaatgagtgtaaacaaattgccagatccgaagagagcccatgagcagtatttggaaagcctccaggattatcaaaacggagagttggacaaaggtgtcactctaaaaacgtacctctactatgacaaccaaagagatttggaagacacagaatacaatcagctccaccatccattgcctagaatcatgcttggtatttcagccttaatagcttgctatgctgtggccaagtataggaagaggatatttggtagattttcatccaaaatcatatctattagagaggattga

SEQ ID NO: 2248 - DNA, 1656 bp, Saccharomyces pastorianus
atgcgttggtccgttctcgatacagtgttactggccgtgatttccttccatctaatccaagctcctttcactaaagtagaagagagtttcaatatccaagccatccatgatattttgaattatagtgtttttgacatttcccaatatgaccatttgaagttccccggtgtggttcccagaacgttcgttggtgctgtgattattgcaatgctttccagaccttacctgtacctcagttccctgatccaggctgccaagccctcttctatagacgttcagttggtcgttagaggtgttgtggggcttacgaatgggatttctttcatttatttgaagaatgctttgcaagacatgtttgacaagattacgcagaagaaaaaggaagagaatgaaaaccaggaaatatacgtttacgatagcgctggttcatggtttcttttatttttgattggtagtttccatttgatgttctatagcaccagaaccttacctaattttattatgaccttaccgttaactaacgtcgcattgggttgggccttgttgggtcgttacaatgccgcgatttttctgtctgcattcgttgcaattgtattcagactagaagtggctgctttgagcgcaggtattgcatttttttctgtcattttcaagaaaactttattatctgaagcaatcaaatttggtatctttggcctagggttaggttccatcattggtatcacaattgattcatatttctggcgagaatggtgtctccctgaagtggatggctttttattcaacgttgtatctggctatgcttccaaatggggggttgaaccagtaacggcttatttcacccattacttgagaatgatgtttatgccaccaactgtgttactactgaattacttcggctataaattggcccccgccaatttaaaaattgtttcattagcatctcttttccatgttgtcatcatgtctttgcagccccacaaggaatggagatttattatctatgctgttccctccattttgttgttaggcgccactggggctgcacatctgtgggaaaatatgaaagtaagaaagataactaatgtcctattcttgactatattgcccttgtccatattgacatcttttctcatttcaatggcgtttttgtatgtctcaagaatgaactatccaggtggtgaagctttggcttcctttaataatatgattgtagaaaacaatattaaaaatgtaactgtccatatgagcgtacctccatgtatgacaggtgttaccttatttggcgaattgaaccgtgatgtatacggtgtcatttacgataagactgagaacgctactatattggaagacatttggccttcgtttgattatttgattactcatgaaccaacggccgcccaattaccattcgaaaacacaaccacacatcattgggaactcgtcagctcaactaaaatgtttaccggattcgatccatcctatatcaccaactttgttttccaagagaatgttaacgttttgtccctaattaaacaaattattttcgataaaacacctgccgtttttttgaaggaattgactactaattccattattaaaagcgatgtatttttcacttacaagagagccaaacaaaatgaaagaacaaactaa

SEQ ID NO: 2249 - DNA, 1107 bp, Saccharomyces pastorianus
atggaattggatgaatgtttggaaaggctatacaaggcccaactgctgcctgaagtgactgtgagagcgctctgcttcaagttgaaggagatgctggtgaaggagtcgaacgttattcacatccagacgcccgtcacagtcgttggggacatgcatgggcagttccacgacatgctggagattttccagataggtgggcctgttcctgacacgaactacttgttcctgggtgattacgtggatagagggctatatagtgtggagacaatcatgctgttgattgtgctgaagcttcggtatcccagtagaatccatctgctcagagggaatcacgaatctcgccaaatcacccagagttacgggttttacacagaatgcttgaataaatacggtggtaattcgagagtttggcagtatttgacggacatttttgactacctggtactatgctgcattatcgatgacgagattttctgtgttcacggtggattatcgcccaacgttcaaactatagatcaaatcaaaattatcgacagatttcgagaaattccgcacgacggtgccatggcagacctggtttggtctgatccggaagaaagcaataaatccacgttggaccatccagataattctgggcagcatttccaagtatcgcctcgtggagcaggctacacgtttggtagaagcgtggtggagaagttcttgcagatgaatgacatgaacagaatctacagggcacaccaattgtgtaacgaaggttaccagatatactttgatgggttggtcaccaccgtgtggtcagcaccgaattactgttatcgatgcggaaataaggcctcgattctggagctatatagtaaggaccagttctacttcaatgttttcgaagaagctccggaaaataaagtgttgaaggaaaacagtcttaacaacaactacttggaagagaatactacgaatccggtggtgaacaggaaactgattgccgattatttcgagggcgactctgcctccaccgacggttctgcagatcctgaaatgtacatgttttcagacgtataccaagccagatccgcttctaatagacatgttgattacttcttatag

SEQ ID NO: 2250 - DNA, 222 bp, Saccharomyces pastorianus
atgattgaagtggtcgttaatgaccgattgggcaaaaaggtcaaagtgaaatgccttggtgaagacaccgtgggtgatttcaagaaagtgttgtctttacaaataggcactcagccaaacaagattgttttgcagaagggtgggagcgtactgaaggaccacatctctttggaagactacgaagtgcatgacgagacaaacctggaactgtactacttgtga

SEQ ID NO: 2251 - DNA, 2400 bp, Saccharomyces pastorianus
atgcttctcgatacagtcgacatacagcagcagcagcagcaacagcagcagcagcaacagcagcagcagcagcagcagcttcatgtcctgttcatcgactcttatgactcgtttacttacaatgtggtgagactgattgaacagcagaccaacatctcaccggaagtcaacgccgtgcatgtgactacaatccatagtgatacgttccaatccatagaccaactattgtcactacttgccctgttcgatgctattgtggttggcccaggacctgggaatccgaacaatggggcccaagacatgggcgtaatatctgaactcttcgaaaatgcgaatgaacatttgaatacgattccgatattgggtatatgtcttgggtttcaagcaatgtgtttggcccagggtgctactgtcagtgaattggacactatcaagcatggccaagtctatgaaatgcacttgaatgatgcggctcgaagatgtggcctctttaacagttatcccgatgcattcagatctaccagataccattcgttgcacgttaatgctgaaggcgtcgacacccttctacctttatgttcgactgaagatgagaacggaactcttttaatgagtgcccaagtcaaagatagaccatggtttggtgtacagtaccatccggagtcatgttgctcagaattaggaggcttgttagtaaaaaactttcttaagctgagccttgaaaacaacataagtacaggaaggtgggagagcaggcgacttaatggtaagttttccgatatcttatcccgattggataaaactatcaatagggaccccatatacaagatcaaagaaaagtatgccactggagatgacgtgatctacgtgaaacaattcgaagtctctaaagatccaaaattaacgttcaatatttgtgatatcattgaagagccaaaattcgttatgtcatcaccggttattagcgaaaatagaggcgaatggtccatcattgcattgccagattccaaatctcaggtattcacccattacggcgctgtcaacaagactacgattcataattggcaagataaacaaattagttattctctgttgaagaagtgtctggatggccaggatgtggacttgcctggttctctcacggttataaatgaggataagtctcaattttggattaccttgggaaaattcatggagaacaaaataattgacaatcgtaaggaaattccatttattggagggctggtaggcattctaggttatgaaataggccagtacctttcatgcagccatcgtactaatgatgaaaattcgcttgtcccagatgcgaaactggttttcatcaacaatagcgtagttatcaaccataaggaaggaaagctttattgcatttctctagataatacgttttctgagaccattgaacaactactggttcatagcttcgtggacaggaaggatatcaagcaagatctaccgtggccgaagcatttgccggaggggacagactttacgattacgatgcctgataagcaagattatgcagacgcatttgaaaaatgccagagttatatgcataagggtgattcctatgaaatgtgtcttaccacgcaaactaaagtggtaccatctacagtgttagagccctggaggatcttccaaactttagttcaaaaaaaccctgctccattttcgagtttttttgaattcaacgatattgcccccaataaagatgaaaagcctcccgttctatgcttcttaagcacctcgcctgagagatttctaaagtgggacgcagatacgtgtgaactacgtcccatcaagggaaccgtgaaaaagggaccgcagatggacctaactaaggccacaaagattttgaagacacccaaggagtttggcgagaatctaatgatcttggacttgatccgaaatgacctttatgaacttgttcctgacgtccgtgttgaagagttcatgtccgtggaggaatacgccactgtctaccaactcgtcagcgtggtgaaggcgcacggactaacctctgccagcaagaaaacaagatactcaggaatggacatcctcaagcattcgctgcccccgggatccatgacgggtgcgcctaagaagatcactgtgcaactgttacaagacgagttagaaaataaactaaacaaacacgtcaacggcggagcacgcggtgtctacagtggggtcacaggctactggtccgtgaactccaacggtgactggtccgtcaacatcaggtgcatgtactcctacaacggcggagctagctggcaattgggggccggcggagccatcaccgttctgagcacactggacggcgaactagaagagatgtacaccaagcttgagagcaacctgcaagtcttcatgtag

SEQ ID NO: 2252 - DNA, 969 bp, Saccharomyces pastorianus
atgactacgaccgttcccaaagtgtttgcatttcatgaatttacaggggtagctgaagcagttgccgatcatgttattcatgcccagaactcagccctcaagaagggaaaggcttcaaaatccaggcaaatgtccgggacgagcttgaacggaggtggaaacacttcagaatccaaagccatggagagagtaaattctgtaaggagtaatgcttccagccgtggtggtaatgacgacggcatcaccaagaaattgaagaaggagaaagagagaaggttcaagatcgctttgtctgggggttcgttaatccaggtgttgcacgaaggcttgttgaaaagagacgatgtacaatggggaaagtgggacatttatttcgcagatgaaagattggtgcccttcagctccagtgaaagtaactacgggctagctaagagagaaatttttgatttgatagatacagagaaatatggtaccccaagaatttatcacattgatgagtcgttgatagatgacccccaagaatgcgcagataactatgaaaagattctgattaaacggtttgccggtagagattctgtcaaactaccgatgtttgatttattcttactagggtgtgctcctgatggccatattgcgtcattgttccccaatttccaagaaaatctgcgtgaaaacttggcatgggtcataccagtggaacacgcccccagcggaccatcgaatagaatatcgctgactattccggtgatttgtcattctcacagagtaacgtttgtcgttgaaggtgctacgaaggcgcccgttatcaaaactataatggagagacctgaaaaggggttgcccagtagtattgttaatgaaggcgctgctggtcgtgtttcatggtttgtggacgacgatgctttgatagacgtctttgtgaccaagaagaagtacaagttttacgacgacgacaacttaacagagtag

SEQ ID NO: 2253 - DNA, 297 bp, Saccharomyces pastorianus
atgaagtctaccgctctaatttctgaaataaaaccaaaggcagtggggttttccacctttgacgaacacttccacttgttggatacatctggtgtagcaaaggccattgacaattcgccaatcgccgaagtggtgaagaaatcgaatgccgaactaggtaggttaggctattctgtttatgaagacgctgaatacattggtcatgcattcaagaaggccggccatttcatcgtttatttcactccaagaaacaaaaacagagagcccatgatccctcctgtaagaatagccaattag

SEQ ID NO: 2254 - DNA, 1029 bp, Saccharomyces pastorianus
atgctacacttacaaccacagaaccttctcattcaaaagacgcttaatgagtcgattgaggctctccaccaggactcgccgttgaccatggacagaatcgtgtccgacttcgactataccacctaccacatttcgaattctgccgaggacaagtccattctgctcttgagtatcaagaccaaggcctgggtcagtgtctctgagtgtcaattagacggctctttgaccttgttgaagttcttggccgatcactactcccccttgggtgggctgactattcccgctcaagtggagtccggctacgactatactcttcaactttcattgaacgagctgactcaggactccattttgcaattgtctgttctgaagaccgtcatattgagttatccctttgaattggccattgcaaagttcactgaattgagccagcagcaaccaacgcccatcgaggcagagattactggcggtgaggtcgctgccaatggagacaatacgttgttcacaatcaagtatcgtgacgaggagaatatcttcatcaagccttctaacgacagaatcactataattttcgaaactatcttccaagatgaaacggataaaatctttgggaaggtctttttgcaagaattcgtagatgcacgtaagagaaaccgccagatccagtccgctccacaagttctatattcgcacgagcctccattggagttgaagaaatcctaccagccacccaaagtcgcggaacaaagcagaagattcatcacgtttgttctgttcccacgtcattttcaaacaaaagagttgcaattccattcgatttgtcagttaacactattcagaaactacttccactaccacatcaaatgttccaaggcttacatgcactccagaatgagatttagagtggactcgttcatcaaagtcttaaatagagccaaagtggacgaagataatgaaaacgatgaatcaagtgcggatgccagacaacaggcaagaagaacttttactggtagaaagattgtttactaa

SEQ ID NO: 2255 - DNA, 276 bp, Saccharomyces pastorianus
atgcatcccgcggctagactgttatcacggtcggtgtggaagggccccaacattgtgccgctccccatcagagacgcaatggctaagggcaccccgataagaacaaacgcaagggccgccacaatcctaccccaatttgttgggctcaagttccagatccacaacggtaaggagtacgtgcctgtggaggtgtccgaagacatggtgggccacaagctgggtgagttcgcgcccactaggaagcggttcagctacactcaaaccaagaacaaatga

SEQ ID NO: 2256 - DNA, 1917 bp, Saccharomyces pastorianus
atgtttgcttcaagattcgaccctacccagctgtcttctgctgctcctgttactgtcactccagaggaacccgtcaaggcagccccagaagccattgtaccgttaaagagacaggctaccgcatctgacagtgaaagcgatgatggtaccgacgagagctccgacgagagctccggggaaggctcggataatgatgaccgtatgcaagtggactacggagtaagcgaggaagactccagcgaagaagaaaaagaagagaaggacaatcatgaggaagaagacacaccaagtactcataccaccgtactgtcaagatttaagcaaacagtttctttgcaagataagctggatgcgtctgatattgtcggaacaaaggaagacgagagcctcgaggaaaatgctactccgccacaccaattagaacaaattcctcaaccggaatttgttaaaaacccaatgaatctaaatagaaattcatcagaatacaagtccaccgggtggttaaataccgaaagagtgttttatgacaattccatgacgaagccgttctcagattacgaaagtcaactagaaccaaggcttttgcagaatatctgcaagaatttctcgacagacactttccccatccagtcgatcatcttggactccgtcttgccgatactgaactttaccttgaacatctccaagagaaacttcaccaagagaatcggtgacatccttgtaaacgccgctacaggttcgggtaaaactttagcgtactcaattcccgttgttcagactttatctaagagacagatcaacagattgcgttgtctaatcattgtccccaccaaactactgattaaccaagtttacactacattgtccaagctaacccaagggacctcacttatcgtcagtattgccaaattggagaactcattaaaagatgaacatagcaaatttttgaacctggagcctgacatcttgatcactactcccggtagattagttgaccatttgaacatgaaatcgataaacttgaagaaccttaagtttttgattattgatgaggctgatcgtcttctaaatcaatctttccaaggctggtgtcccaaattaatgtcccatttgaaaacagataaactagacacatctccaggcaatgtaatcaaaatgatctttagtgctacattgactaccaacaccgaaaagctaaatgacttgaatctttacaaaccaaaactattcttgaagcaaaccgataaattatatcatctacctaacaaactaaaggagttcaacattaacattcctacagcaaaaagtgttttcaaaccattgattctgttatattcgataaatcaattcatggcgcactcttccaacgcctccaagatcttagtgtttgtaaagtccaatgaatcctccatcagattgagtaaactgttgcaactaatgaacgaaactcgctcgcaatccagcattctaacaaacctccgtgacctggaaataataatcaattctatcaattcaaataactccaaatcagaaaataagaaaaccattgcagatttctcacacgagtcgaaaagctcaagaacaagcatattaattaccaccgatatcatgtcgcgtggtatcgatatcaatgatatcactcaagtgataaattatgatccaccaatgtcttcacaacaatacgtccaccgtgttggtagaaccgcaagagccaacgagatcgggtctgcctataacctactagttggtaggggtgaaagaacattcttcgacgacctaaataaagatctagatagagatgggaagtctgtcgagccatttgaattggacttcaccttattggaatctgattctgagttatatcactcatctttggaaagcctgaaaaactatcacaataaaaacacagaagcctga

SEQ ID NO: 2257 - DNA, 1821 bp, Saccharomyces pastorianus
atggagacgccacaaatgaatgctatacaggaggaggacaatttgtccccggaaactgctttccaaacgcccaaattaaatgattccgatgctttgtcgttctcactgtccaatatgaacggtgtaggaaatacggacggcatgccgtcacaaaacaggacgctttttgcatctcccagacccagctcgctcttttattctgctaaagaaggtaacaattcgagctccagcatcatctacaatccttccttcagctttggcgaaaacgtttccattaataataccgcaaatgacggcagtatgttgaaggggaagagcaatgatcatagaagacagtcactcaagtatataccgggaacaaagctggctccgcttccccctagaacaagatcgccggtaagaggcatatctccagacgctggaaacggtaaacgatcttctttgacgctggaatctccattcaactttacggcatctacgctacaaccgcatcaacagacacctccctcttctgctgcatcaaggacttcattccgtaagggacatcgttataagcattcttctgtttcgatgaattttttccaagagcctgaggtgaaaatccccctaaacatcgccaaatcccttcccataccggatttgagtgacttgacgtccaatttaccgtggccaaaggctcacatgcagttatctattgttggcctgcaaatcttggcatgcttaatcactttccaaatggggcacttatattcatggaataattttatcacgttatcgcattttatcacttacgatatcattgggtctctagttatcatatttgtggaaaacttgtcccaattccaggtctggttcacggggacaatcactttcccctttggcctaaatagaatagacgtcctattgagtttcgcacttgccgtttcattatgttttgtcgggttagacctgttatttcatatagtcgaagagttcattgttctatttgtggaagcaggtaacacgtcgacaagcaaccatgatcacaatgaaatcaatgaacaaattcctcattctcattttgctactgccaatgattcacaaaacgaaaacatcactttgtggtatggaatactagtgattaatttagtgctatcaacgttatcactctataaaacgttttatgctaataaatacagtaatttgaaaacgaagaatccaataattaccatcacgtacacaatgtatctgttcatttatcccttattattggacttattatcaagtatatctgattacttggccactttggtaatatcgattttgattttatggcatgggcttactatagcaagatggacctctacagttttgttgatggggttttcaactacatcgttatctaactcagcgttattcaataacaaccacaacgctgatgcaacaaccgatgctggagctgagtctaaatcaggcaaagaaagacccaccatacggccaaggtcgatgagctcattacccatagctacgataaataccaagaaagtagccactaaaactgggttttggaatcctatagcttccactgaaaacccaacaagcattaaaaacatgattaaagatcaaatcgagagactaaacgaatttaaatcaagatgcattttaaattacgatgacctaataataagtaaagtgaactttacgctttacgtggtactaattaagataacaatgaaaggtggctctaacgatgacgagttgatgttaaggttagccatcaacaagtgcattcaaacgagcattccgtcttgtgaaacgacaatagatatagaccgaatttaa

SEQ ID NO: 2258 - DNA, 1104 bp, Saccharomyces pastorianus
atgtttgtttggcagagaaatagtttattgctagggcggtcgatcgtgggcagcggcggagtcgttgttgctggaatcaacgggatcggtagaaagaggttcatgtcgtcgtcgtcgtcgtcgaaggagttaacaccagtgttcactccgaaggagctggaggtggcacgcaaggaaagactggacggactggggccgtttgtgtcccggttgcccaagaaatggattccgtatgcagagctgatgaggctcgagaagcctgtgggctcgtggctgttatatttgccctgcacttggtctattctaatgggggccacgatgcagggtgcctccttgggcgcaacagctggtatgttgggtatttttggtgtgggcgccctggtaatgagaggtgctggttgcaccattaacgactatctggatagaaaactggatcaacgggttatcaggtctgtcgaaagacccattgcgtctggtagagttagtccccgtagcgcgctaggattcttgggtgctcaaaccctggtcgggatgggcatcctgtcattgctgcctgcacagtgctggtggctgggtctggcctctttacccatagtgttcacctaccctttgttcaagcggttcacgtactatccacaggctgcattgagtgcatgtttcaattggggggcgttgctcggtttcccagccatgggtatagtgagttggcccacgatgatacccttgtacttgggtagttacctatggtgtatgacttacgataccatatatgcgcaccaagataaaaagttcgacattaaagcaggaatcaagtcgaccgcgctggcttggggtccacgcacaaagtccatcatgaaggtcatgtctgcgtctcagatcacgctgctggccgttgcaggcttaaacagtggattgttgtgggggcccgggtttattggtggactagggatcttcacctacaggctattaaacatgatcaagaaagtcgatcttgacaatcccaagaactgctggaagtacttcactgcaaacatcaacaccggattgtacttcacatacgcgttggcgctcgattacgtgctaaggctgtttgggttgttgtaa

SEQ ID NO: 2259 - DNA, 1191 bp, Saccharomyces pastorianus
atgagcattcacacagcatctgtcaccgcgcctgttaacatcgccaccctaaagtactgggggaaaagagacaccaaattgaatctgcccaccaattcttccatctcagtgactttatcgcaagatgacttgagaaccttgacctctgcggccgctgcacccgagtttgagagggacacattgtggttgaacggcgaaccacatagcatcgataacgaaagaactcaaaactgcctgcacgatctacgccagttgagaaaggaactggaatcaaaggacgcttcattgccccctctatcccaatggaaacttcacattgtttccgaaaacaacttccccacagccgctgggttggcttcttccgcggccggctttgctgctttggtctctgccattgccaagttgtatcaactaccgcaatccacttccgaaatctccaggattgccagaaagggctccggttcagcttgtaggtctctctttggtgggtacgtggcttgggaaatgggcacggcccaggacggtcacgactccatggctgtacagatcgcagatagctccgactggccccaaatgaaagcctgtgttcttgtcgtcagcgatatcaaaaaggatgtgagttccacacaaggtatgcaattgactgtggcgacctccgaattgttcaaagaaagaattgaacatgtcgtgcccaacaggtttgaaatcatgcgtaaggctattattgaaaaggattttgcaacttttgccaaggaaacaatgatggattccaactcgtttcacgccacatgcttggattccttccccccaatcttttacatgaatgacacttccaaaggtatcatcagttggtgccactccattaaccagtattacggcgagacaattgtcgcctatactttcgatgcaggtccaaacgccgtgttgtactacttagctgagaacgaactaaaactattcgcatttatctacaaactgttcggctctgttcctggatgggacaagaagtttactgttgaacaactagatgccttcaatcaacaattcgactccgccaagttcactgcccgtgaattggatcttgaattacagaagggtgttgctagagtgatcttgacccaagtgggttcaggcccacaagaatcaaaggaatctctgattgacgcaaagactggtttaccaaagaagtaa

SEQ ID NO: 2260 - DNA, 1470 bp, Saccharomyces pastorianus
atgcacttgaagaaggggaagagaagcatcggcacggtatggcgacttttatggaagcgactttattcggtacattacaagacaaatacatactcgaccagaagtaggaagaagttagtgacgaactttacgagggtgaacgggcttttactgagctgtaacggtgatacattcccctacatgcgcacgctgtggaggtatttcaatgcacctggcaatttgatgttcgtcacaaccaatatcatcacattcacgggcattgtcgcctataatacgatggtgactgtgagtaatgaaagggtcttcgaggagcagatgatagcagcacaaatgagcctcgcgaaacagaaagaagagcttgaaaccagagctctcgatttccccgcaaatcacgaacagataaaagaagcagatgatgctaactgcgagcagccagcgatcgagcgtagcggggaagaccgatcggttaaacagcagaatgaacagctagactctcccataagacactatagtctaacagacttggtgctgaacaaagaggcaagagtcgcagattatgactcgcagcgcgtgaaggcatctctattccatatgctatacgcttacatgctataccgagatactatacagccaaacagtgactctccaaatcataacagtgaggagtggcgtcatgaagtagagcttttgactagggacaaatggctacagggtgcccaccaaaggatagacgtgttctacgacctatggaacaaccaattagacaagatagtgacgtcgcctgagaaggtacagaatttccatctgccgaattggtccaaatacccaaccctattaaaattcatatgcaccgaactccacaacaacgaattgacgacgctggatgaattcaaacagttctatggtaaggtacgatcgaacgaggtgaagaagttactggggctctggctttacgaccactccttccttttccctcgcaacatttacgataacaaaaaccaagaggtcttctatgacactttgatcagcgactccatgcaagacaacaagatattccagaaatactcctccatagtaatgaacccagataacgaacggacccagctgttctttcccaacatttacgctcagcccgtcaacaaaccaatcccgagtatatctctggaaacctacacgcggctgctgagagggtacatcaccctgcaggaaaccaactgcaaatacgactacaacgacaatatattcaaactgatcagcatcctcaaaatgaactgcttcctacagcatgacaagaagatacgcacgggtgccagcgtcagaatccttctgccgagagatgaagaccgctccccagtcctcaacaccatcccacaggcagaaaagaaaacttgctaccagattctaagcaagaacagagacatccttgcactgctgaaacggatatccgacatccaaatagactcttcttaa

SEQ ID NO: 2261 - DNA, 408 bp, Saccharomyces pastorianus
atgaagttcttaacaaccaactttctgaaatgccccgtcaaggcttgtgacaccagcaacgacaacttcccgctacagttcgacggcggtaagtgccaactggtgcaggacgagtccatcgagttcaacccggagtttatgctgaatatcatcgaccgtgtggactgggccgcactgctcaaggttgctggcgaactgggcagcgtcaccttgccctccaaaaaacccaccttcccatgtagcgtcccggaactcaccgaagtcggcatggcagttctaaacgatctgcacgtcatgctgctgcaaacgtccatcaccgagggtgagatgaagtgcaggaactgcggccacatctactacatcaagaacggcatccccaacttgctgctacccccacacctggtataa

SEQ ID NO: 2262 - DNA, 2694 bp, Saccharomyces pastorianus
atggctggtcatcaccacgaacacgggcatgagcttcagcatgagcacgaacaagaacatgagcatgatttccttcaacggcctcccactggatcagagaggactagaagcatatcgttttctaaattactgacgcggtcgtggaaacggagtggcagctcctccaataacgtgagtgcatcgagtgtgaacttgtacggtgacgcaggggagacctccaaagaatcggatcacaataacagtggctcagacggtcagtcttcacgattttctaagttgaaaagtatgttccaatccggtaacaacagcaaaaatgctagtgcccataacagcagtcagagcagtatggaaggtgattccacgtcatcttcatccaaactgaggtacgtcaagcccatagcttctccagcaaatgctccttcgccatctccgcccctttctcccaccattccagaaaaggacattttgcagacacccagaatggtgcatatagatgaacacgagcacgaacgtgaacattcgtgtggcgggtccccaattctgctctcatcaccttctttaagtcccactatcgctagggccggaactggaagaaaaagatctccctccactccaataatgcccagccacaactcaaatgataatagcggcagctctgctgcaagaccaaataaccaccgacaccactcgagttctcaggggttttcttctaataacccgtttagagaaagaacaggcacggtgcgtgggagtaacccatattttgcataccaaggcctaccaacacacgccttgtcctctcatgaactagatgaaggccctcagtcatacccgaatgctggcggcattcattttttatctacgcccacctcaaaggcaaactctttgacaaacggtaggaacttaagtaacttgtcattaaacgaaatcaaagaaaatgaagaaatgcaacaattcagtaatgaagattccttttttcacgatattcccaaagacgtgtccttgaaagatactttgaatggctcccccatcagagattgttcaaagagcccagaaattgcccaatcgtttccgtcgattgttgtggggtacagcaatgagttcggcgaagatagcgacaaagatgatggcaatgaagggagagaacaaaagatgaagaccaagagcaaatccaaacataattcactcactaagccaaatgggaaatcagcccacccaagaacaaaggtacccctaagaagagcagcatcagagcccaatggtttaccactagtgtctcccgcatcggcaccctcttctacttcggcactgaagaagccggattccttcaaaataaacgataatagtcttggtgggtcggcgtatccttcaaattttcttttccctcaagaaccacctccgaagatttcagatttacaagagccaagaagatctcgacgtttaagaaccaagtcatttagcaacaagtttcaagacattatggttgggccacaatcttttgaaaaaattagattactaggtcaaggtgatgtaggtaaagtgtttttggtaagagagaaaaaaacgaacagagtctatgctttgaaagttttaagtaaagacgaaatgatcaaaagaaacaaaatcaaacgtgttcttacagaacaagaaattctcgccacaagtaatcatccgtttatcgtcacactataccattcatttcaatctgaagattacttgtacctttgtatggaatactgcatgggtggggaatttttcagagctttacaaacaagagaaaccaaatgcatctgtgaagaggatgcaaagttttatgctagtgaagtgacagcggcactagaatatttgcacctgctagggtttatatatagagatttgaaacctgaaaacatcctactgcatcagtctggtcacataatgctttctgactttgatctatctatccaagccaaagattccaaaatccctgttgcgaagggttccgcacaatcaacccttgttgataccaaaatctgttcagatggtttcaggaccaactccttcgtgggtactgaagaatatattgcccctgaagtcataaggggcaatggccatactgccgcagtggactggtggacgctagggatattggtctatgaaatgctattcggcttcactccatttaagggcgataatacaaatgaaacctttacgaatattttgaaaaacgaagtcagttttccaaataacaacgaaatttcaagaacttgtaaagacttaatcaaaaaattgctaaccaaaaacgaatctaaaagattaggttgtaaaatgggtgcagccgacgtgaagaaacatcctttcttcaagaaagtacagtggtctctattgagaaatcaagagccacctctcatcccagtgctatccgaagacggttatgactttgccaaactgtcatctaacaagaaaagacaaaccagtcaagatatccataagcatctcgatgaacaggaaaaaaacatgtttgaagaacgtgtcgagtacgatgacgaagtctcggaggatgacccgttccacgattttaactcaatgagtttaatggaacaagataacaattcaatgatttatggtaatagcaattcttatggaaaaatcgcatacactccaaactccaacagatcaaggagtaacagtcatagaacttttttcaaacggtaa

SEQ ID NO: 2263 - DNA, 1182 bp, Saccharomyces pastorianus
atggggctgatatcgaggtggaaaaagaagagacagctgtccagcaagcacaaggctcaaaaatcaagaaaacccgcgaacacatcgtttagacaacagcgacttaaagcgtggcagcccatcctgtcaccacagagcgtgctaccgttgcttatcataatggcatgcgtctttgcacccatcggtatcgggctggtggtcagcacgataagcgtccagaggttggtggtaaactacactgaatgtgatgcattagcatcagccacgcattttgagacgatcccttccaaatacgtggattatcgctttagtaagaaagttacaaccaaacctcaatggatggtactcacagatgctaagtcgggcaatcaaacttgccgaatacagtttgagattccacaccatattaagaaatctacttatgtttactaccagttgactaacttcaaccaaaaccatagggaatatgtagagtcctttgatttggatcaattaaaggggaaggcgttgattggtgatgctctagatcccaattgtgaccctttcaggaccgcaaacaacaagacggtttttccctgcggactaatagccaattcgatgttcaatgacacattttatacaacatttaggggtgttaatggcactccagattacctacttaccaaggagggtatcgcgtggaatacagatcgtcacagatacgcaaagaccgaatataatgcatctgatgttgtaccgcctccaaattgggctaaaaaattccccgacggctatacggatgagaatatccctaacttgcaagattgggaggagtttaaagtatggatgagaactgctgcattacctaacttttataagctggcgatgaagaatgagactaatggaataggtaagggtgtctacattgctgatatagaattaaactacccggtaacatctttttatggaacaaagtcctttgtactgaccactaacagcatcatcggtgcggggaacgaagcactaggagttgtgtatttaattgttgctgggattgccactctttttgccattctgttcctgataaaagtcatatttaagccaagacctatgcacgatcatagttatctaaattttggtactgacgatacccaatttgaagaaaatagtattacgagtattccactaagagaaattttgtga

SEQ ID NO: 2264 - DNA, 1545 bp, Saccharomyces pastorianus
atggtcgccacggtacaagacatatgttttgcatttttacaaaactattatgaaagaatgagaactgacccatctaaattggcatatttctacgctagtacagccgaactgacgcataccaattatcaatctaaatcaacgaacgaaaaagatgatgttcttccaacggtaaaagttactggacgggaaaacatcaataaatttttctccagaaatgataacaaagttcggagcttaaaactcaaattggataccatcgatttccagtacactggacatctgcacaaaagcatcttgattatagctactggtgaaatgttttggacgggaactccagtttacaagttttgtcaaacttttatcttactaccatccagcagtggctctacatttgatattaccaatgatattatcagatttattcccagctctttcaagccgtatcttcaaagagaggattatttgccccaacctgaaaaagacagctccgcaacaactgtagatgaaggagagaaaataaggcaggacttgaaggttgataaagagaaggagaaggaaaattctccggaggtaacgaaaccaaaggctaaaaaggaaatttccaaagaaccgatcgtagagcctaaaccattgaaccaggaaaagccaattgctgatcacaatcaatttcaagatttatctgctgttaaagaatccaagaatcacgcggagggtgtcgtatgtgaggcgaaaggaattgacaagcagaacgaacttctactgcaagaaaccattgttaaaccagacgaaaagccaccaaagtctgaaaagaaggcagtaccaactaaggcattgccaattaaggctaaagaagcctctgagattataagcaaaatcccacttcccaacagtaaagtcgataatgaagaaataacggtacaagaaattgtacaagaatcagaaaccgaaggcaaaccaatagagccccattgttccgaaactaaagaatccaacggtagtgttccagcactctcaccctctccagaacctgttgcaaacccaccaaaaatgacctgggcctcaaaattaatgactgagaattccgacaggatcagcaagaataatagtacagttgaatacatcagacctgaaactctaacgaagaaaccaagtgaaagaaaatttgaaatgggaaaccgcagagacaatgctagtagtagcaagaacaagaaaaaaccagtcttcagcactgttaataaagacggattttatccaatctatattaggggaacaagtggtttgagagaggagaaattgaggagtgctctagaaaaagagtttggaaaagtcatgagaataacggcagcagataactttgctgttgttgatttcgagacgcaaaagagtcagaccgatgctctagagaagaagaagaaactgatagacggtatcgaagtttgtctagaaagaaaaacagtaaagaaacccacccggcataactcacctagcgtgtttccaaatggagtgcgtcctcatagaaagcagccgctcaaaaggaaggaatga

SEQ ID NO: 2265 - DNA, 1308 bp, Saccharomyces pastorianus
atgcaatctatgaacgtacaaccgagagtcctagctgtgggaggcgagcaattcttttctcaaagacaggctccagagcagcagcagcaacagcagaacatgggaccacaggtgtattcgccacaggtcaatagagccaggatgtttcctcaagggatgcctgtaaatacaatgaacggctctgtgagtcaggaaatgaacaatgcctaccttttaaagcagaagggcgatccgctattaacgcagcagcagcatcaacagcagcaacagcaacagcagcaacagcagccatttactataggaacgcccgtatcagtgtctagcttgccgcccggactgaacgttcttcaacaacagcaacaacaacagcagcagcagcagcagggaatggggctcaatcgtcccttagcgtctcagttgcccaaacatttgacaaaccagagtatgcctccaatatttttaccacccccaaactacctatttgttcgtgacgtctggaagtccaacctctatagcgaattcgccgttataagacagctagtctcccaatataaccacgtatccatcagcactgagttcgtgggcactttggccaggcccatcgggaccttcagatcgaaggttgactatcactaccaaacaatgagagccaacgtagattttctaaacccaatacaactcggtctttccctaagtgacgccaatggtaacaagcccgacaacggcccatccacatggcaattcaattttgcattcgatccaaaaaaggaaatgatgtccacagagtcgttagacttactcagaaagtcaggtatcaattttgagaaacacgaaaactcgggtatcgacatattcgagttctcgcaactacttatggattctggcttgatgatggacgattccgtcacttggattacataccacgcagcatacgatctgggcttcctgatcaacatcctgatgaatgacgccatgcccaacaacaaggaagactttgagtggtgggtccatcagtacatgccgaacttctatgacttgaacctggtgtacaaaataattcaagaattcaaaaaccctcaactgcaacaatcctcacagcagcaacaacagcagcagtactcattgaccacgcttgctgacgaactggggatgccaagattttccattttcaccaccacaggtggccaaagtctcttgatgcttctatccttctgtcaattgagcaaactgtccatgcataagttcccgaacggaacggatttcgccaaatatcaaggtgttatatacggtattgacggggaccaatga

SEQ ID NO: 2266 - DNA, 945 bp, Saccharomyces pastorianus
atgagtgacaaagcaaacagcgatttcgaggatttttcctcagatgaagaaaatgaccagaacaacgtcttgcttcagaccaaaagaaaaatttccagcaaggacgatgtattcagtaaaaagatagacgaggtcgaaagtgagaacgaaccagagtctgaacaagaactagaacacgagcaacaaaaccaggacaaactcgagcaaaaggaagatcaagtggctgaagatgaaaaagagcaacctttgcccgtctctctagaagatctaaagacagaaaaattaaggcaactggttaaatccaaggctgaaaagaggtcccagcacaaaaccggtgtggtgtatttctccagtatcccaccttacatgaagcctgccaagatgagacaaatactaactcgttttggtgaaatagatagactgtttctaaagagagaggacgatcagaagtataagcaaagagtgaagggaggcggtaacaagaaaaacaaatacgaggaaggatgggccgagttcatcaggaaaagagacgccaagctgtgtgcggagacgctgaatgggaacatcattggcggtaagaagggtaccttttaccacgatgatatcctgaacgtgaagtacctcccaggcttcaaatgggctgacttgaccgaacagattgcccgtgaaaatgatatcagacaggccaagctggaaatggaaatttcacaggccaacaagctgaatgccgactttatcagaaatgtggagcagagtaagatgatacagaacatcaagaaatccaggaaacgtgctggccaagaagaagaatccgcggattctcacccccacagagagttcaagcagcgtcgcgtggaaactaaccgtgctaatgcccctaccgacatcaagcagcagccgtcgaaatcccaagctctgggcaacgtcctgactagcctactgtag

SEQ ID NO: 2267 - DNA, 1749 bp, Saccharomyces pastorianus
atggacagatataccaatagggaccatcctgaatacgttcctggtacatttaacatatactcctctcaaaatttggagaatggtattatatacgagtcgaaattgaaaaagaacccctcaggagttgttttgattcctcagccatcatattcgcccaatgacccgttgaattggtccggttggagaaagatggctcattttggtctaatggccttcataactgcgtttactgccgctacaagtaacgatgcgggcgctgctcaggactccttgaacgaaatttacgggatatcctatagttctatgaacacaggtgcaggtgttttgtttttaggtattggttggtctactctatttctggccccgtttgctaacttgtatgggcgaaaaattacgtacatcgtttgtatcacactgggcctcttcggagctctatggtttgccttagctaaaagaaccagcgacactatttggtctcaactgttcgttggtattagcgagtcttgtgccgaagctcaagtgcagttatctttgagtgacatttttttccagcatcaattaggttccgtattaactgtgtatattatgtgcacaagtattggtacgttcttgggcccattgatcgctggttacatatctgcctatacaaactttcgttgggtcggttgggttgcagtgatcatttcgggtggacttttagttgccattgtattagggtgcgaagaaacatactttgatagaggtaggtatatgactccgctgaccagcaagcaatctgggtacgaggacggtaccactttacaaaactcagacaatactctcgtatctcaaaaacaaattcatctcgacgctaatctagtcacacaagagaaaggcataaccgtgttagaaactgccgaatttgaagtcaacaacgaagaggaggtaactataccagaggcgcgcgaattgatcgatgggtccaaagagcctctaaagccttataacaagagagtagccatatttactaaggctacaaatttgaaagggtatggttttaaacaatacttcaaatatatgaagatcaacctaaggatgtttttattcccgcctgtgtggttgtcgggtatgttttggggtattcaagatgttttcttgtcgttttatctaactactcaagagaactcatactataatcctccatggaattacagtgattttggcgttgcaattatgaatgtccccacacttatcggagctgtggttggttgtatatgtgctggtattattagcgactattttgtcctttggatggcccgtcacaacaagggtattctggaggctgaattcagattgtatttctcagttgcaactgtgatcattgggcctgccggtttgttgatgtttggtatcggtactgctagacaatggccttggcaagctatttatgttgggttaggttttgttggattcagctggggttgttctggtgatattgctatggcatacttaatggattgttaccccggaatggttttagaaggtatggtttgtacagctattattaacaacactatatcctgcatatttaccttcacctgttccgattggttagctgcatctggtaccgagaacacctacatcgcattggccgttattaactttggtatcactgctttcgccttgccaatgtaccattatggtaagagaataagactgtggactaagcaatggtacttggaatctgtcaatttgagagatggtgtataa

SEQ ID NO: 2268 - DNA, 1443 bp, Saccharomyces pastorianus
atgtcttccgaaatcacatacacaccagctgttgcagagttactagagtttgataaaaaacacgtctggcatccttacacgtcgttaaaggccccattgaatgttttcccagtgaagagcgctcacggctgtaagcttgtgttggataccgactccccggtggacgttgaggtgattgacgctatgtcgtcctggtggtgcgtgattcatggctacaacaatccagaattaaatgaggccctcacaaaccaaatgatggatttttctcatgtcttgcttggcgggttcacccacaaggcagccgtgaaccttgttaaaaaactattgaaagtgatcgacgagccctccatgcaatactgcttcctagcagattctggctctgtcgcagtggaagtggctttgaagatggctctacagtccaacatggcggataaatccagaagcaacagaacaaagtttttgacgattaaaaacgggtatcacggagacacttttggtgccatgagtgtgtgtgatccggacaactccatgcatcacatctacaaagatcgtctcagcaaaaacatatttactcaagctcctactattctcgaaggtttgcctacgagtcagaacaaattcgaggatacatggaatgaaagtgaagccaatgacctcaaaaaacagtttgaactgcatagtgatgagatctgtgctgtcatattggaacccatcttgcaaggtgccggcgggttgaggctgtatcacccacagttcttggtcgaagtccaaaagctatgtaaccaatacgatatcctgtttatcattgatgagattgccactggatttggcagaactggtgagatatttgcattcaaacactgccaaaaatatcaggaccagctgggaatcagccctactaaacaagttaaagtagttcctgacatcgtgtgcgttgggaaggggttaactagcgggtacatgacaatgagcgcggtagtgaccaacgaaaaggtcgcttccagaattgcctccccaaacagtccaacaggtggtattttcatgcatggtccaactttcatgggtaatgctttagcatgcagtgttgcggaaaagtcgatggatatcctgctacgtggtgaatggaaacaacaagtgtcgagaattgaaaatcaaatctacaaagagttgtacgaatacatcaagaatccagacaatgggctaatgggaacccttgtcaaacgtgtgtcggttgttggagccgtcggtattgtggagctgtacaaaaagacagacccgaagtggttccaaaaggagttcatatccaggggcgttcatatcagacctttcaactgcttatgttacattatgccaccttatgtgattacaacggaagaattgacgcaggttaacaaagccctgattgaagtcctacaggagtggaaaacctattcgaaccagtga

SEQ ID NO: 2269 - DNA, 1734 bp, Saccharomyces pastorianus
atgggttttcgcgttcgaaggacaaaaaagctggtaacactagtcctcatatcatcattatttctagtagttcttttcagatgctctcgtaactatttacttttggataatttccgaacacagaaggagaatgcatcatccaaaacgattcaatgtctgtctgaactagctcaaactggaagtagtaaaagagcaaatgagttttatgatccaagcatatggaaaacatttttatccttcataaacggaggtcacggagatgtgaaaacgctaacacaatctctattcaatatccagttataccagcaatgtactaaaaacacctcaattgatcatgatgttccacttctccacgaggtggaaggcagcttatttccatacatggattttctaacgttgcataatggagacattcaagatttttggccgattcattcccgatttgatggaagcactcatcgtggacaggtattagaattctccacaacggataactcattcatagggacgtcacgcatcgagttcaacattagcaagccgttttgggagaactggttagtttcagctgttcaaaatggctcgaagggcttagtaatgagtgtgtcagattaccaagtagccgattcaatccgactcataagggtcttgcgactattgaataattcactgccgattgaaattgttcacaagtctgatttaagcgagaacgatcaacagcttttgatagcgtcagcaagggaatctgaatctcttgattatcctccacaagagctgtggtttctaaacgtaaagagcctgctaaaggacgactatatggccaagttcaagcggttttcgaataaatggttagcaattactttttgctcttttcaaacaccgattcttctagattctgatactgtaccattcgtctcattggatacattttatgaaatggacgagtttaaaagaactgggacactttttttcaaggaccgaagcttcccaacttccaaactgggatcgcaccaaatcaatgtcctaaagaaggtaattgataattgtctgggtatacccttggattcaaaaaaggatctcgacttgttgaataaacgtctgaaggatgacatggccatggatgccgtagaaagtttagttaccaagcatcaaaagcattacatggaaagcggtttactagttttagacaaacagaaacacttttttagtcttttagtttcaatgatgctgcagttctcacccattcaagaatacttctacggcgacaaagaatggttttggcttggtttattattatctaacgatacattcacttttcatccagtagaggcctcaaacgtgggagcattgaaggatttgagcacacctgatagcgcccagatgtgttcgatccaactatcccatacagacatccatggtaatgttctatggctaaatggtggtctatctgtttgtaaaaaagcatgctggggttatgactacactaaacgtaaagatattgcgtctagatttgaaagcgtagatgaactacaaaagcactatcgatcacccgtgaaactcgaaaatgtcattatccctgaagttaacaagtctccctggtcacaaaataccgaatgtgctgggtacaattattgcacaaagtataaaaagggagagtatggaacactgatagagtttacagaacaccagaagaaatcttatgaaggaattgtacaactgtggaatgacgttatataa

SEQ ID NO: 2270 - DNA, 3408 bp, Saccharomyces pastorianus
atgcaggtatatctgtcacttattcttttgctacgtttggtggaaagctcgtatataagtttcagagcggataatgccgacaatgtactagaagccgatgtgattgagactttatcatatgcaacagtaacggtgggtgagccttatgttgcacaatccaaagttataacaagagtatcagcatctccacaaagctcactaacaatcccatcgcataataaagcagttacttctacaaatacaccacaaagtggtattgattctactataggtacaacggttcaaagcttatcgtggctatcgaactatgaaagcaaactttctcaaacttttactatagattctggtagcaatcttattgcaactgggtcgagcacaaatccaattgctaccttagaaactacaggctctggtagagattatattgcaactggatcgggtacaaactcaattgatacctccgaaaccatcggctttgcaggtgattttactacaagttcaggtgtagcttcaaatgtttccagtgtatcgccaacgggtaaaattgccacattattatctcaaactggtacaacctcaacctcgacactattttcttcttattcacttgttacagggacgaagttaaatggtacttacttgacatctgtttcagtgggtacgaataatccattggtaacacaaatcccttcctattcatcccaagaaacggaaatcattacttcctcactgacatcaaataaaacaatatacacagtcactattagcacaaatacagctacagcggctaatgggacaacatccggtatagattcgactcaaatttcccccactcctctttacccatcaaattccacacaaatttctctacatccaacgtcgtcttcaacaaattcgtcttcgaaagtaaatcctctacgctcatctaattctactcaagttttgttctcttcattatcttcttcgactgtaagtcccctttatccctcaaattcgacacaaagcttgcattctcaatcatcatcttcgacagaaagtccctttccctcattttcgtcttcgacgctagcaactgtttatttgtcgtcttcgtctgcgctagaaactgttcaatcatcttcgccttcgtcgccagcaagcgttcactcatcatcgtcttcgacacaaacaaatactcacacatcttcttcgtcaacttcattgagcagtattatcaccactacgaagaaccctgcaactacgactattgtgaacctttttaatgctgtttcaacgaatgaaccacctaccgtttttgagagggctgcaaatcctatgtcgttggccgatggggtttcaaacagcgggcctattcaaacaaacaaattttatacaaatttgatcgttggtagtcaggaatccgctgcatttgtttatccttactcgttatggaagtatacatcctctaataactatggtttcgccgttcaacatacaactgttgaccaatataccttcggtaattacgacagttccggtaactcggaatacttgataaatcccttaggaattgcgcaggttgttctctctgcttccgattttgattcaagtatgacaatggaagtagacgaaatgactttttcttcaacaagagttcttctgtcggagtctaatgattcgtcaaattatctggaaattcctctggttcaaggtatggggtttgcgaccggtatatatcacggctctctgactgccaaaattggctctagtattggcttcaatacctttgtttccgaatcatccggcaatttagcccaaggagttttgaaatatcgtatcaagctcttaaatgatgtcacttggttatgctacgttatagggcctgacgatttaacttcttctgatttctccttgcaggtaacatcagagaatgaaattgaagctaacacgagtgtagatggtctcatcattcaactggcggttgccccttctgaaacagactatgaggtatattacgatcaagcggcaggtatgtacgtcactgatttccaagtccgtggtgtttcagatggctcttctgctacctatgaattctcatataccactcaaggtgagtcagcttcagcatgcacaatgatttttgctttgccccaccatgaatcttctttaagtgacataatgcaaaactcctacactggtattcaacttctttcaacaactaagggactaatgaagggttacttaactacagccttacaattttcagcatccttaaacaaacaagtatcgtggctaccatggtcctctcaacttggcaccactccattagagtactctgcagagcaattgcaactgctagctgaagtcgctaatactgaacttcaagtcagtatttcagaaagtataagtggtttgaacacctattatctgggtaaagtgattgacaagtactcttatattcttttaacagtgtctgaaattattcaagatgaagctaccaccaaaagtactctagaaaacattaaagccgcttttgatattttgctacaaaatgaacaattatatcccctagtttatgacacaaaattcaatggtttagtcagctcaggagacttggcgtcgactagcacacaatacgattttggtaatacctattacaatgatcatcattttcattatggttatattattcatgcagctgctgtagtcggctatgttgattctaaattgggtggcacttgggccactgataataaagattgggtcaattccttggttagagatgttgcaaatccatcagataaagaccaatactttgcacagtcgagaatgtttgattggtttaatgggcattcttgggcagctggactatttgaaaatggaaacggtaagaacgaagaaagtagtagcgaagactacaattttgcttatgctatgaaattgtggggagcaactatcggtgatatttcgatggaattgagaggtgatttaatgattagtataatgaaggactcgatgaacgattacttctattaccaagatgataatacagttgaacctgaagaaatcatcgggaataaagtgagtggtattttgtttgacaatattattgattataccacttattttggaacaaacacagaatatattcacggtatccatatgttaccaatcacaccagtttcttccaatattcgttcagaatcctttgtcagtgaagaatggcaaacgaaaatatcgccaattatcgcatcgctagaaagcggctgggcaggtatactaagattaaatcaagcactgtttgacccagtcgattcttatacatttttcagcgattcggactttgattcagccacatatctggataatggaatgagtcgcacatgggcattagcattttcgggtggactggcaaactctatcgcttag

SEQ ID NO: 2271 - DNA, 273 bp, Saccharomyces pastorianus
atgaagtactgcgaactcgatttatcagggcagtggctggatacagtatattgtgaaaaagacttctccgattttgtcttcgtaaagtttctaaatccttcacagtttgaagagaagatatattgctatactttacatatcacaaaaagaacactagaaaacaagagattgcttttgtattatgaagatgaatttaagaaacatggtcacgatgtcaatgagcttgttggcgacggtatgatcttgcgttcatgctggaaccctcgacagtaa

SEQ ID NO: 2272 - DNA, 1821 bp, Saccharomyces pastorianus
atgatggaaacagatccgtctaaaaatgacactttggacgataaaagcactgtcggttacagcgaaaaggcagaaattgatgttgataagcctaccccgtccggcttacgtcgtatagatgctgtcaacaaggtcttgtctgactatggctctttcacagcttttggagtcacgttcagttcactcaagaccgctctactagtagccctgtttttgcagggctactgtactggacttggtgggcagatttcgcaatcgatacaaacgtacgctgctaacagctttgggaagcattcgcaggttggatcaatcaataccgtcaaatcaatcgtagcttctgttgtcgctgtgccatatgcgcgtatgtcggaccgatttgggcgtatggaatgctggatctttgcgctcgtgctctatactgtgggggaaattatttcagccgctactccaactttcggcggactttttgcgggcatagttatacaacagtttggttattctggatttcgtcttcttgctacagcattgacgggagatctatccgaattgagagatcgtacgtttgccatgaacatatttttgattcccgtgattataaacacatgggtaagcggaaatattgttagctcgctggctggtgatgtcgcaccgttcaaatggcgttggggctatggaattttctgcattattgtacccttctctaccttaatcttggcccttccttatgcatatgctcagtacatttcctggcgcagcggaaagtcaccaccattcagattgaaagaaaaagggcagaatctgcgtcaaacgctctggaagtttgtggaagacataaatctgattggaattattctctttactgccttcttagtgctactactattacctctcacgatagcaggtggtgccacgtccaaatggagggaaggtcatattattgcaatgatcgttgttggcggctgcttaggctttatcttcctaatttgggagttacgatttgccaagagtccgtttatcccacgagtatatctgggcgatccaactatctatgttgcactggtgatggaatttgtatggcgtttaggtctacagatcgagttggagtatttggtcactgtgttgatggtagcattcggagaatcaactttgagagcgcagcggatagctcagctttacaattttctgcagtcatgcactaatattgttgtgggtattatactgcatttctatcctcatcctaaactatttgtggttgctggatcgcttctcggtgttcttggaatgggtcttttgtacaaataccgggtggtgtacgacggaatttcgggtcttattggcgctgagattgttgtcggtatagccggtggtatgatacgttttcctatgtggacgctggtgcatgcttcaaccacgcacaacgagatggcaactgtcacagggttacttatgtcagtttaccaaatcggagatgcggtgggtgcttctattgccggtgcaatatggactcagcgcctggcaaaggagctgatacagcgactcggctacaacttaggtatgtcaatctacaaatcaccactcaactatctaaaaaaataccctattggatctgaagttcgtgctcagatggtggaatcctactcgaagattcaacgcttattgataattgtgtcaatttcatttgcagctttcaatgctgttctctgcttttttttgcgtggcttcaccgtaaacaagaagcaaagcttttccacagaagaacgagagaaagagaagctcaaaatcacacagcaatcatggctccgtcgtgtaattggatattga

SEQ ID NO: 2273 - DNA, 750 bp, Saccharomyces pastorianus
atgaaattcagcaccagtaactacatggctttagcgatcattgctacttgcgctttggctgctccggttatttacgacacaaattctactgctgaattgatgtcccctctttctcaagaggttctaggttggagtcatgcaacatttccagccatttatcaaacttgtaatgaaactaataccaggatgttgaatgcagctttcaaggatactgctgaagttactgcttatggtaagagtagacttctaaactatggtattgatgatgcttattacaaaagatggtttggtaatggtagcattttcactgtcatgggtgtctttgatcaactaatggaagcctctaagggaagtatgcttatgagatgtgatgatgcggatggtttgtgcgcagctaatccaaattattacgccggtcaccatcgtgagtctgctccagcagaaactgttatttgtgattacttttacaattccaaaaagccgctttcaactatctgctttgaagggactattgttgatgttggcccaaaacattacgccggtattgatatgctacatcgctacttgcaccttctaaccatgaatatggatgagtatattagtgaatacgctgaaactcttgaagaagctattgactacgctcaaaacaatgccacatttgctgttaaaaacgtcgacaattacttgtattaccttgctgacgtttacagtacttccgttattcctggcgggtgtctgggtgatctatag

SEQ ID NO: 2274 - DNA, 510 bp, Saccharomyces pastorianus
atggcagttaaaggattaggcaaaccagatcaagtttatgacggttctaaaattagagttgggatcatccacgcccggtggaacagtgtcattattgacgcccttgtgaaaggtgccattgaaagaatggcctccctgggtgtcaatgagaagaacataatagtggagacagttcccgggtcctacgaattgccctggggaactaagaggtttgtcgacagacaagccaagctaggtgagccattggacgttgttatccctatcggtgtgcttattaaaggtagtaccatgcactttgagtacatttcagattctacgactcatgcattaatgaacctgcaagaaaaagtcgacatgcccgtcattttcggccttttgacttgtatgaccgaagaacaagctctggccagagctggcatcgatgcctcccactccatgcataaccatggtgaagactggggtgctgctgccgtggaaatggcggttaagtttggtaagaatgccttttaa

SEQ ID NO: 2275 - DNA, 723 bp, Saccharomyces pastorianus
atgtccactttcatattccccggtgatgccttgcctgtagatcccactgtacccatcaaactgggtcccggcatatattgtgaccccaatagtcaagaggtacgacccgtgaatacaggtatcttgcatgtttctacgaagggcaagagtggtgcgcaggctgtatatgtagactactccagcaaaagatacgttccctcggtaaacgattttgtaatcggcacgatcactggcacgttctcagacagttataaagttttgctacaaaacttctcctctagtgtctcgttatcatatatggctttccctaatgcctcgaagaagaacagacctactttacaagtgggagacttagtatatgcaagggtctgcacggcagaaaaggaactagaagctgaaattgaatgcgtggattcagctaccggtcgcgatgctgggttcgggttattagaggacggtatgattatagacgtgaatttgaatttcgcacgccagttgcttttcaacaatgatttccccttattgaaagtgttagccgctcacaccaagttcgaaattgccattggactcaatgggaagatctgggtaaagtgcgacgaattatctaataccttagcctgttataggacgattttggaatgttgtcaaaagaacgatgttgcaactttcaaagatatagcaaagagacaatttgaagaagtgcttaacgtcaaggaagaatag

SEQ ID NO: 2276 - DNA, 1272 bp, Saccharomyces pastorianus
atgtttagaagatatttatctagcacttcttctagaagattcaccagtgttttggaagaaaaggcatttcaagtgactacttactctaggcctgaagaactatgtattactagaggaaaaaatgccaagttgtacgatgacttaaacggtaaggaatatatcgatttcacggcgggtattgctgtgactgcattgggtcatgcaaatcccgaagtcgctgaaattttgtacaagcaagctaagaagcttgttcactcttccaatctttactttactaaggagtgtttagatttgagtgagaagattgtggaaaagaccaagcaatttggtggtcaacacgacgcttcgaaagtatttctgtgcaattcaggcacagaagcaaatgaagcagctttgaaatttgccaagaagcatggtataatgcagcatcccggaaaacaaggcattgtcgcattcgaaaactctttccatgggcgcactatgggtgctttatcagttacctggaacagtaaatatagaactccgtttggcgatctagtgcctaatgtatcattcttaaatcttcaggacgaactgacgaaattgcaggattacgtctcttccaaaaaggatgagattgcgggtttgatcattgagccaatacaaggtgagggcggtgttttcccagtagaaattgagaaattaaccgcgttaaaaaaaatatgccaagataatgatgtgattgtcattcatgatgagatccagtgtggattgggccgttcaggtaagttatgggctcatgcctatttaccaaaggaggctcatccagatatcttcacatctgccaaagctttgggtaatgggtttccgattgctgctactattgtcaataataaggtcaatgatgttttaagagttggtgaccatggcaccacttacggcgggaacccgttggcttgctctgtaagtaactacgtcttagacactatagcagataaagctttcttagaacaagtctccaagaagagtgaaattcttcaaaagcgtttacgcgaaattcaagccaaatacccaaaacaaataaagactatcaggggtaaaggtttaatgctcggtgcagaatttgttgagccacctaccgaggtcatcaagaaggccagagaattgggtcttttgattatcaccgctggtaagagtacggttagattcgttcctgctctaaccattgaagatgagcttatcgaagaggggctgaacgttttcgaaaaagcaattaaagccgtctatgcttag

SEQ ID NO: 2277 - DNA, 642 bp, Saccharomyces pastorianus
atgtctgttgaagaagttaccaagaagtttgaagaaaccgtttcagtagatgatgccacagctactccaaagactgtcttgagtgacagtgctcacttcgatgtcaagcacccattgaataccaaatggacgttgtggtacacaaagccagctgttgataaatccgaatcctggtctgatctattgcgtcctgtgacttcattccaaaccgttgaagaattctgggctatcatccaaaatattcccgaaccacacgaactaccattgaaatcagattaccacgttttccgtaatgacgttagaccagaatgggaagatgaggccaatgctaaaggtggtaaatggtctttccaacttagaggtaaaggtgctgatattgacgaattatggctcagaaccttactagcagttattggcgaaaccattgatgaagacgattcccaaatcaacggtgttgttttaagcattagaaaaggtggtaacaaatttgccttatggaccaaatctgaagataaagaaccattattgagaattggtggtaagttcaagcaagtcttaaaattaaccgatgacggtcatttggaattcttcccacattctagtgctaatggtagacaccctcaaccatcaatcaccttgtaa

SEQ ID NO: 2278 - DNA, 1497 bp, Saccharomyces pastorianus
atgggtgcctcctcgactcctgtaagcggagatgattatggtatgcattctactacaatctcgcatcataatacaatagaattaagaaatttgctatcgccatcagactccagaaatgacacacaagatttctctgatgaaccgcctggtaatacaagtttaattaaagaggttgattggaatggccacaaggtcaagacatttccgctaaattatcaaaccgttccaatagtcaagttgcaagtggtagcatgcttgactatgttcatagtctttgggatgaatgatcaagtgttaggtgcactgctccctacgctaatggattactatcacatatcgcaagtagaaatttcaaatgtctttatagtgcaactatgtggttatgtagtagcctcattactcaatgaaagattgaataggaatttcggtatgagaggtggtatggttctagcagccggtttgtgtctggtattctttactgttttagcaactggcccctccagtttccttatctgcatgttatgctgtctccctcttggtttaggaatcggcattttagattctactggtaatgttctaatgggcagtcttttggtacataagaatgaaatcatgggtattatgcatggtctttatggggctgctgccatgattactccacctttggtttcatattttgtcaaatggggtcattggcctctgttttttctaatccctctgttctgttccattgtgggtatatttattatacttccagccttcagacatgaaactgctaataaatatgattacctttgctctatggaaaacgaggagcatgaggatgataccataggacccgatgttgaattgacaacgggttcagcagaggctagcccagggttttttacacttttgagaaatcctggtatctttttttatgcgctatacttgtttggttatttaggtgcagaaatcaccactggttcgtggttcttcacttatttgcttaagactaaatcagataataagatggctatgtcatacattgctgcatcattttggactggtttaactgtgggtaggctatgcttagggtttgttactgagagattttttgagaatgaatatagagcaagtaaagcttacggttgtctaactctcttttcatacacgttatttgtgcttgtcgggttaattgattccaactccgtgttctattttgttgtcttatttttagttgttttctcctgtggtacgtttattgggcctttgtttcccaatgcaagtattgttgctttgcaggtgctacccaagagatcacatgtaagtggtgttggtgttgcggttgctgtaggtggttgtggtggtgcagctttcccatacttgactggtgtcattgcacattcaattggtatacagtatttgccactgctatgctggataattgttgcgttgttcacactagaatggtcactgtatcctaaattcatcaagggacatccagaatgtttttag

SEQ ID NO: 2279 - DNA, 366 bp, Saccharomyces pastorianus
atgagcaacgaaggtgacagaatggaagtagatgaagacgaatcgcaagtttccacgcagaatgagcaacaaaatacaccggtagagaccaaaaaaaaaagattcgagattaaaaaatggacagcggtggcgttctggtcgtgggatatagccgttgacaactgtgccatttgcagaaaccacattatggaaccatgcatcgaatgccagccgaaggctatgaccgacacagataacgaatgtgtggcagcatggggtgtttgtaatcacgctttccacttgcactgcatcaataaatggatcaagacgagagatgcatgcccgttggacaaccaaccttggcaattggcaaggtgcggtaggtga

SEQ ID NO: 2280 - DNA, 330 bp, Saccharomyces pastorianus
atgacaaccgagagagaagggcaagaagatgttcaatacagggtcttgcaacgagctgaacttgcacattcgatttggaacttgagatttaacctgggcaaagtcatcaaacggatccctccggaagggaccgttttccatgaaagacgagcaaaggaaccacaattaaatcttggacagcaaggcacccgacttttccatccggattatctgtctgaagaaaacttgccgttgattcgagagtttaagtgcttggattctcctccacctgttccgccaagctcatcacaagaagaagataaagagaccacagtcgactctcggtactga

SEQ ID NO: 2281 - DNA, 2574 bp, Saccharomyces pastorianus
atgtcatcatcgtccagttcgtcagagtcatcgcctcacttatcgaggtcaaactcgctggctaactctatggtttccatgaaaacagaagaccatacaggattatatgaccacaggcaacatcccgatttgttaccagtccgtcacgaagcgcctcgattgaaacgagaggaaacagccaaacactccaagcctaccgctcccaaaaagcagaagaaggcaacgaaacgcgacagccatgcggaggctgagaatccacctgctagaagccggatagattttgaagatgtggactcggagttggacgaaacagttgctcatcaccagttgagagcctctgcgattttaacttccaatgcgaggccatctaggttagcccattccatgccacaccaaaggcagctttacgtagagagtaatagtagccatataccaaaggatcagggcataaagaaagattataatatgtcgccatccacagtttcttcaagcaacaaatctaagttaagtgtgccttcctcggcaagccctattaccaaagttcgtaagccttcaatagtcagtccaatctctgaaacccctctagaaatgaaagctgatacacattccaagcaggcagaccccaagaaaagaacattttccacaacatccacgcattcgtccattaaccccatggctctgcttacgaaaagcgcaacccaaaaatcagatgtagaagatgatccacaggatagaaagccagtgcgtatgaacaccagggcctcttttgatagcgatgtttctcaggcctccagagagtcgcaagagacggaggaagatgtttgtttcccgatgcttccgcaactgcacacaagagttaatggtatagactttgatgaattagaagagtacgcccagtttgcgacagcggaaaagagccagtacctggcaagccttcaagggcccaatgaacaaaaatttggtaatatgtctcacgatattggatttacaagctctacctccacttcagggtcctcggcagccctcaagtacacacctagaatctcgcagactggtaatagtatcaatgaagcagacattcatgagaagaaggaagacgaggaagaagatgatagatttggaccacgtcctggcgtgtcatttggtaaaaataaggtggaaggagaagaagacgacaaaattccagctcatgacccagcatattcgtcatacgaaaatatagattttcaaattcccaacaggttttcatttttttgttcagaatctgatgaaaccgtgcatgctactgatatcccgtccttggtgtctgaaggccagtcgttctatgaattgttcagagggggggaaccaacttggtggttagattgcagttgcccaaccgatgacgaaatgcgttgcatagcaaaggcttttggaattcatccattgacggcagaagatattagaatgcaagaaactcgtgaaaaagtggagctttttaagtcgtattattttgtttgtttccatacatttgaaaacgacaaagaatcggaagatttcttagagcccattaacgtttacattgtcgtttgtagatctggtgttttgaccttccattttggtccaatttcacattgtgccaatgttagaagacgtgtaagacaactacgtgattacgtcaacgtcaattcggattggttatgttatgctttgatcgatgatatcacagatagttttgctccggtcattcaatccatcgaatatgaagcagactctattgaagattctgtattcatggctcgtgacatggacttttcggccatgctacaaagaattggcgaaagtagacggaagacaatgacgctaatgaggcttctaagcggtaaggccgatgtcatcaaaatgtttgccaaaagatgtcaagatgaagctaatggtatcgggccagcgctaacgtcacaaatcaacattgcaaatttacaagcaagaaaagataatgttaatcgctccaatgataatagctatgcaactttaccaaacagctacgtgcctacaacttcacaaccaagaggggatattgcactatatttaggtgatatccaagatcatttgctcacaatgtttcaaaatctgttagcttatgaaaagattttctctagatcacatacaaactacttgtcccaattacaagtagagtcatttaattctaataataaagttacggaaatgctaggaaaagttacgatgctgggtacaatgttagttcccttgaatgttattactggtctgtttggtatgaatgttccggtgccaggaggaaatactaaaactattgcgtggtggtttgggatattgggtgttctactttcattggctgttgcaggttggttcttagcgaacttttggattaaaagaatagatcctccgtccacactaaatgaagctgcggagagcggggctaagtcagtcatatccagctttttgccaagaagaaataaacgattcaacgatcgttctaaaaacgtcaatgtaagagccggcccttcaaacaggtcaatcgcgagtcttcctagtagatatagccgttatgattga

SEQ ID NO: 2282 - DNA, 555 bp, Saccharomyces pastorianus
atggacgcggatgatcatgccggattgtttcggttccccttcaaaatccctacttttcatggtataaggaaggccggggtatatctatcaggtgccctttatgctctagggttttgggtctttttggatgcggtacttttttctaggttctccaatgcttcggacgttcatgtgacatttattgattggattccatttctttgcagtacgctagggacattgattgtcaattccatcgaaaaaaatagattactgcaaggggctttatcagcagacggtggtgctttcggtagcagtggcggtgatttggactcgagcatggcatggcaagctcgtactattttattttttggctttgccttattagctggtggattatcaggttccattgttgtattgatcatcaaatttttagtcaaggattataatacttatccaacattggggatgggcatcaacaatgtattaggaaatgtatgcatattattgagttgtgtcgttctatggattgctcaaaatgtggaagacgagtattcatactctttgacactttaa

SEQ ID NO: 2283 - DNA, 1134 bp, Saccharomyces pastorianus
atgcttgtagcgaaaaaggttttcgggaatattcccaatataatgacaaagtcagagaatgaacactattttatcgatgacatcgtatctattaaaaacagacaaaagagcaagatgtatgtcaaggaggggaaacgaatagggcatggctcattcggcactgtaacacagtcgtatttgtcaaacaacagtacagaatggttggggccctatgcgataaaaagagtcgttaaatgtccaaaagtggagtctttagaattagagatcttgcaaaatattaaacatccaaatctagtcactttagagtttttctttgagagccaatatacaaccaaagatggtggacaagtacaccaaaaaaattttgttatggagtatattcctcaaaccttgagttctgaaattcatcaatatttcgataatggatacgagtttcctacaaagcatattaagctgtacgctttccagattcttcgagcacttctcaccctacattccatgaacatatgccatggtgatctcaagccgagcaacatactgattatacccagcagcggtattgctaaagtttgtgattttggctcagcccaacaattagggggcaatggagatctaaagacatacttctgttcgaggttttatagagcacctgaacttcttttaaattcaaagaattatacaacacaaatagatatatggtcacttggttgcataataggcgaaatgataaaaggtcaacccctttttaaaggagataatgccaaatcacaattagagaagatagcaattctattaggccggctccctgaacctaatacttcttcaagcgtatctcaagaattacaaagaaacttacatgaccaaaaatttaagaaatttatgcattggttcccgtatatcgagtttttcgacgttgacttcttaataaaagcattggtgtataactttgctgaaagatgggatgctaaacaattaatggctcatgaattttttgacgcgttaagaaatgaaacctattttttgccaagagattcgaatatgccagtgcatctaccagaattatttaattttagcgcactagaaaaaaaggctcttggagagtactacaactcaatcgtaccaccgtcgaattag

SEQ ID NO: 2284 - DNA, 1437 bp, Saccharomyces pastorianus
atgtcacaagataatgcaggaccggtgactaagaaggcgaagccttcagaaaggctgcaatgcgaatatttcatggaacaaaagaagcgaagatgcgggatgaccagaggctcgcaaaacctgtattgctctgagcatttgaacttgctgaggaaggctacgaattctcaggttcataacaagcatggtgcagatgccaaggcggggaaggaaagagaaagaattccctgtccactagattcgaatcataccgtttgggcagatcggttggatatgcatcttaagaaatgtaataagaccaagttgagccatctgaatgacggcaagtcgtactacgaacccggtttcaatgcaggtggtgcagtattgtccccacctgccaaaatagatcttacagcagagcattatattcaatccatccaattgctatataaggtcttcaaaatggagaccatggatgagctgccattgaaacaactaaacaatgaactgatgtctttgagaagattccctcagttgcagacaaacaccaagcatgctgttcaacagtcctcgctgattgaaaacttggttgctgttggagcctatgagaacccgacgagtttaagctttattgagtttggctgtggcagggctgagttctcgcgctatataagtcaatatgttcttactcaattggcgggctcgtccgaagaccaatcagaatcaaattccaatgaattcatattgattgacagagcagcgaacaggatgaagttcgataagaagataaaggacgattttttggaaataaagttgcgctctgaattaaaggctattaagtgtccgagtatcaatagggctaagatcgacatccgggatttgaagttagattcaattttaacttcaacgccaacggacaagagccgatacgtctgcgtttctaagcacctttgtggcgtcgctacggacctaactttgaggtgcataacaaatagtactgtcttacatggtggtgatgacgatggatctgagtctaaattaagggcgatttgcattgccatgtgctgcaggcatgtttgtaatggtggcgattatgtcaaccgtggttatatcacgtcacttcttgaaaagtataaagctgatggttccattctaacatatgaaagctttttctgcatgctgaccaaaatctgtacttgggctacttgcggaagaaaggcagacacgaacgttacagatacagtaaatgttgttgaatcgtttgatggagcagaaccatatacaatgaccatcaaggagagagaaaatataggactgaaggctagacgtataatcgatgagggcagactggcctatgtcaaggagacttttgaagggtatagtgcagaactgataaaatacgtagcctctgatgtatcccttgaaaacgtggccatgctagtttataaaaagtag

SEQ ID NO: 2285 - DNA, 1302 bp, Saccharomyces pastorianus
atgaagaagtacttgctgtatatggttcaagtccatttgaactttagaagagcagaattggaatcattagcagacctgtataatctttcaatagatttttctcagtatgacgtcgatagtccattttttgtcctagagttggagaatgaccagcaggccagggactggatcaaaagatctattttgaccagaggcatttacgaatactgggggcagggtgcaacgctggatgagttgcatcaagacatcaagtgtcagcctaattttgaacaggatttacaaagaaagttcaaacattccacttttaagttcgaattcgaatgctatagaggtaacagtaaggccaatagaataaaacagattgaatcgtttcattatcttgactttgaggggaagatcgatatgaaacaccctcaggaagtctttactgttgtagaagagtacactccggtatcggaaaacattagtggtaaaactcctacaaggatcttttttggtagacaagttcagatgagtaatagaagtgctatggagaagtatgatctgaagaaaagaccttacaaaggtacaacgagttttgaagcagaactatctttggttagtgccaatatagctcaagtgaaaccaggcactataatgtacgacccgtttgcaggtacggggtcctttttggttgcaggtggacacttcggcgctttagtcgttggctcggatattgacggtaggatgattcgtggtaagggcgctcaagtgaacatttcggctaacttcaaaaaatatgatgaaagctctcaattcctcgacgtgctaaccatggacttcacgcataatgcattaagaaacagtcttgtgattgatacgatattgtgtgaccctccttacggtattagagaaagtattaaagttttgggcgctaaagatccggaaaggtttgctggaaaggaagatatagagattgatggtgaaaaggcatttttgcgccgcgattacattccaacaaaaaagccttatgctcttgattcattgttagacgatattctacaatactcttcggaaagattgcccattgacgggagattggccttctggatgcccacggcaaacgacgcaaacatagaaacgattgtaccgatacatgagaacctagaattaaaatacaattgcgtccaagaattcaacaaatggtcaagaaggctactggtctatattaataggggtgacacttttaacgggccaagtaaccatggactaaaacgttcggagaataatttcagggaacgatacttcaataacttcaattaa

SEQ ID NO: 2286 - DNA, 1650 bp, Saccharomyces pastorianus
atgagttctgacgaagaagatttcaacgacatctacggcgacgataagccaaccaccactgacgaagtgaagaaagatgaagaaccaaagaaaactgacagcggcacttctcaactagatcaactagcggccttacaagcattatcttctagcttgaacaaactaaataacccaaatagtaacaacagtagtagtaataataatagtaacgaaagttcatcttctagtaagcaagatggcactgcaaataacaaaaaagaaggttccaatgaagagactaagaatgagaaatcactagaaaacactgcttcaaacgccaatgcaaacgttggttctgcgggaccttctggcttaccttgggaacagcttcaacagacaatgtcacaattccagcaaccatcttctcaatcaccgcccactcagcaacaaatgacccagactaaggaagaacgtttgaaagctgatttgtccaaagaaagttgtaagatgtttattggtggtttgaactgggatactaccgaggataatcttcgtgaatattttgttaaatatggtaccgtcacggatttgaaaatcatgaaggatcctgccactggtaggtccagagggtttggtttcttatcttttgaaaaaccttccagtgtcgatgaagtggtcaagacacaacatatccttgatggtaaagtcattgaccctaagagagccatcccaagagatgaacaagacaaaactggtaaaatctttgtcggtggtattggtccagatgtcagaccaaaggaatttgaagagtttttctctcagtggggtacaattattgatgcccaattaatgttagataaggacaccggtcaatcaagagggtttgggtttgtcacctacgactctgctgatgccgttgatagagtttgccaaaataaatttatcgatttcaaagatcgtaagattgagattaaaagggctgaaccaagacatatgcaacaaaaatcatcaaatggtggcaacaacaacgcaggcggtaacaacagcggcaacagcggcaacatgaaccgtcgtggcggtaatttcggtaatcaaggcgatttcaaccaaatgtaccaaaactcaatgatggggggttacaatccaatgatgaatccacaagcaatgaccgattactatcagaagatgcaagaatactaccagcaaatgcagaaacaaactggtatggactactctcaaatgtaccaacaacaaatgcaacaaatggcaatgatgatgccagggtttgccatgccaccaaatgcaataactttgaatcaaccacaacaagattcaggcaacgctcaaggttccccaacgccttcagattctgacaataacaagtccaatgacgtacaaactattggtaatacatcaaatacagactcaggctctccacctttgaatctacctaacggtccaaagggcccatcctcacaatataatgatgatcacaacaacggctatggctacaaccgcgatcgcggcgaccgtgaccgtggtgaccgtggtgaccgtggtgaccgtgattacaatcatcgtagtggtggaaaccacagaagaaacggccgtggtggtcgcggtggtggatataatagacgtaataacgggtaccatccatacaacaggtaa

SEQ ID NO: 2287 - DNA, 1752 bp, Saccharomyces pastorianus
atggtcaaggttggctcttctcatgctgcagttgacgttggcgttagcgaaacccatcaaagaaactatgtttccgaagaagtctttgaaatgaaggataaaaaagacacgacggtggcttttgaggaagaggctccggtcaagactttcacagccaactcatctgaccatgaaggagaagaagtatacgtgtcgaaaagacaggttatgagagacgtttttgccaagtacttaaaattcattggcccaggtctattagttagtgttgcttatattgatcctggtaattattccactgctgttgatgcaggcgcttccaatcagttttcattgctttgtatcatcttgttatccaatttcattgctatattcttgcaatgcctgtgcatcaagttgggttccgttactgggctagatttgagtagagcttgcagagagtacttaccaagatggctcaactggacactgtacttttttgctgaatgcgccgttatagccactgatatagcagaagtcattggtactgcgattgctttgaacattctgattaaagtgcccctcccagcgggtgtcgccattactgtcgtggatgtgtttttaataatgttcacgtacaaaccaggcgcatcttcgatcagatttgttagaatatttgaatgttttgttgcagtattggttgttggagtgtgcatttgtttcgccgtggaattggcctatattccaaagtctacctcggtcaaaaaagtgtttagggggtttgttccatcatctcaaatgttcgatcataatggtatgtatactgccgtctccattttgggtgccactgtcatgccacattccttatttttgggatctgctttagtacaaccaaggctcttagattacgatgttcagcacggtaactacacagtttcaagtgacgatgataataaaaagcaatcaaaaattgctgaagacgtcatggaggaaaaatacttcaactatagacccacaaatgctgccatcaaatattgtatgaaatactcaatggttgaattaagtataactcttttcacactggccttgtttgtcaattgctcgattttagttgtagcgggttctacgttgtacgattcatcagaagctgatggcgcagacttattcaccatccacaatttattatcaagaaatttggcaccagcagcaggtacgattttcatgttggcactattgctaagtggtcagtctgcaggtgtggtttgtactatggcgggacagattgtcagtgaaggccatataaactggaagttacaaccgtggcagagaagactagccacaagatgcatttctatagtcccatgtttgataatttctatttgcatcggtagagaagctttgtcgaaggcattgaatgcttcccaagtggtattatctatcgtgttgccatttttggtcgcacctttaattttcttcacctgtaagaaatctataatgaaaacagaaatcactgtcgaccatgccgaagaaaacaggaacgctcaaaagaacaatagtaacaattgtgaatccgagagtggagtaaatgcggagaatggagtcatggaaggcaatgtgagtgatatggagctagaaaatagcaaagatgtcaaaattgtttatatggcaaacaactggtttatcacagtgatcgccgttatcgtatggatctttttatcgttcctgaacatttatgccatagtgcagttgggtatatcccatggtgatgtgagttaa

SEQ ID NO: 2288 - DNA, 1506 bp, Saccharomyces pastorianus
atgctgaatatccccattattgcgaacaccaagaggttcttttctcccaaagaccacggatcccatcctacgctagacgatgatgttgaactggaagtgagggaaggtccgagttcaggctatcatccgaacttcaacggagatgacgctattttgaagaaaaataaagacgaggtggatcttgatactgcgaagttgacgactgtaacctcaacggtcttgaacacccccgagggctctcttatctatgatgatgacaaagagttcccagatggtggacttcaagcatggttagtagtcttcggcgcttttatgggtcttattcccgtgttcggtttaattaactccctaggggctattgaatcatacatttccaaacatcaactgaaaaatatttcatcttccactaggtcttggatcttttccttgtatctagctatcagctttttgagttgtatattatctggtggctattttgacagaaatggtagtgttggtttgatgtgtacgggtacagtcatatattctggaggtcttttcgcattagcaaactgtaactctgtttggcaattcattttagcattttccgtatgcagcggacttggtacagggattttgatgactcccttgataggggcagtagcaacctggtttttaaggagaagaggtattgcaacatccgtcagtaccatgggtggttcaataggcggtattgtatttcccattatgttgcgaaaattgtataaagaagtcggttttcaatgggctattagaatcttggcattcatctgtgtagcctgcctaatttgcgcttcagtttttgccagagaaaggaccaaacctattgtacaaccattccgatctaagtcggaagtagcgaagtggtacatttcctctgtgttcaattggaggtatttcctggagggcaagttcttgtttgtggcaataggtgcctcctttgcagagagctccctaacctcatgcgctacatatttagcatcttactctatggccagaggaaatacagaaaatgcagcctataccatgatcactgcttcaaatgctgtcggtatccttgggaggtatatcccagggtatttcgcagacaggttcgtcgggaggtttaatgtagaaatcattaccatatcaatggccgctctattaaattttatcatgtggttaccgttcggaggtaactctaaggttttatgggcatacgtttgcctctggggattttcaacaggttctatcctatcattgacgcctgtgtgcattggacagatatccaaaaccaccgatttcggcaaacgatatgccacagtgtacctgttgcaatccttggttaccattcctgttttacccattggtggtacattaattggcaaaggtagcgtagctaattataaccattttatcatattcaactcagcgctaatggcagcaggcgccgcatgctatataatatcaagacatttatgtgttggtgcaaaaatttgcaagttctaa

SEQ ID NO: 2289 - DNA, 1146 bp, Saccharomyces pastorianus
atggcgaataaccagcatatggggacatcgaacttgaacgagaatgaggccatcctaacgaaccgcgttgcagagctggaaaggagaatgacaatgtttgaaggcatcttccacgcgttgagtagccgtctggaccttcacttcaaaaaatacgatgtagtagtcaattctcaacagcaacaaattaacgaactaaccgcctttttatcaactctactaaatgaccagcagcgccacgctgaaatcttgagtgagaaattgtctggaacgttgcatggggtgtctgccacgtcgatatctttgagtcaaactcttgacccacaaggctttagtgatggaccttcggcaccaaacactcagagaaattatggaccggtatctttaaataacagtgaagctgcgaatacacagagtgaaggagccgttagcaacgaaacgctgttcgaggacattttaaatggcaattcgcaagaaaacgacaagaatcaacagcatcctaacagttcgaacccgataaaccaagaaagcaaccccaatccttcagtggatggtcggtttaacaaaccccaaaactataatcccaacttagtcactacgttggaagattatacaacgaacccgcctaataacgatggtggccaaagtcaagggctatacataagcagtacgtcttcccagtctcaacagtcccccaatttgcagaaaatatctcccgaacatgaaagtgcagtggaaccaagcgtgcaggagggcgtaccgacatttgaagaagaacagtatgaaactaaaacaggcctcaagaggaaacgaatagtttgcacaagaccattcgaattcatcaagtcaccacattcagtgatggaggtttggaaggagtatatcgaaggagtaaatggacagccctccataagaaaaatggaagccctgtaccaaacggcatggagacgggatcctgcagtgaataaaaggtactcgagaagaaaagtgctttggaaagccattcagacaggtcttaaccgtgggtattctttgaattatgtcattgaaattttggaaaactcaagatatgttaatgacaaacagaaagttaaacagccaattggttggttgtgccacagctctcatattccagaaatcttaaagtga

SEQ ID NO: 2290 - DNA, 1770 bp, Saccharomyces pastorianus
atgggagtcaaaagtataacaacttcttcttcaaagaagtcaaagaaacagcataatgggaaggtgaaaaagaacaagaaagttaagaaagtacggaagtcaaagaaacccaaatccacgagcgatgataatgaagcggagagttcggttaaggatgatggggaagacagcaagaaggcctctggtaatcatgtcactgccgatggaatccttgtactggaaaccaaatcagacgacgatgaaggatttgacgactatgatggtcactttgataatcctactgacattccctcaaccgctgacggaagtaaaacaccatcattagtaatccacggtaacgaaaatgacctggctaataatgatgactacattgccctttcagctagttctgaagatgaggatgctaaacagaaagaagaagagaagcagaaaaaagaagaagaaattctggaaaaaaagcaaaaagaaatccttaacaccgactatccgtggattctgaatcatgatcattccaaacaaaaggaaatctccgattggttgacctttgaaataaaggattttgttgcatatatctcaccaagccgtgaagagatcgaggttcgtaatcaaaccataagtacaatcagagaagcggtgaaacagctatggccggatgccgatttgcatgtatttgggtcttactctaccgatttgtacctacctggttccgatattgattgtgtggtgaatagcgaactcggtggtaaggaaagtagaaacaacttatactccttagcaagccatctgaaaaaaaacaacttagcaacagagattgaagttgttgctaaagcgcgcgttccgattatcaagttcgttgaaccacattcgggaattcacattgatgtctcgtttgaaagaactaatggtttggaagctgcaaagctaatcagagaatggttaaatgatacccctgggcttcgagaattggttcttatcgtaaagcagtttttgcattcaaggaggctaaataatgttcatactggtggtctaggtgggttcagtattatctgtcttgttttttcatttctccatatgcatccacgtataataacaagagaaatcgacccaaaagacaaccttggtgtgctcttgatagagttctttgaactttatggaaaaaattttggttatgatgatgttgcattagggtcatcagatggttatccggtatacttcccaaaatctacatggaatgctattcagccaatcaaaaatccatttgcactagccattcaagatccaggggacgaggcaaacaacatcagtcgaggaacgtttaacatacgagatatcaaaaaggcatttgctggtgcttttgatctattaacgaatagatgttttgaattgcattcagcaacgtttaaagatcgattagggaaaagtatattgggtaacgtgatcaaatatcgcgggaaagcaagagatttcaaagatgaaaggggcttggtgctgaacaaggctatcatggaaaatgaaaactatcacaaaaaacgtagcagaataattcacgatgaagaatttactgaagatacagtaacttccacggctactgccagcaccacagaagacgattatgacataatagaaccgcccactaaaaaggttaagacacaaccatccgaatcagaagctaaaaaagagccattgaaggagaaaagcgaagaaacttatattaccatttcaagtggcgatgatgacgatgaagatggatataacccttattctctttga

SEQ ID NO: 2291 - DNA, 609 bp, Saccharomyces pastorianus
atgacaacatacgtgggaaactatagacttgttaggtgctcctctacgtttgcactcatacgcacggggcactgtagggagccactatgcattacaggcgcagtacgattgattgtaaatgggaagaactggagggagctcgatgtttctcgtgcaaaagactgggtaaaaacacttagtgtaacgggtttacccttgaaacaatttgtcttgcgctacgatcgagccagtggtccaggaggacagaacgttaataaagttaatagcaaatgcacgttaacacttcatggcttgtcaaatttttcttggattcctcaggaagttaaaagtatattatgtagcggcaggtttcggtactataccaaaaacagtgactctgtagtaattcaatctgatgaaaccagatccaagcaaattaacaaactgaaatgcttcgagaagctaattcaggaaatcaaacaaacctgtcagttccctaatgacattcctatcgagactgcagaaaaatgggcaaaaatcaagaagaaatcgaatgcagaacggatacttaataaaaaggtgcatagcgataaaaagaagagtagaggtaaaattacactcaattactaa

SEQ ID NO: 2292 - DNA, 1962 bp, Saccharomyces pastorianus
atgaagggcataaaaagggaaggatggatatcttataaagcggatggaatgttttccttcttatggcaaaagaggtatctggtgctaaacgattcgtatttatcattttacaagagtaataggtttagtgaggaccccgtcttatctgtggcattgactagtataacaaatgtcagtaggatacagttgaaacagaactgttttgagattcttcgactaacagatcaaaaggagaatgtgtcgcctatgaattcgtatttttacgaatcgaattccaagagaccgatattcatctccacaagaaccgaacaagatttgcatggttggcttgatgcaatttttgccaaatgtccattattaagcggcgtttcatcaccaacaaatttcactcataaagtacacgtaggttatgatccgaaagtgggaaattttgttggagtgcctgatagttgggctaaactgctgcaaacctcagaaatcacctacgatgattggaacagaaattcgaaagcagttattaaagcattgcaattttacgaagattacaatgggctagatagcattcaaaccgaccaatccaatccaagtttaaatttgaagcctttaaagagcccgacaaagtatatcataaacaagaggactaactctatcaagagatcgctaagcaagacactcagcaaaagcaagacggattccattttaccagtatatcaatcagaactcaaacctttccccagatcggcggtaaataacaatagcatcatcaacttaaaagatgcaaaaacccatgaaaatgatatgcatgctagtagagaaaaggtgacagatctccgaacgacgcagttgaaaagaaaggagcagcaagctattcaacaccatttacaaaaacatgatagcaatgcgacattaaaacctcgccgtgtagcaccagcggcgcccgttgcaaaattgcataatggcaaagctataacacccaaagaaaatcttcttgagttaaaggacgcggatgactctgaggaaataataatgaagatgaaaacagtagcaattgatgtgaatccgagaccgtatttccagatgatagaaaaggcaggccaaggagctagcggtgcagtatacctatcgaaacgtgtcaagctgcctcaaaaaaatgattcgagatttttgaattctcattgtgatcgaatcatagaagaaagggtggctataaagcaaatccatctatctgagcaacccaagaagcaattgatcatgaatgagcttttggtaatgaatgactcgcatcacgaaaatatcgtcaactttctcgaagcctacattatttatgataaagaattatgggtgatcatggagtacatggaaggtgggtgtttaacggacatattggatcccaccgcggatatcaatgctagtaacaaatcgtcgccgctaaacgagagccaaatggcatatataataaaggagacatgccaaggtctgaagtttttacacgacaataaaatcattcacagggacattaaatctgataatattcttcttaattcccagggcttagtgaaaatcacagatttcgggttttgtgtagaactaacagagaaaagaagcaaacgtgccaccatggtgggaactccatattggatggcacccgaaatcgtgaatcagaaggggtacggtgagaaagtggatgtttggtcattgggaataatgcttattgagatgatagacggcgagcctccatatctaaacgaggaccctttaaaggcattgtatttgatagctaataatgggtcgcccgtattgcgtcgtgctgaattggtgtctaagaaaactagacaatttttggatgcgtgcttacaagtgaatgtcgaacttagagcatcggtaagggaacttcttatgtttgactttttattactggcatgtggtcctaaagagttcaaacagaccttaaagtggcactaa

SEQ ID NO: 2293 - DNA, 627 bp, Saccharomyces pastorianus
atgagcacatctattaatggcccagaacacgagttcgtcagtaaattcctgaccctagccacgctatccgacccgaagctgccaaaaagccacatcaggcctctaaaggatattgccaatttgggtgttccgttgcccacgttgaaatacaagtacaagcaaaaccatgccaagaaattgaaactgcaagaaaacgagaccgtccgctggacattgaagaaaatccaggcccccaaatttgccattgagcatgatttcggcccatccgacaccatcttacaactaaaacagcacttgatcaacgagggaaaagcctcccacgtaagcgagattaaactactgttgaaggggaaagtccttcacgaaaacctgttcttgtcgaacttgaaactcgactcggccaacagcacaatcactgtgatgatcaaaccggatccagccctcgcaagaacacccgaggccgataagcctgtgtctgcaccttcttcttcttcttctccggagcaagaaccggtcgtcccttgggacgccattgaggctttactaaacgacaagttcaagaacgataaacctgcggccaaacagatcatggaccgtctacaaaaaggctggtccctgaccaaatag

SEQ ID NO: 2294 - DNA, 342 bp, Saccharomyces pastorianus
atgtctgaattcgaaaacaaagctgaagctgccgctcaagacgtccaacaaaagctggatgaaactaaggaaaccctacaaaacaagagcaacgaagtgaaggaacaagcccaaacgtccatcgacaacttgaagaaggaagccaccccagaggccgaacaagttaagaaggaagaacaagtcatcgtcgacggtgccgagcaaaagaagaccgaagtcaccaccaaggtcgatgataccaagaaacaagccactgctgctgtcaccgagaagaaggagaccaagaaggaaggtggtttcttgaagaagttgaagagcaagatttcttccatcttcaactaa

SEQ ID NO: 2295 - DNA, 447 bp, Saccharomyces pastorianus
atgacgaaggatacgaaaatatcgactttgaaggtggatttgggcgagatcaaagaggtcaagagcgaactggctaatgtgaagaagagaaagcgcagaacaaagaagatcaataagttgactgatggacaaatacgtataaatcacgtatcctcagagaagaagagaagagagttggagagagcaatatttgacgagctagtggccgtggtaccggacttgcaaccgcaagagagccgatcagaactgatcatatatttgaagagtctaagctatttgagctggctatatgaaaggaatgagaagctgaggaaacaaatcatagcgaagcacggagcaatgcccggtggcagtaacagcatagagagacaacagaacagagacatgtccaatgtggtaccgaaggagttaatctgggagctaggtagtgaacagaatggtcaataa

SEQ ID NO: 2296 - DNA, 1029 bp, Saccharomyces pastorianus
atgcaatataattctaggttcctagaattgaacattccagactcttttctcaacattaacaaaattcccgatgctacgaagttcattgctatcatatatatatgtttgacaacgtcccttttctgcataagaagatcactgtataataaactatcccttgaagatccaaatgtggactacaacttaatcaccctgcccattttgcaaatggtgccttcacagatttggagataccccacatctttaattttatccaatttcatcgatacaaaggcttggaaggtgatagtaaatctgctcaatctaatcataggtggttcctttattgaacgcaattggaactcttcaaaagagatgtttaaattcatcgtagtgttaggttcggtaacaaatgtattgatcgtcacgttaaccttgttgatatctcttttctcaaataaagtaagactggatattcctttggatgggaattatacaatcctgattgggttccccatcatttataggcaactactgccagaaacaaccataatcaacctcaagactcctcattttttggccaaaaacttcagattcaaactactgcccatttttgttatgttcataatgacggtaactcaaataatatggtttcatcatttcgctcaacttttttccatctggattaccttttttgccagttggtcgtatttaagattcttccaaaagcttgtgccattgaattgtccatctttaccaacaactaactctcaagatattcaggaggcactaattggtgatgcatccgataccttccaattgatttatttttttcctgatctgatcaagccacttctaaggccgatcttcgattctatttacgatgtggttgttgtgaagctcagtattctgaaacctttccaaaatgtagacattgatatcagtaactccattgctgaaagcagaggtgctaaaaagatcacgactgtagaagaaagaagaagacaattggctctacaggtcctggaagaacgtatggtgcacccttaa

SEQ ID NO: 2297 - DNA, 1059 bp, Saccharomyces pastorianus
atgaacggagataacaggttagcgggcatccggctacaatcgatggggtcatccaccgaaaagtccattgacttccaggagcagaagttgcagagcttacaagaggcttccgagtgtttgttaccggaaggcttcatatcgaaggtcagccctccaatgttcagagaccataagagctatgtatttatattgtactgtttgaatcacgtggatctggtcacggatttgcaagactctacaaaatgtcattatccattgcaaatatttaaagactgcaaattgggttccttggtccaaagagatttcgcacattatttccagttttctcaacacggagagaataacgattacagcgatattgatactactttggtaaatctagccaatatgcgggatccgctcaataattcccatttgctaaaaatgaccattgttcctagggtctgctccttcgacaagcgcaattctaagacttataagttggtcttggaatatttgaaccgctttgaaactgttctgacaaaatttcgaccccaaaagaacttcactaaaatctactttaactggttgaaacttgttgaatcattcaccgagttagttttccgcgatttgttgatcaaatggcaacagtggctagaattaactatgaatgataccacggttcaactgaacatcccatttctgttaagaaaatttgtaacgcagctttggcagaagcactttaccttccagagctcaatgaatagttcagttgatagcttcacagaactattactcagtaaaaactctataagtctcttagaccttccccaaaagacaagagaatacaaactgaatttcgggctatggtttgattgccaaaatggcattttgatctttactaatggcatcgttcgtatgtcagatgagattatagatgaacgactaaagtcatttgttaggccagcacacgttttagtactggaagaccatccaagtgacgagatagtgaaaaaactggtttttttcattttttcggcaatactgcaatgtttcactgatgagattttggaatgttga

SEQ ID NO: 2298 - DNA, 3252 bp, Saccharomyces pastorianus
atgtattttgataaggacaactccacaagcctcaggccgttgctgccaacggatgaacaaaaacttagcataaacttacagacaaaaaaagagaagctattgcatctggatccgcatctcgacatcagaaccactcctcaaagaagtacttcaaataaaaatgttgctgatatacttttggaaaagcaaaggagcactaaacccattattcaaaaagctttaaccaacacagataattttattgaaatgtaccatgatcaacaaggaaaacgcctcaatgaaaatgctatagaagaagtaacgactaactataataacggtacaactagcgctagtgccaaagaatatggctatgattacgattacaactatggtagtaacgattctaatgatcagaaagctttagacaatatagcggaaagtcccagcatagaaaagagccaaaaccaaactataattgaaaataaaactgcgtctcacaataaactttcattgaaagaggcgcccatagttcagaagcaaatagttaaaaagggtattaaggacttcaaatttggtgctgtaataggtgatggtgcatattcaaccgtgatgttagcaacatcgattgataccaagaaaaaatatgctgcaaaagtgttaaacaaggaatatttagtacgccaaaaaaaagtgaaatacgtcagcgtcgaaaagatagcgctacagaagttaaataattcccatagcgtggtacgattgttttccactttccaagatgaatcaagtttgtattttcttttagaatacgcgcccaatggggacttcctttctttgatgaaaaagtacggctcactagatgaaaactgtgcttgttattacggttcacagataatagacgcaatcgactacttgcatgccagtgggataattcacagagatattaaaccagagaatattttgttagatggagaaatgagaattaagttaactgattttggaacagcaaaattacttgatcctacaaataacagttcttccaaatcgaaatatgatttgtcgaccagatcaaaatcatttgttgggactgcagaatacgtatctccagaattgttaaatgacagttttactgactatcgttgtgatatttgggcctttggatgcatacttttccaaatgattgctggtaaacctccgttcaaagccactaacgaatacttgactttccaaaaggtaatgaaagttcaatatgccttcacaccaggcttcccgttaatcattagagatttagtcaagaagattcttataaagaatttagaccagaggttgacgataaaccagattaaagaacacccctttttcaaggagatgaactttaaagatggttccatttggtcaagtactcctccagatattatgccatataaaattaacgccagatcgatgcaggcaatgccaggcataggcgataagaagcagacaaaaaaaccaatcagcgcactcgtcaaaacacaccaaacaacgcctagaccagcttcgaactcttcattagaggcaaccggaaattcgcctatgtatagtagtagtagccatgattctaccgagagcgagatatacataaagaagaggcccactgacgaaagaacagcgcaaattcttgaaaacgcaagaaaaagtatcaatagtaggaaacatcaatcaagcaagaaaacttcaagtagtgctgcttcggctgctctggctgcttcggctgccttgacgaagaagacgacacaaaatcatccaacattcagctccaaaagcagtagatcgagttcacctgccacaacaccaaaatctggacataataggcgtgctccatctgcagatggtaaaccttttattaagtattcatcttcggcgtctgtttcatcatcaaaaattccagcgccttcctacactcctccaatttcgccacctatgacaccatatgactcatataaaattactacaccatctttagcaagacagcaggggtattttgaaggtgagatagtggcacctaatctttctagcaggcaggatacaaaaaaaattctggaatcacctttagtgaacaaacgcgacatacaatggtctttttacctaaaaaatatcaatgagcatgtactgaaggtggaaaagctagattttgttgttgctaacccgatcaccttggaaaaaagattcactaaagttaatggttcattgctggatcctcaattgtttgggaagcctagacaaacttttttatctcaagtagccagaagtggtggggatgtgacaggctttaggaatgatccatctctaaccgcgcattcgcaaacagaagatgcttactttttaaagaacgctgtcgattcacagctcttagaagatgactatcgtgttgaaggtggtgacttgtcggaactgcttactgacgaaaacggagaggaagataaaggtaaccaaaataatctaccaacagaagatgatgatggcaaagccgaatctaacaacaaaggtagctcggttttttccggcaagctcaaaaagttgtttcaccccacaatggcaaatgaatcactttctgcatccaatgaaagatgcaaatatttcaaaaggaccgttgtgatgacatcttttggacgttgtctggtatttgcaaaaagaaagcaacctagccctgttaccaatttaaaatatgagctagaatatgatatcaacttacgtcagcagggaaccaaaattaaagaactagtcatccccttagaaatgggaaccaatcatatgattgtaattcaaacaccttacaaatcgtttctactgaagactgacaaaaggaacacaagcaagttattcgctgcttttaagaaaattctcaattcaaatacaaataaaatcgaaaaacaattattacagagaaatcaaaaaataacagaaagaagaacgtcatcatctgggagagtgttacctatagactcgccgtcttcaaaacctgcctctccaaaacctaggccgcacagccaatcatcatctatatcaaagcatgattcattttcggaatcggtgaatagtgcgaagacgaacagatctagtagaatctttgaaactttcgttagtgctaaggaacaaaattcaaagaaacacgccactatcccgttaacaagtaaattggttaacgggttgcccaaaacgcatgttgccttgggattgggtcttaacacaggtgcaaactcaaacaactcatctgcaaaatcgaagagatcataa

SEQ ID NO: 2299 - DNA, 3117 bp, Saccharomyces pastorianus
atggggttccataaggtcgtatcatttcaaccggattatgtcccacaatatcacataaccaaatacatttcgcaaaggaccaaattgcaacttgttcacataaaccacaagacctccacgttggttcatggttattttgctgttcctacagaatgcctcaacgattcaggcgctcctcatactttggaacatttgatcttcatgggttctaagtctcatccatataaaggtttattggatactgctggtaacctgtcaatgtctgtcaccaacgcttggaccgatactgatcaaactgtctatacgctggccagtgctggttggagagggttttccaagttattacctgtttatctagaccatattctgaatccaactttaactgatgaagcttgcttaactgaggtttatcatgtcgatccagaaaatttgagcgataaaggtgtggtttttagtgaaatggaggccatcgaaacccaaagttggtatgtttcagcccttgaaaagcaacgtttaatgtttcctgaaggaagtggttatcggtcagaaactagtggtttaaccaaaaacttaagaactttgaccaacggagaaatcagagaatttcacaaatctttgtattcttctgacaatatttgtgtaattgtctgtggtaacgttccaacggatgaactgttggccgtcatgcaagagtgggataatactctaccggagattccgtttactatgccaaagaaaaggccattcttagataacaaactgtcacatatacccgaatctagagaaaaaatcaccgaatccaccgtggaatttcctgaacttgatgaaagtcaaagcgacttgtttttctcttggattggtgtgccttatactgatttccgtaatgatttagcagtgtctgtactgatggactacttcacggagtcggcattggcagtttttactaaggaattggttgaaattgacgatcccatggcaaattctactgattactggacagatgattttatgagaaccataattaatttgggtattcacggtgtacctacagaaaaactggttgcaacaaaggatacggtaatggaaattatgaaaaatcatagaattgatctaccaagagtaagacaagtggttgaaaacaccaagtgggaatacctgttaaataatgaaaaaaatggcgagtctgcattatctaatgctgctatcacggattacatttatgggtatgaagacggctcttcgctggtttcctccttgaaagatttaagtgatttcgactctttactacagtggtctcaaaaggactgggagatgctgttaaatagaatatttgtggacaataaaccggttatagtcatgactaagccaagtgctcaaatgtatgaacgactagaaacagaaaagttggatatgataaaacaaagggaagctgaatttgatgaaaagaaaaaactggatttattaacgcaagtgaataatgcaaaagaaattaacgataggccaattccaagatctttgttacagaaatttgaaattgaaaatccttccaagagtgtcgaatttgtcaatacaaaaagtattgcgattgtcgattcatatgagaataatgatatgaatgatccaatgaccaaagaaattttaaagctgaaaccagataactttcctctttttatccacttaaaccatttcccctctcaatttatagagctgcactgtttagtcaattctacttccgtaaaagacacttcgcttttgccctattataacatattcgatgagttattttccatgccaatgaaaatctttgacgaagtaaaaaatgcagaaactacgctgtcatatgaagaagttgtcgctaagctaaaatcagagactgttgacgcgcaaattagtcaaggcttgcaaggctcttgccctgatttaatcgatatcagaattcaatgcaaagctggtaattattcccaatccgttcaatggatcaagcattgtttattcgatattgttttcgatgaaaaacgtgttcgtgttcttttagaaaattatttgaattctattgtggaatggaaaagagaaggtagtgttatgttagattctctaaccaacagaaacctgtattcagcaaggtcactgaaaaaatccactgatccattgtttgttgaaacgaaactaaaagaaatattggaagagattgaaagcggaaattttaagaaagaaatcttaccaagaatagaaacaatgaggaatcaactgaggtcaaatttcagtaagtttcacattttggtccttggtgacatttcaaagattccggacatttatgaaccatggaatcccttaatcaagtccttgaagattgaacatcccattgaaaagttaaaagttccccctgttccaagagccctaagctctgtctcaccaatatgcaaaaatcctggtgaaaaagtctttataataacaacacctgcctcagaatctgcttacatgaatttaataacttcggttccatttgatttaaattaccatgatcctgaatacgccatggtttctttagcttctgaatacttacagtgcgttgaaggtccattttggaagggaattcgtggtgctgggttagcttatggcgccaatatgtcgaaattgtgtgaagtgaactcttggggattcaacatctatcgtggtgctgatatcatcaagtgttatgaagctggtaaacagattgtccaagattatgcttccggcgccttggaatttgatgaacagctgattcaaggagccattagtagtattatcaacagaatggctactattgaatgtggatattttgaaacagctttgtctagatatacagatgaattttgtttgcaaagaggaaataatttcaatgagttgtacttggagaggttacaaaatgttactaaaactgatctgaaaaatgttatgcataagtattttgttaatttgtttgaccccaaaaagagtgttgcatttgtaagctgtcatccaggtaaattggaatccgttcaagagttccttgaaactcaaggtttcactgtcgaaatagaagaactagaagatgatgaggaagaagagcttgacagtgacgaagatgaaaaatcatga

SEQ ID NO: 2300 - DNA, 2148 bp, Saccharomyces pastorianus
atggacaagctaactccatcgcaatggaaagttgtaaacaagccgtacgagccagcatccacagtaaaagtcattgcgggcccaggttcaggaaaaacgttgacgctattacataaagtgcaccatctggtcaccgtggaaaatattaagcctgacgaaatactgatattttcgctgacaaataaagctgtcgacaatattatagagaacttgttgtccgtattcgaagacttgcatactaataaagagattattcgtcagattggatgttacactattcatggtttggccaatagaatcgtagtggaaaatgagggaatgataaacatcatagaggagataggctggagaggattaatgaaattgctgccgccctccaagagaagcccccatcattttcgatcgtacaaggagttagaaaaggttatcaaagattacaaactgaatggcagtaggaccggcaatgtcaaggcaaaaaatgatagtatcgttattgagcaactagtcgaactgatggataactgtaaagtaatgactaatgatgacttgattattcgtgcaaaaaaatacctagagctcgatcaacctatcctaggtgacgcctcgtcatctttcactcaagatcttcaaaacaaatacaaagttgttcttatcgatgagtttcaggatctttatccaagtttagcacctttggttgccactatttgtaaggggaaacaacttattatgttcggtgatacaaatcaaagcatttacgaattcttggggaataacaaacagatcatgtggcaattggacaatctacatccaaaatcgtccactactgttttaaaactgttcgataattttagatctacgcccgagattatctctttagcatcaagggtcatcaatcttccgccagcaaagaaacaagtattagataataccgacgaaactccatcagaactggttcgcaagctaccaagcggtgttttaccccaatcggcttcatttgatgatttgacaacagaaactgaattcatcatcgacaagattactcaattaatttgctcttctgccaaattttctgatattgccattttatcaagaaccaactcgcatttaacaacgttgggaaatgttttgaaaaaatatggtataccatttgaaaaattaaaaagtcagcccgattggatggacgacctgcgaattcagttcctcttggatatcatgaaagtgtgctctctagcgtctgacgagaagcatagccgcgagttcgatacgagtgccaaatggcaaagcgatttcagcatactggtcacaatgagtgctatcaagggagttggtgatgcttcaatacaagctttgtataaggcatgcggtttgaagaagctatcgatttggaagtacttaaccgtggtcccgaattttgaatggccattgggcctctccataaaaaaaaaaattgaaaactacacagctaatttatacgaactgattgaagacgaccaaattcaccaactggaagaccctttggaacttttggagaagatttccaatataacacataacttaaacctcaatcctacctacttccaatctgtgagcgactaccaatcatcactagagtttaaaacgcacttgcgagaaatggctcaagtaatgaaagtgtcacaatccaacaaaccttcaggaacttccttcgtcaaatggtttctagagacttatttcgatcaaacaatggttttccatcaggccaaacaggaattgaaaaccaacggccctggtacagtaaaactgtctacgattcattccgccaagggtttggagtttcccatagtgtttctgacgaatggaatcatgtccaatttccctatggacacgaattctctttacgtcggtatgactagggcaagaaacttattatatatgtccaacatgaaacatcagaatctaatcagtaagaccccactttactctagatctataatgtttaacgagtctttttggacctactacaacaaggatttaaacagatctctgcatggcgttacgatggcgcatgactacaacatacagcattacaatcggttacgtaaagactttggattttatagagcatattcttcactacggtgctgtaagaacatttttagacgtatatag

SEQ ID NO: 2301 - DNA, 1836 bp, Saccharomyces pastorianus
atgagcaatatattacacgcatcaaacatggaaggaacgtcaatgatgacggttacctcacatagttcggaagactccagtcgcatatcaagccacgaccaggataccgacgctcataacgatagtaacataagtggtgcggaaaaccataaaatgtcaaaaagaaaatggatgaaggaattctttaagctctctaaatctcccaatgcaaaaagcaatcagagtctaagttccatgaaaagcaatcaaagtttggtttcaatgaaaagcagtgataatggggatgtttctgccaatgattattcatttatttgcaacagcggccttcaatctggtgggttgagtcgttccaataatatcaaggaaccgcagagagacccagcgggaagccaaagatcaaaaaacaatgccctttccttaccaacacagacaacttcttcgtccacctcctcttcttcttcttcttcttcttcttcttcttcttatgattctgtaagaaggactgataatagcgttagaatgcaaaagaataaacactccagattcaacaaggaattaccccgcagcagggaaagctcaaatatgaattctggatctatcatcagtcaatacaatgtcgatactcaggcaaccgctataatgagcgatatgcaaaaacaatatgagtcgcagcaactgccttcgttgtttataaacgagactttactgattgatccaaatggtaaagtttcagaggttataaagttgatatttgaagaagtcggctacaaatttgatgattttagtgatatttccgttttccaactgatgcaagaaatgtatcaattaattaagaaggattctagtaataaaaagtcaaaattaactacttttgcctccaaagtaaaagaaaaagaaatgcaagtgaaaacccaaaacgataaaattattaaactagaaaccacaaacaaagcttataagactaaatacaaggaattatctttagaaaatagaaaaatgaaagaggcatttaaagagctagacagtgagtcatacgaccatgacgaagaaatattaaagaaatacaaatacactaaggaaacgttggatagagttaacagagaacaacaactggtcattgatcaaaacgagtttctaaaaaaaaatgttaacgaacttcaaaatgaggttaatgctaccaacttcaagttttccttattcaaagaaaaatatgctaaattagcagatagtataactgagttgaacacctccacaaagaaaagagaggctatgggggagaatttgacttttgaatgcaatgaattgaaggagatatgcctgaagtataaaaaaaacattgaaaatctaacgaacactaataaaagtttgcaaagttcatttaagaatgaaaggaagaaagttttagatttgagaaatgagaggaacttgctgaaaaaacaaatactgttaatcgaatgccacggctcatactccttacttttagtatctaacatcttaacatcttaccggttcttactaccaagcgaaactattatggaaactgaaaccttgataaaggaattgctgaacatgaacaattccctgtcgaatcacgtatgctcctccgaccagtctcctgccgagttctcaaaaaggctagaatccagatgtatagagttcgaggaaaagcttctttatttctatcaagaagttgtgacaaggaaaattattgatattatttataaatgctttatcagttattacaagaaaagcaggcaaaacgaaccgaaacccagccaaaactctaccacgccgtacaagcaaaaccaaagacaagttccacactctatcaaataa

SEQ ID NO: 2302 - DNA, 2895 bp, Saccharomyces pastorianus
atgtcatctaccagacctgatttgaagttttctgatgtatcagaagaaagaaacttttacaaaaagtatattgcattaccgaagaagccattaaaaaccatcagattggttgataaaggtgaatattatacggttataggcacagacgccatttttgttgctgattcagtatatcacactcagtctgttttgaaaaattgtcaattggactccataacggcgaaaaacttcgttgaacccaccaaatacgttaccgtttctttacaagttcttgctactctactgaaactatgcttgttggatcttggctacaaagtcgaaatctacgacaagagttggaaactactcaagagcgcatcgccgggaaatatcgagcaagttaatgagttgatgaatttgaatattgattcaagtatcgtcattgcaagcatgaaaattcaatggaattctcaggacggaaattgtgttattggcattgcattcatcgataccactggttacaaagttggtatgcttgatattgtcgataatgaagtgtactccaacctagaaagtttcttgattcaattgggtgtgaaagaatgtttggtgcaagatcttactttgaatccgaattcgaacaccgaattacaaaaactaatcaacgttatcgatcgttgcggatgtgtcgttacattattgagaaactccgaatttttcgagaaagacgtcgaattggacttgactaagctattaggtaacgatttggctttatcgttaccccaaaagtattctaaactatccatgggtgcgtgtaacgcattgatcggctatttgcaattattgtcagagcaagaccaagtcggcaaatatgagctggtcgaacataaattaaaagaatttatgaagttggatgcttctgccattaaggctcttaaccttttcccccaaggtccacaaaatccattcgggagtaacaatttagctgtttctgggtttaccagtgctggaaatactggcaagataacatctctttttcaattgctgaaccactgtaggacaaacgctggcattcggcttttaaatgagtggttgaagcaaccattgactgacattaaggagattactaaaagacatgatttggttgactacttgatcgaccaaattgaattgagacagatgctcaatactgactttttaccgatgatcccagatatccgtaggttaaccaaaaaattaaataagaggggaagcttagaagacgtcttgaaaatttaccaattcagtaaaaagataccggaaattgttcaaattttcaactcgttcctagaagacgaaaatcctagtgaagatgtaaaggaattggtccgttccatgtggttggctccgctgagtcatcatgttgagcctttatctaagttcgaagaaatggttgaaaccactgtggatttgaatgcttacgaagaaaataatgaatgcatgatcaagatcgagtttaatgaagaattggccaaaataagaagtaaactagatgacttgcgtgatgaaatccattcaattcatctggatgctgctgaagacctagggtttgatccagacaagaaattgaagttggagaatcatcatttgcacggttggtgtatgagattgacacgtaacgacgccaaagaattgcgtaaacataaaaagtacattgagctgtctactgtaaaagcaggtattttcttcagtaccaagcaactaaagttaattgcgaacgaaacaaatgttcttcaaaaggagtatgacaagcaacaatcagctttggttagagaaattataaacataactttaacgtacaccccagtttttgaaaaactgtccttagtcttagcacatttggatgtgatttcctcctttgcccatacttcatcatatgccccaataccttatatcaggccgaaattacaccctatgaattcggaaagaagaacacatctcgtaagttctcgccatccagtgctagaaatgcaagatgatgtgagctttatatctaatgatgtcacgttggagagtggtttaggtgattttttaatcataacgggtccaaatatgggtggtaaatccacttacataagacaagtgggtgtaatttctctgatggctcaaattggttgttttgtaccttgtgaagaagctgaaattgctatcgtggacgcgattctttgtagggttggtgcaggtgattcccagttgaaaggtgtttctacgttcatggttgaaatattggaaacggcatccatattgaaaaatgcgagccaaaattccttgattatcgttgacgaactgggacgtggtacaagtacctacgatggatttggattagcttgggccattgccgaacatatcgcaggtaaaattggatgttttgcattgtttgcgacccattttcatgaattaacagagctctctgaaaaattgcctaatgtcaaaaatatgcacgttgtagcacatattgaaaagaacgcagacgaacaaaaacatgatgacgaggacattacgttattatataaagtcgagcctggtatttcagaccaatcttttggtatccatgttgcagaagtggttcagtttccagaaaaaattgtaaaaatggctaaacgtaaagcaaacgaacttgacgatttgaagattaataatgaaaatatgaaaaaggctaaattatcattgcaggaagtcaacgaaggtaacatacgcttgaagaccctactaaaggaatggatacgcagagcaaaggaggaagggttggatgatccaggcaaaatctctgaagaagcatcacagcataaaatacaagagttattgcgtgctatagccagtgaaccggaatatgaaaatgacaattatttgaagtatataaggaagttattattataa

SEQ ID NO: 2303 - DNA, 3090 bp, Saccharomyces pastorianus
atggaaaaccaaaatggagactacaattcaaatggattttcaaactcgtcaaataatttgaatgcagtgttcaacaatgaaggtatgggtagaagtgacattacaagcttaaaccatcaacagaacccaacacgcctggttccagacactcaaatgtggtcgatgcccgtgcaagaccaactattgccgatgcctagtagagataatcatattatgtcgaacaatacagcgggctcaatgaacgttgtctatcccagcacgatgtaccccccaatggagcaacagtctcaactgcaagcacaacagcaacaggacgtcagcgttatgatggaacacactagtagtaatgatttgactgcctctagtaaaaatctgaaaaaacgcgtatcaaaggcctgtgatcattgtcgaaagagaaaaattagatgtgatgaagtggacccgcaaactaacaaatgttcgaactgtgtcaaattccaatcggcttgcacttttaaacatcgtgacgaaatactaaggaaaaaaagaaaactagagattaaacaaaattcggacaaatcacctcaggctcaaagtaacggtcccgatcctgtaatttcttctatgccaaacagtactgctaatgaaacgtttaaaccctttagtagtaatccgtccttggaaagtgatatcgtcaataaaatttctaatgctcaaaataacctgaaccgagacatgaactcaaagatagaaaaattagacaggaaaatgtctcatattattgacagtatggccagatttgagtggttattagataaagtggtcaaaaagcaagagggtaaacagagggaaaatagtgattcacctaaacctacaagaaagatatactccacagctctattaacctctcaaaaactttactggttcaaacaaagtttgggacccaaagtttcagacgaggaattcctttctcccattagtgagatattatgcatatctttgaaatggtatgctactcagatgaaaaaattcatggacttatcatctccagctttcttctccagcgaaattgttttatactcattgcctcccaagcagcaagcgaaaaggcttcttgaaaactttcatgcgaccttgttatcttctgtaacaggtataatatcgttgaaagaatgcttagatttagcagagaaatactatgacgagagcgccgaaaagctcacatatcctgaacacttattattgaacgtatgtctctgttctggtgcctcagcaactcaaacaattacgcgaggggattcgaagtatttaagaaaggacagatacgatccgacttctcaagagttaaaaacaattgaaaatgtcgctttattaaacgcaatgtattattatcataagctatccacgatatgttcaggcacaagaacattacaagccttactactattgaacagatacttccaagtcacgtatgataccgagttggcgaacagtattttaggaactgcaattcgattggcagttgacatggaactaaatagaaattcctcttataaatcgttagattttgaagaagccataaagagaagaagtatgtggtggcattgtttttgtacggataaactatattctttgatgttatctagacctcctattgtgggagagcaagatatggatatgctcaccgatcagaattattttgaagtgataaagaataacattttacctaccgttattcataaaaaggaagatctcgacaaaatcaatgatgtgaaatctgcattgaatgtagttgtaaatttctgccagcatatatcccttttcatatcctattatgtttcaaagttagttaatattgagagtagaatatattctacttgcttcgctgttagaagtactttggacctttcgtttgatgcaatgcttgacaaaattgtcgaactcaacgattccttaaacaattggaggaatgacttacatgtaagtatgaaactcaaaagttataagcaatacctatcagtactatacgcccaaaattctcaagaaaaccctgccttgagttttgagattgcgtgttgccgtgttttgcattgccactttaggtcactctattccattgttattttgagtatgctaaccacatcgctgcttattgataacaaactactgtacaaagattcgcgccatgagattccacaaatatttgtactattttcaaatcagtacttgaatgctagcaaggagatgttaacgctttttcaaggcattgattaccaagcacacatgtacaatgagattatgtatcaatttgccaccgccgtgtttgtcctttttttctttgttgtggacaatataaacaatccaaaaagaaaagttgaagtgaaagaaaccatcgatcttttgaagaaagcgtatgatcatttagtaggcgaaaatgacgagcagttgctttctgataatgtcaaatggaatactttgatagtgttttacagccatttcttgaaatatgttctgcagcgctatcatgagattggcgtctccatagccgagtttgatcccaaactctatgatgagataactgcgaaggttattaggcattcaagaaaagtaaaagacgagaccgtggatcaactgataacgagtctgaaatcgtatggatccttgcattctttacaaaaggataacgacgttggtatcacaagtaacgagttgaatacgagtaacattaattcagatgatctcccagaaagagcttcgataaatttgtttggtgaattatcagtcgatatattgaagatgttgaaatcacattctccaatctcacatattgcagatttatcgcctcttatgaaaagtaaaggattagcggatgactcttccctctacccaattcgatccgactcaaacagtcctgtttacccaatccatagctccgatgtatctgattccggggatacattttctacagacgcagaggttttggaccaagcctctggtaacgatgataaagtaatgaaagattttgaatcttttattacattattaccgttaggaaaattaatctatgatagagactattctttcgtaaatacttttatggattacaaatag

SEQ ID NO: 2304 - DNA, 834 bp, Saccharomyces pastorianus
atgaaattgagcagttttttaacttctgccttgtcgatatgcagttttgccgtaccggcgctagcgtacagtgatgatgtcataatggtcaagtcgattgagcagtactacgaaacgtgcaatagaaatgattcatacactatgattaaatattacacttcgtggtgccaacattgtaagacattagctccagtgtacgaagaacttggcgagctattcaccaaaaatgccaatgaagatgacattccaattaatttcctcgaagtcaactgtgaattttttgggccaacattatgcactgacttgcctggattccctatcattgaatttattaaaccacgtacaaagtcattaaaccttcctcagattgaccagtcttctatgaagttctatgaaagattgtggtacaggattaagaagtggttccacgatcccaaatggcaactggatccatctagggttgttcgatttgaaggaagtaggaacctgaagagtttaactaacttcatcgatggagtgagaagtaaagattcagagagaagactgattgaacaaatttttgatgattccaaagattgcggcgatgaattacgttctcaacagtcactatgcaaagctggtaaagaatactattcggcaaccctatctgaactatacgaagatatggatggattaagaaaggaacgattgaggttagaaagactggtcaagctaaatatggatgacccaggcgaagacaccaaagacaagctaaaaaccatccgcctgcaattgaacctcttgtcacacacagaagatcagttgcggtctacaactgaacatgatgagctttga

SEQ ID NO: 2305 - DNA, 3348 bp, Saccharomyces pastorianus
atgaaccaattgacggtgagttatggcctaatttccccggaatactgcacttcacaagatgcgcacatcctacctataacaaagattttatacccagacatacctgaaaggaactatttcctgacttcaggaagagatggttcgataattctgcacaagaacgcacacgtctttaacaatgtccaacctacatctaaggctaatcccgcatcagacgacgcgataagaatgcaagtccacagcgattgggcaagtgatttaatacacgtcaatatgaaatgtgcagatccctccactttagacacattcatatcggtaagtcatgatttttccatagtattaatcagtctgaatactgaactaaccacatgggataagaaaatcattggtgatcatgacgattatatcaaatgtatagtgcccatacatcatgatacgtcgcatgactttggaatcgatgagcgcgaggacaagtacaacaaatatgacgattatgaggaaagaaacaacgggatcgctactgatgaacaaaactacttcatttttgccacaggcggtctagataggaaaataaaagtttggtgcataaacaggggcccagagaaaatagctactctacttcacactttcgataatgctcaatcaaacgacacaggatcgatatattgcatgagccccataatatcgaaataccattctggtgacgaccaaacagcgcgtccctttgatttagtggccggagattgtaacggtgacctgattttctattcatgcaaagaccgcaaagaaataatgagaattggaaacgctcatatgacaaatattaaagtcgtaagaactgtcaacaattccacacgattagtaagtaccagttcagacggtgtaataaacgtatgggacttgaactgcatatgggatgaagctaacggtgttttccaagcacccaataagatcgggtcatggtcgtgggattcctccatatggtgcgttcaaggaacaagtctcgatcggctttattttggcgactcccaaggtaacgtgatgagggcaaacttatccagttatgaaaatgccaaactttcacgagttttcaaatccggtcaacatcaacgtcactacgaacatgaacaacaaaatacaccaaacaatctggatccaaaggtaaaaaagcatggcggtatcttggatattgcccttttacctgacgacaaactgttattttcattttgcacagactcaaatttgaatcaactcgatttagccaataataatttcagtgtaaacaagggggggttcgcgctaacaagaagttcattattaacaaacagaagacatgtaataacagaaaacactaagggggagacacagagatgggatattgtttcatgcgaactcttgaacacttttagctcgtcagaaggttcctttgatgatatcgtaatgaaatacacatcaaaggagattttatcccactggtgtaccgtttccgttaaggtgggtatgctatttgtgaaaataaatccaaagtttttgaaaacagaaatttatgggtctgcactgaaagattatgagattgtgaacgatattgaagtcagcccggatgagaggtataatttgggtaaaatcgttatcaattcattttttaatgaattcatatcctacgaagttcaaaaggataaacttctgaggaagagcatctttagttcgaaaaagaaaaatttaaacagcccacttacactggatacagggtacaactcagaaccaaaaaagaataataaagacaaaaagagaaaatcgacttttaaactaggctcaattggaagcgtcagcgcctctgtaactcctccaaattcggcccctgcaacgccactaacaggggaaactatagctctagaagagcaaccgcttttgcatttcccaactgataaggcaatggatgattctttggagctagtccaacctttgcctgtgtctaaaaagccatattttagaactcaaagttctggctctctattgagtagaaaatttaaatcatttagatctacctctagtcgtgccacaagcgggctaaacactccagaggaacctaggggaaatctgatagacactacacacgtcatcaatgatgactcccccgtggcgcatacgcataataccgctcaaccgtccaaggatgcaacaccggaatctatattatggaatcatccttttaagcttgatcaaaaattatctaatatttcatcacaagaatcaccctataataacgttcataataaattgaaatcggctgaaaattcaagagcaaattccacactaacattagaagggaacgaaaagaaaaatcccgaatttatgccggatctgcttgaccaaattcaagaatcttacaaacaacagtttatgaatacttcttccattaaatatttgaccaaaagacttcccgtcaccaagataattaaggctagttcatgtcctataataaaagttagatcaattactttaattttggtccacctatggaaagaagggtcttgtggtggcagagtattattttcaacctttttaccaccgtctcgaattgataatgaaattgttaacggtggcaaggaaaattctaagataccagacgatgaagaagattttcaaactgtagatgacgataagttaggacagtatgagcaaattgatggtgagttggggaaccggttaaacagaaggcaaatttttgaacaactggaggaaaatttaccttactggttcgcgaaggctttatttagggatattaagacggtagaagagcaaccaaagctgaacttcttaatcatgccatggtctgccgttggtgcaagcgaaacaaatgatagtggccaaaacaaaaagaaagataccaatagtccagattcaacagaatcttccaccaatgacagcagcgatagtagtgtagggaatggtaacggtaccgtttctccttcaacacagcaacaattccataatatgctaaagtttggacgttcaaagacaaatgagcaagaactaaatcccacggatttacctaagatatctgaggccaatgtcaaactggttgcgcctgggatgatcagagtgaagaagatcaaactatacgttgctgataggttcgagacgaagacccctgaaatgaaagccaaaattgaaccctatatatggttagatctattatgcaagggccaagtgttggataatgacatgacgctaagcaccgttagaacactttactggaaatcacagggagacatagttcttgaatacagaagaaaagtacatagttcgccattggtacacgaagtcaatggaaacgaaggaaaatga

SEQ ID NO: 2306 - DNA, 3021 bp, Saccharomyces pastorianus
atggctgatagtactccaaaagcatcgtcgacttcggcgtttgttacggcgctgattttcaacggcatcgtcgctattatattcgtgtggctttttatattattgcggcccaaaaacagaagggtctacgagccgcggtcccttaaagacgtgcagaccatcccggaggaagaacggacagagcctgtgcccgccgggtacatggagtgggttcattacttgctctccaagccacattcgttcctgatccagcataccagcgtggacgggtactttctgctgcggtacatcgggatcgtcgggtcggtttcgtttgtggcgtgcgtgtgtattctgcccattctgctgcccgtgaacgcgaccaacggtaacaacatggagggtttcgatctgctttcgttttcgaacgtcacgaacaagaaccggttctacgcgcacgttttcctgtcgtggctctttttcgggctggtcatctacgttatctacaaggagctgtactactacgttgtattcagacatgcgatgcagaccacgccgctctacgacgggttgctttcctctcggacggtcatcatcaccgagctggataaggacattgcgcaggaaggtgagatgcagatgcgtttccccaaggcgtccaacgtggtgtttgcgtacgaactttcggacctggagaagctgtgccaggagagagccaagaacgcggccaagtacgaggccgcgttgaacaaggtcctgaacaagtgcatgaaaatgaccaccaacaagacgcaggagcagctggacaagctgtacaataacggcaccaagcccaaggacgacttggagacctacgttccacacaagaaacggcccaagcaccgtttgggcaagttgccgctctgtctgggcggcaaaaaagtcagcacgctttcctactctagtaagagggtcggcgaactgaacgaagaaatccacgaaaagcaggccgactgggccagtaacgacaggctccccgcgtgcttcatccagttcgactcccaattggaagcgcagaggtgtttccaatctgcggacgccattttgggcacgaagcattttggtaagcgcctcatcggttactcccccgaagacatcaattgggaggccatgagtctcacttccaaagagaggcactccaagaggactttggctaacgccattctggtcttgttgattatcttctgggccatccccgtcgccgtcgtcgggtgtatttccaacgttaactaccttaccgagaaagttcatttcttacgtttcatcaacaacatgcccgatgtcctgatgggtattatcaccggtttggcgccctctattgcgctggccatcctgatgtcgctggttccgcccatcatcatcaagctcgggaaactgagcggttgtgtcactgcgcaggactcagatttgtattgtcaggcctggtactacgcattccaagtcattcaagtctttttgatcaccaccgccacctcctccgcgtcctccaccgttgatgcgatcatcaagaatccaagctctgcgatgacgctactggcaagtaacctgcccaagtcgtccaatttctacatcacgtatttcctactgcaaggtttgacagtgccctctggtatacttttccaagtggtcaatttggtgttgagcaaaatattgggcagattccttgactctacccctagacagaaatggaaccgttacaacattctgggcacccccaaattgggtgtcatataccccaccatcgaggtccttgtgtgcatctacatttgttactcgatcatcgctcctattctgctgtttttcagtacctttaccatgattcttctatatgtggcgtacttgtacaacttgaactacgttctagggttttcgttcgatcttaagggtcgcaattacccaagagcccttttccagatctttgtcggtctctacctaagtgaaatatgtttgcttggtttgttcatcatggccaagacctggggtcctctggtcttggaagtggtctgcatcgtcgttaccgccctggctcacatccacatgaaaaggaaatttttgccattgattgacgtggtccccctgagcgccattagatacgcgagaggtgaatctggctacgcctacccctcctcggatttgggtgcccaagaagtgaaaaatattgctgatgaaatgaggaacgattacgagaacgatgacactcatggtattttgtcacccgctaccaaggatgacttgaaaaaggccaatctactacctgaggatgacaacaattcagagaacagtgctccaagtaatccgttcgaatctggttctgaagaaagaagtgaacacaactcatcttctaggttcaacggggaagacgactccgtcaacaagaaaaagaacgatcccatcatcaaaaagtcaaacactatttcttcttccaccaaagacaaggataataacgggatcggaaatgagtcgacttttgttccagaagacgaaaaattccgtaagttccaatacagtgatgtggaggctctaagaaacaaccgtccatatgacgacgacgatcaaagccgtcatggacccgaaggggctgtgccagtcaatgcagatgcgggtgttatttacggcaacgcaggtgccgtgatgaaggagcctcaggcattcccaccagatgtcttggaaactaacacatggtcgcagagaattgcactatttttcaatccaaggaagtcgtatccgtttgacgaggtcagaacgagactcccacatgttttcaacactagtatcgaatacgatgaagagtatttgaacaccgcatacaccgatccttgtgttagagaaaaggatcctattgtgtggtgttgcaaggacccattaggtgtttccaagcaacagattcaagaagctggatccgaaggcttggatgtgagagacgactttacaagatatgatgaaaaaggtaaggccatgttcacttacaatcctcctgactatgagtttgaagccaagaagtaa

SEQ ID NO: 2307 - DNA, 867 bp, Saccharomyces pastorianus
atggcactttcatcgaactggcaagcattgttagcctcaaaaggcggccctgcttctggtaaaaagacgaagcagtcgaacaggaagatcacagataatagtaaaagtagcaagatagtaaaggttagcatcacccaagatgttcgcccgaaacgtaaaaattccagcaaaattatggatatggtttataacatgaacaaggaaatcagcaagcatgaaaaggaaaagctcgaggggaaattatttgaattcaacccttccaaggaaaagacagatgacagtgttgaagaaatagtacaggttggtgtctcagaaagcactcgtgctggtaacaacaagagtaaggcaattgggaagtacgttgcgatggattgtgaatttgtaggtgtagggcccgaaggtgaagaatctgctttggccagaatatcaatcgtaaattatttcggacatgttgttctcgatgagtttgttaaaccaagagagaaggttgtggaatggagaacttgggttagcggtattaagccagaacatatgaaaaatgcgataacttttaaagatgctcaaaagaggactgcggatattttggaaggtaggatcctagtaggacacgctttgaagcatgatcttgaagctttgatgctatcccatccaaaagcaatgcttagagacacttcaagacacctcccattcagacaagtctatgctaagggcaagaccccaagcctgaaaaaattaaccaaggaagttttgaaaatcgtcattcaagaaggggagcactcttctgttgaggatgcaagggccaccatgctattatataaaaaggaaaaaaaagaatttgaaaagattcatagaaacgctttcaattaa

SEQ ID NO: 2308 - DNA, 207 bp, Saccharomyces pastorianus
atgggtgctgcttatcatgtcatgggaaaggctatccctccacatcaattagccattggaacattaggcctgctaagtttattggttgtcccaaatcctttcaaaagtgcaaaaccgaaaacagtcgacattaaaactggcaacaaggaagaagaacagttcattgaaaactacttgaagcaacatctggaaaagcaagacgcttga

SEQ ID NO: 2309 - DNA, 876 bp, Saccharomyces pastorianus
atgtcttctatctacaaggccctcgcaggaaagagcaaagacaataaatcagaaaagaagcaaggtaatgtcaagcaattcatgaacaagcaaagaaccctactgatctccagtagaggtgtcaactacagacatcgtcatttaattcaagatttgagtggattattgcctcactctagaaaggagcctaaactggacactaaaaaggatcttcagcagttaaatgaaatcgctgagctgtataactgtaacaacgttctattcttcgaggctagaaagcaccaagatttgtatctatggttatcgaaaccaccaaacggtcccaccattaaattctacattcaaaatttgcataccatggatgaattgaacttcacaggtaactgtttaaagggttctcgcccagtattatcttttgatcaccgtttcgaatcttctccacactatcaattgattaaagagttactaatgcataactttggtgtgccaccaactgccagaaagtgcaagcccttcatcgaccacgtaatgtctttcagtatcgtggatgataagatatgggtaagaacatatgaaatctttcatagtaccaagaataaagacgaatacgaagatggtgaggaagacatatcgttagtggaaattgggccaagatttgtcatgactgtaattctgattttggaaggctcatttggtggtccaaaaatttatgagaataaacaatacgtctcaccaaacttcgttagagctcaaataaaacagcaagctgctacggacgcaaagtctagagccgacgctgctgtggagagaaagattaagagaagagagaacgtccttgcagcagatcctttatccaatgatgccttgttcaaataa

SEQ ID NO: 2310 - DNA, 2391 bp, Saccharomyces pastorianus
atgtccgagaagatagaggaggagatcctggaactaatcaataggtccaacttcaaacaatgctatgccagactgggacaattgcagaaacaatttcctaacgcggtatacttcaagatcctagagacatatgccaagttcaagcaatcgcccggtaaattcgactataagatactattggatgaaccgtacgggttgaaaggaaccacaattactggcgattctcgctccttggagtttctacacaatttcttcgtggaattagggagatacgatgaagccttgcatgtctatgaacgagggaacttcaagttccccagctacgaattgtcgtaccattggttcacgaaggctttggaagattcgaattttaatcaaatgagcaaggcgtctttacaactagccaagtacagtgacagtgggaacctgcccaagagggcatattatttttggaatgccatctcgattttagctgtgatgaggttccaagagagcactgtttctgagactaaaaagattgtgctggctaagcttgcacgtcaatctttgttagacctgaaaccgtttgaaaacgttcaagagatcattgtttattgtctagtattggacgagttgttccttgaatccaaagaaatctcggaagaaattgtcgagatcacccttataactttcgatacttcagtaaatttgtatttgaaaaactttatcttgaagcacgtcaagttattggattctccacagaagctttttgaagtttgctcaaaacttatcgaaaaaggtcttgatgattacgagttgatcataaacttaatcgaggctgcccataaactttccaaaccacaagaggaagtacagcactggcttgacggaaatttaggcgattcaaggaatacgagattggctcgtttgaagcttgatatggtatacacgaagtctgtttcggaaccatctttgtcttattacctttcgaagtaccataataaaccttgctgttcggtcgacctcaatcactacacagaccacatagacagagatatgctcaaaagcgttatgaccaagtatgatcgagacgatagagacttgattcatcattgcaatactttggaaatgggactaattgaaaataacccgatctgcgaatataacaggttcaaagaaaccttaaccaaaaagccaataaccgattattcatcctgttctacttttatattagaaataatcaaaggcgtatgtaaagaaactagtccaaacctgaaggatatacttttatgtatatcaatgttggaaaactaccaaaccaaggatcctcataactttgataccgcgtgctggctaattgttctatacatgtatctaggcttagtccccgacgctcatttccatttctcaaacttgaagatcaaaaacgttcaaacggattccatggattatttacaattcgcgaggttttctacttcatttcccaataaacaaagcgatttttactccaaaacttatcacgaacacaataatttatatgacgtatcgctagccaacttacctagatatatccagatagcatttgaaagatcttcgtatagtaaaatcttgggtatgttcgagatgaaggataaactaatgagatcttataccagatggatgaaaacgttagaaaacctacaattctcacgtttatgcaatgacaaacgcggaaatctgttacaaaaaatgcacgaagattggagatctttagaaatgacgggaaatatatcattttctgataatagagatttgtccatactagataaagatttcgttcaatttttcggttacgataaaatcctggaatttgcaaatttaaatgaaacctcaattttgttaagtttggtaagggaacttatcatcgaagctctgccaagcggtgagaaaatggaacaaataagcgaatttttagagaaactttcatcagaaaaccttaatgagctgttggctaataatttcaccgaagtcgaatcggtatcattccaaatcttttatgaaatttacgaaaatgacggtaaagagctgcatactttgatttcgaagttaatgaagattcctctaaatgcaaaacaaaactggaagatatctcatatttacctcaccaaaattgcaactctaaagacacttgacaatttgaaaaggatcaaaaataaagaaactcaaaaattagttaagaactcccttaaaaagctaagaggatgctgtgatactctttttaaggaatattctgatgcaataagcctagcattcgaagaactacaaaagggcgaacccatgaaattgctaaaagaacttgattttaaacttgaaagtcctaaaaacattaaaaattcattactgaacatacaaaagaatgtacggaatttataa

SEQ ID NO: 2311 - DNA, 3903 bp, Saccharomyces pastorianus
atggtacagccgattcatggcgatgtggccactggtttaaccgaaaatagactttcgttctctaggatccctagaataagcctccatgtaagggatttgtcgatcgttgcatctaagagtaacacgacgctggtcaactcattttcaatggacttgcccagcgggtcggtcatggcagttatgggtggttcagggtcagggaagaccacgctgttgaatgtgctggcatccaagattagtggtggtttaaggcatgagggttctatacggtatgtcttggaagactctgagtttggatctggctctgaggagcccttagatatgacggctaaaaacagccgtttggatggcgaagaccatcccattcaaaagcatgtaataatggcttacttaccacaacaagacgtgctctctccacggttgacatgtagggaaacccttaactttgcagctgatttgaaattgaactcttctaccaggactaagaagttgatggttgaacagttgattgaggagttagggttaagagattgtgctgatactttagtgggggataactcacacagaggtctctccggtggagagaagagaagattaagtatcggtactcaaatgatttcgaacccctccatcatgttcttggacgaacccactactggactggatgcatattctgcttttttggtcattaagaccttgaaaaaattagcaaaggaagatggcaggacatttatcatgtccatccatcagccaagatcagatattttgtttttactgagccaggtttgcattttatcgaagggcaatgtgatatactgtgacaaaatggataagaccatcccttattttgaatctattggttacagtgtgccgcagttggtgaatcctgcggattatttcattgatttgtcaagtgttgattcaagatctgataaagaggaatgcactacgcaaaagaggctggattcgttgatcgatcattggcatgattatgaaaaaaaccatttgcaactgcagacggaatcttgtatagataacgctgtcgaaattcacatccaaaatatgaccaccaggttaccattttggaaacaagttacggttttgacaagacgaaattttaagttgaacttttcagattatgtgactcttatatccactttcgcagaacctgtaatcattgctacagtttgtggctggatttactacaaacccgacaagacctccgtcggcgggttaaggacaattaccgcttgtctctacgcatcgaccatattacagtgctacttatatctgctgtttgatacgtatcgactttgtgagcaggatatcgcgttgtatgatcgtgaaagggcagaaggttcagtaacaccgctagcattcatcgtcgctagaaaattttctctttttctctcagatgatgttgctatgatcatgatctttgtgagtataacgtatttcatgtttgggctcgaagcaaatgcgagcaaattcttttatcagtttgccatcgtgtttctgtgccaattatcttgttctgggttgtctatgttatctgtggctgtttcaagagatttttctaaagcttctttggtgggtaatttgacatttactgtattatctatggggtgtggttttttcgttaacgctaaggtcatgccagtctatgttcgttggattaagtatattgctttcacgtggtattcatttggtactctgatgtcaagcacttttacggattcctattgtacctcagataatcttgatgaatgcttaggcaaccagattttaaaggcttacgggttccctaggaattggatcactgtacctgcagttattttattttgttggtcaatagggtattttgtggtaggagcaattatcctatatttacacaagattgatatcactttacaaaatgaagtaaagtcgaaaggaaagaaaattagcaagaagtcaccaagcgacgtgaaacccgaaatccaattgctagatgatattcaccatcaaaaggacttggaagcagaaaaaaaagatagaaaaaaatccattaccgtaaatctacaggacatagacctgcgagtaaatttctttaaccctttcacaaattggaaggaaagcaaattccaccacgaaaccaaagaaatcttgcaatcagtcaatgccgttttcaaacctgggatgattaatgcgattatggggccatcagggtcaggaaaatcctcattgttgaatttaatctctggaagattaaagtcctctctttttgctaagtttgccacttcaggttcaataatgttcaatgatattcaagtttcagagctcatgttcaagaacgtctgctcatatgtttcacaagatgatgaccatcttttggccacattaactgttaaggaaacgcttaaatatgcagctgcgctaaggttgcatcatttgaatgaggcagaacggatggaaagaaccgataatttgataagatccctaggtttaaagcactgtgaaaacaacatcattggtaatgagtttgttaagggtattagtggtggtgaaaagagaagggtcacgatgggtgttcaattactaaatgatccgccaatcttgttattagatgaaccaacttcagggctagatagctttacatccgccactatattggaaattctggagaatctgtgtacggaacacgggaagacagttatcatcactatccatcaaccaagatcggaattattcaaacgatttggtaatgttttgttgttagccaaatcaggtagaactgcattcaatgggtcacccgatgaaatgattacttattttgctgacttgggttttgattgcccatcttttaccaatgtggcagattttttccttgatctaatttcagttaatactcaaaatgaactgaatgaacaaagctcgaaatcaagggtagaagaaatactagcagcttggaaagagaatttagagaatgaaagtatttcatcatctcccatatctgaaaagcagcattactctcaagaatcatttttaacagaatatagcgagtttgtgaggaggccagctaatctgatgttagcatacatagttaatgtcaggaggcaatttactacgaccagaagaagttttgattctttgatggcacgtatcgcacaaattccagggttgggtgttatctttgcgttgttttttgctccagtcaagcataactatactagtatcaataatcgcttggggttagcacaagagtccacagcactttactttgtgggtatgctggggaacctggcatgttatccaactgagagagattatttttatgaagaatacaatgataacgtttacggtatagcaccctttttcttagcttatatgacattagagctaccactatccttattagcttcggttttatatgcagtgtttacagtgctagcatgtggattaccaagaacagcaggaaatttctttgtgacagtttattgttcttttgttgttaccacttgcggtgaagctttgggtataatgacaaatacgtttttcgaaaggccaggatttgttgttaactgtatttccattattttatccattggtacacagatgtcaggattaatgtcactgggaatgtcgagagtattgaaaggtttcaactatttaaaccctgtaggatatacctctatgatcattataaactatgcatttccgaggaacttgaagctaacttgcgaagatggcggaaaaaaccctgatggtacttgtgaatttggtaccgggcatgatgtattggtttcttatggattagaaagaaatactcaaaaatacttggggattattgtatgtgtagccattatataccgtcttattgcgtttttcattttgaaagccaaattagaatggatgaagtggtaa

SEQ ID NO: 2312 - DNA, 969 bp, Saccharomyces pastorianus
atgtctatggaaccaccagtagggcttacggctatgcccgttaccaaattagccatgatcacgacgcttgtggtgcccttgatggcctcgattgcaaattacaagcacatatttctattgcagtatgaccccttcctacagacgtaccatcaatactaccgtctgttcatattccagttctgcgccattaacgaatcagacgcaatcttactggcgctggtctggtatctgtttagacacctggaacggctattagggtcccataagtacttgacgttaattgtactatcatgggcgtacaccacgtttgtgatctgggggttgaacctgatctggaactcctttttaggacagtaccagtggctacagtggaacagttttactacgggttcgttgcccatcgtattgagcctagtgcacttttacaaagaatacactcctcaaatttacgaatggaacataagactactgggtcctcgtggagggtcgacaagtaacaccgataataaacaagaggaaaagggcgctgtgcagtggaaaatcaacgaccagtttcttttaaacggacttgtccttttgctactactgaatcaggggattgcagggatactatgcgggttcataagctgggtatgtggtattttcatcgataaaggattgcttccaggactagaccattggcgagtaccgtttgtatcccactggatctcccaaggcccacctaccagggccagcgtcgccatggctgccaatgcggctacgagtactgcagcagcaagagccagcgcagatgctgccattgccatcgcaggaagcagtaacacaaatggcactggtcctgtaagtatgccactacgtggttcaagcgcaactcccacggatacttccaacgctggtgatgacgaaccaggtgccgatgagcccgcaagaccattgggagttcaattcctggacactttcagaagatga

SEQ ID NO: 2313 - DNA, 1356 bp, Saccharomyces pastorianus
atgagtaggaatcaggacgtgttccctgtgttggacctagaggagctggttatatgtctacaaagctgtgattttgcgctggccacgcaggaaaacattgctaggccgacttcagactatatggtaactctttacaagcagatcattgaaaacttcatgggcatttctgtggaatcactgttgaatagcagcaaccaggaaacaggcgagaattacttgcaggacgagaatgagaatatttactctgacacattgaatgtgctggtgctgaataagatttgctttaagttctttgagaatattggtgtccaggatttcaatatgactgatttgtataagcctgagtcacagagaacccagcgtctcctcagtgcggtggtgaattacgctcgcttcagggaagaacgaatgtttgattgtaattcctttatcctccaaatggaatctttattagggcagcttcgatccaaattcgacgattataacttaatccaacaacaactgaaacagtatgaggatttaggcggggcaaatattcctgatggagaagagctgcaaaaattagaagaacaaaacaaagacctggagattcagttgaaaaaattgaccaagattcaagaaacgttatccatagattacaatgattacaagatctctaagcaaattatattcaaagagctggaaacgctgagcttccaaatagtagagctggagtccagccgagataaactgattaagatttccaatacagacaccaaagagttgactgaagggatcaaagagttgagtgatctgctaaaacaaaggaaaaagaccttgaacgatttgactgtgcagcaaaagagcttgcaggacacagtggcgacgttcgaaaccataatcagcgagctttatgacgtgctgagaataatttctagcgaagtgcaagaatctaatcgaacggaaacagaactgatgggattgaagcaaaacttaatcaacaataaactgaaactgttgaacgtgttggagactgggatcttatacaagttagagattttacaagagcaactggatttacaactaaaaaacttggagaaattatcaaaggatactgaagacgaatcgcgattgaacgattccaagttaaacgaaatgcaaatcaaatacgaaaatgaaatcaaacccaagattgacaagacagatgttttcattcaagatgaactaatcaatggtaaaattaataaattaaatgatgaaattaaacaattacaaaaaaactttgaaatggaaattaaagagattgaaattgagtattctttgttatctggtcatattaataaatacatgaatgaaatgcttggatatatgcagtag

SEQ ID NO: 2314 - DNA, 546 bp, Saccharomyces pastorianus
atgagcagcatcccagtcggcgcagatcccggatcgtgcggtgccaatttcaagaacgaccgtaaacgtcgggacaagatcaacgaccgcatccaagagttactaagcatcataccgagggacttcttcagggactactacggaaactccggcagcaacgatacgctgagcgagtccacgccgggggctcttggactatccagtaagaccaagggaacgggaaccaaggacggcaaaccaaacaagggccagatcctcacacagacggtggagtacatctcgcacctgcagagccaggtagacctgcaaaaccgagaggaggtggaactgatgatgaaggtttcgcagctggccaagcagacgggcaccatcgtcaacgacattaacctggagaacaccagcgctgaagtcgcactgtccaggatcggcgtagggcccctggccgcgacctcctcctcttcgaacgacgactcagcaaagcccccagccaataaactgagctcattcgagtacggagggtacggtgagtatagcgatggcacttag

SEQ ID NO: 2315 - DNA, 1152 bp, Saccharomyces pastorianus
atgagcacacacgattggaaggtatcggtaactacattcaattgtggtaaagagttccctgttgaaaattcaaaagctatcgttaagcaattgcttttcccctacgatgatggcatttcacagttagaactgcaggatatttacgttttggggttccaagaactagtgccaatatggcaaggttcgttccccgctgttaaccgtgatttaattgacaagatcacggccactgcaattgattgtttaaatgagaaagttataggtatccgggggggtgaacagtattcgtgtttaggggtgaatagccttggagccatcaccatgataatcctatacaacaataataagctgaaggtgagagaagatgttttgaagagaaacggcaagtgtggttggtttagtacacatttgaaaggtggtactttgattagctttaacatgaaacacaatggcgatgaaaattgggaaagatttagctttatttgtgttcatttaaatgcgaacgaaggtgcaaataataggaaccagagaataaatgactacaaacggatcatgagcgaagtgtgcgattccgcaattgttaagagtgaccacttcttcttcttaggtgatttgaattttagagttactagtgcttatgattcagccactgattactcttctgcgacaacattgaggcgcctattggaaaacgacgagttgaatctgctacgtaagaaagaggatgaaccgttgtgtaggggctttcacgaattggagataaagttcccaccgactttcaagtttaaagtgttcgaaaaggaaacgtataacaccaaaagaatcccatcatggtgcgaccgaattctatataaaacgtatgcgacacctaggttagaacaaggaggtacatatcattctgtaccaagatccaatgctctgatattcagcgatcatcagcctgtcaatcttacggtgaaattaccgaggtctactggggtaacagaaccttcattgttacccatcgaaaggtaccgtttgggatggagttctaatctagttggaaaaattggcgatgttgtcattggatactgtggttggctaataactaagaacgcacattattggatattgggttctgtattgctatatctactgataagaatcctctag

SEQ ID NO: 2316 - DNA, 1074 bp, Saccharomyces pastorianus
atggcattggaaagagaattattggttgcaactcaagctgtacgaaaggcgtctttattgactaagagaattcaatctgaagtgatttctcacaaggactccactactattaccaagagtgataattctccagtaaccacaggtgattatgctgcacaaacgatcatcataaatgctatcaagagcaatttccctgatgataaggtggttggtgaagaatcctcatcaggattgagcgacgcattcgtctcaggaattttaaacgaaataaaagccaatgacgaagtttataacaagaattataaaaaggatgattttctgtttacaaacgatcagtttccgctaaaatctttggaggacgtcaggcaaatcatcgatttcggcaattacgaaggtggtagaaaaggaagattttggtgtttggatcctattgacggaaccaaggggtttttaagaggcgaacagtttgcagtatgtctggccttaattgtggacggtgttgttcagcttggttgtattggatgccccaacttagttttaagttcttatgggggccaagatttgaaaggccatgagtcatttggttacatcttccgtgctgtcagaggtttaggtgccttctactctccatcttcagatgctgagtcatggaccaaaatctacgttagacatttgaaagacaccaaagacatgattactttagaaggtgtggaaaagggacactcttcacatgatgaacagtctgctatcaagagtaagttaaacatttcccagtctttgcatttggattcgcaagccaagtactgtttattagccttgggcttggctgacgtatacttgcgtttgcccatcaagctttcttatcaagaaaaaatctgggaccatgctgcaggcaacgttattgtccacgaagctggtggtatccatacagacgctatggagaatgttcccctggacttcggtaatggtagaaccctggctactaagggtgttatagcgtcaagtgggccacgtgagttgcacgacttggttgtatctacatcgagtgctgttattcaatctagaaaagcgtaa

SEQ ID NO: 2317 - DNA, 1476 bp, Saccharomyces pastorianus
atgattagtggggtgctggtatactcgtcacgaggcgagctaatattgaataagttctttaagaactcgttgaagcggtccatatccgatatattccgtgtacaagtgatcaacaatctggatgtcagatcgcccgtgttgacgcttggatctactacattccaccacattcggtcgaggcgtggggacaatttgtggttggtaactattacgaggagcaacgctaacagtgcggctatctgggagttcttatacaagctcgattccgtgatgaatgcgtaccgattggatagagaggaggcattaaaggaggagtttatgatagtgcacgagatgcttgatatcatgttaggtgggaacgggattcctattgacacggaattgaactctgtgatagctcagatgtctgtgaaacccgtgagaaacttggtcggattgttggagagtcctgatagcattgatgtgctgtcttcctcgtcgtctcccggttccgtggggggtgaattacatttccccaaatttctgaagaagagaagtagtagtttcctaggccagggagattcgcatcccgacttctccgatggtaacaagatcgcctggaggcccaagggaataatacacaagaaagatgaagtgtttttgtatgtcaatgagagaatgaacatactggtctctagagacggatccattttgaaatcatatgttgacgggaccatagatattaccacgcatctgagtgggaccccagtctgcagatttggattgaatgattctttgggaatgcaatccgaagaccagaaaaactggctatcacaacaggaccaacattctcataacgattttgaaaacaaaaattgttttcctaaggctgctgcaggcagtgttttattggaggattgtaagttccacgaatgcgtgtcaattgataaattcaacaaaaaccatattatcgaattcgtcccaccagacggttcaatggaattgatgaagtaccacgtacgagataacataaacttgccgttcaagattacacccattgtagcgcattctacaagagataacgaggttgattacaggataaccttgaaatcactattcccggggaaactctccgctaaggatgtgatattacatatccctgtgccaccaagcaccgtagattgtaaaataagcgtttctaatggtaattgtaaatttgtcccagaggaaaatgcaatgatttggagattcaacaagttcaatgggttgacggaaaatactttgagtgcggttactgtatctacaagtgacaccacccaattgagcctgcaacaatggacgagacctccaatgtctttggatttcgaagtgatgatgtttagtaattcagggctggtcgtacgctattttactatctcttccagagatagtaagcatcgtgctgtaaagtggatcaaatatatatcaaaatcaggttcttacgaagttagatactaa

SEQ ID NO: 2318 - DNA, 1476 bp, Saccharomyces pastorianus
atgattagtggtgtgctggtatactcatcgagaggtgaacttgtcttgaacaagttcttcaagaactcgttgaagcggtccatatccgatatcttccgagtacaagtgatcaataatctagatgttagatcgcctgttttgacactgggctcaactactttccatcacatcaggtcgaggcatggtgacaatttgtggttggtaaccattacgagaagcaacgctaatagtgcggcgatctgggagttcttatataagcttgatgcagtgatgaatgcttatcgattggatagagaggaggccttgaaggaagaattcatgattgtgcatgagatgctggatataatgttgggtggaaatgggataccaattgacactgaattgaactctgttatagcgcagatgtctgtgaaacccgttagaaatatgggcggattgttagatagtcccgatggaaatgatgtattatcttcctcttcatctcctacttcttcagcaggagaactacattttcccaaatttttgacaaaaagaagcagtagtttcctgggtcaaggagactccacttctgatttctatgataacaataagatcacttggaggcccaaggggataatacacaagaaggatgaagttttcttgtatgtcaatgagaggataaacattctggtatctagggatggttctatcttgaaatcatacgttgatggcaccatagatatcaccacacacttgagtgggacccctatttgtagatttggattgaatgattctttgggaatgcagtccgaagacgagaagaaatggttagcacaacagcagcgtcactctcgcagcgattttggaaacaagaacttcattcccaaagctgctgccggtagtgttttgttggaagattgcaagtttcacgaatgtgtctcacttgacaaatttaacagaaatcatatcattgaattcgtcccaccagacggttcgatggaattgatgaaatatcatgtacgagataacataaacctgccgttcaaggttacacctatagttacacattctacaagagataacgagattgattacaggataacattgaagtctttatttcctggaaaactttccgccaaggatgtggtactacatatacccgttccaccaagcactgtggattgtaagataagtgtctctaatggccactgtaagtttgtgccagaagaaaatgcaatgatttggaggttcaacaagtacaatgggttgacggaaaacactttaagtgcagttactgtgtccacaagtgatactactcaattgaatcttcaacaatggacaagacctccaatatccctggaattcgaggtcatgatgttcagtaattctggcttagtcgtacgatactttaccatttctggaaaagacagtaagcatcgtgctgtaaaatggattaaatatatatcgaaagccggttcttacgaggtgaggtactag

SEQ ID NO: 2319 - DNA, 1491 bp, Saccharomyces pastorianus
atgtcaatgagtaatattgttgtttttggaggggactcgcaccccgagttagttactaagatctgtgaaaatttggacattcacccatcgaaagtagaattagggaagttttctaatggggaaacgaacattgctcttcgcgaatctgttcgtgaaaaggatgtatatatcatccagagtggttgtggccaggtgaacgacacgttcatgcagttgctgattttaatcagtgcctgcaagtccgcttctgcctcgagggttacagccgtaatgccatatctctgctactcgagacagccagatattccatatactgccaagggtgctcccataatttccaagcctaaagaaaactatacttttgaatcgcatccaggcacacccgtgtcatcttctttaatgacgcaaagaccaggtgctgagagctcgttgaagagtttggatagtgcaatacgatcaactatcaacttagaaaatcctcaacctatcagaacaccaaacagcagtgctacggcgaataacaatttcgacatcaagaagacgctttctttttcaagaattcctatgattcccggtggtaagttacaaaatacaagcaatagcacggacgctggtgaattgttcaacgctcaaaatgcaggctataagctatgggtagtacaagccggtactttgattgctcatttgttgagtgctgcaggtgctgaccatgtgatcacaatggatttgcacgatccacagttccctgggttttttgacattccagtggataatctctactgtaaacccattgcacaaaactacatccagcatcgcattccagattatcaggatgctgtgatcgtttctccagatgctggtggtgcaaagagagctacggctattgcagacgccttggaattgtccttcgccctaattcataaagaaagaagatctcagttattgaagggccctccagatgcgacgttaacctctggtggttcgttaccagtatctccaaggccattagttactactttggtttcctcccaaaatactacttctgcaggtgccactggggttgcggcccttgaaatgaagaaaacaacttcaacatcttccacctcgtcgcaatcttctaattcgtccaagttcgttcaaactaccatgcttgttggcgatgttagaaacaaggtgtgtattatagtcgacgacttggtggatacttcatacactattacaagagctgcgaaattgttgaaggatcaaggatctaccaaagtttatgccttaataacgcacggtgttttttccggtgatgcgctagaaagaatcggccaaagtagtatagataagttgatcatttctaacacggttcctcaagatagaacactacagtacctaggtaaggacagagtggatgttattgatgtctcctgcataatcggtgaagcaattagaagaatccataacggtgaatccatttctatgttgttcgagcatggatggtag

SEQ ID NO: 2320 - DNA, 2151 bp, Saccharomyces pastorianus
atgtcgttattgtcgttaaggtccaggtcacgatctggcgcccctcattggctgtacatgttcctgtatcacatcttcaccattcccaagatatactcgctcccgttggtctctaggtcacacgggtttggtacaagagacgctgtcgactccggccctagccccggcggcgaggctggcgtgaccacgtactacatcatctctgtcatcctggttttgctgggtggggtgtttgccgggctgacgctggcgctgatgggccaggacgaagtgtacctgaaagtcatcagcacgtccggctcgcactcggagaagaagctggccaaccgggtgctcaacttgatatcgaagggcaagcactgggtcctggtcacgctgcttctctctaacgtcatcaccaatgaaaccctgcctattgttctggacaggtgtcttgggggtggctggcaagctgttttcctgtccacgattctgattgtcatttttggtgagatcatcccacagagtgtctgtgtcaagtacgggctgcaagtcggcgccttcttctgtcccttcgttctcgtcctgatgtacgcgatgtatccagtcgcgtacccgattgccaccttgctggactacatgctaggtgaggaccatggtaccatgtacaaaaagtccgggttgaaaactttggtcactttgcacagaaccatgggtgtggaacggttgacccaggacgaagtcaccatcatctctgctgttttggacctgaaggaaaaaaaagtcgaggaaatcatgaccccgattgaaaacgtcttcacgatgagtgctgacaccatcctggacgacacaactgtcgaaaagattttcaactcgggcttttccagaatcccgattttcttgcccaatgaaccaaacaacttcatcggaatgctactggtccgcgtccttatctcctacgatcctgatgattgtctgcccatctcccatttccccctggccacattgcccgaaacttctccaaagacatcttgcctgaatattttgaactatttccaggagggaaaagcccacatgtgtgtcgttagcaaagaaccaggttcctctcatggcgccattggtgttttgactttggaagatgtcatcgaggaattgatcggcgaagaaattgtagacgagtccgatgtctttgtggacatgcatcagcacatcatgaggcaacaaccgggccccttaagcaaaagacacatcacctcttatttgcatcatttgtacaccaactctcataaggaccatcgcaatgctgaccagatagacgagtcttcccctcttttatctccatctacttctaaccacccaaatgaacaccaacaattgtcttcggacaatagtaaacctgggaatcgaaaggtactcaatggcgatgtagataagcccaatccagccctgaatgccacgtcaagattggctttatcatccccgaccccacaaccaacggaacatagcgtcatcataccttcgaacctagcgtccaatccgctgaatatcaataaatccttcgtcaccatcaaaaagccttccaatgttccgaccattatcaccaccctaactccccgccccagcaaagaacagaacacaccacctctctccagcgataagtcactctccaccgaagaaaaccaactgttaagtgaacatgccgaactatctcgtcaagctatcctccatactcaaaagtcaggcgaaccaaccagagtcaccacgtcgacaaacactacgagaaacagtcccgatagcataacaattccgaattcgaattcgggtgcagaccatctcaacgaaaaccaaaacgtaacgatctcgtcctcttaccaaaacactaaaaacggtattgtggaatcagtgatcacagttaagggtgttccgaagacaatcattggtcccgctaaggactgggacgaatctagaagcgaacacgataattaccgttctgatcgagaaaattcaaatttgactgatgacagagacagttcaagttcagaaacgagtttattttccagtattaagaataaattcaagaacgagaataacaacaacgaccgttccaattacgtgagttcaagaggttccaatttcgaagctaacggatcttcgtctgccatgaaaaggtaa

SEQ ID NO: 2321 - DNA, 1320 bp, Saccharomyces pastorianus
atgcttgctctcagacggttaacaagatacacattcctcaagcgaacgcatccggtgttatctgctcatcgtgcatataaatttttccctttaagttccacttgctcaagaagaacatttcagatacaactgcgctcaaagatgactgctcatatcaaccacaaatcgcacaacggtaaccaagatgaccatccgttcaaaagatcagactctgcggtgtcgattatgcatttgaaacgtgagcctttcaagatcacagtgattggttccggtaactgggggaccaccatcgccaaagttattgcagaaaacacagagctgcattctcatattttcaacccggaagtgagaatgtgggtgtttgatgagaaaatcggtgacgaaaatctaacggatatcataaatacaagacatcaaaacgtcaaatatctaccaaatatcgacctgccccacaacttggtggctgatcccgatcttttgcattccatcaagggtgctgatatccttgtcttcaacatccctcatcaattcttacctaatatagtcaaacagctacaaggccacgtggcccctcacgtaagagccatctcgtgtctcaaagggttcgaactgggctccaagggtgttcagttgctgtcctcctacgtcaccgacgagttaggagtccaatgtggtgcattatccggcgccaacctagcccccgaagtggccaaggaacactggtccgaaaccaccgtggcctaccaactgccaaaggactaccaaggtgaaggcaaggacgtagaccacaaggttctaaaactactgttccacagaccttacttccacgtcaacgtcatcgacgatgttgctggtatctccattgcaggtgctttgaaaaacgtcgtagcactggcctgcgggttcgtagaaggcatgggatggggtaacaacgcctccgctgccatccagagactgggtctgggcgagatcatcaagttcgggagaatgttcttcccggaatccaaggtcgagacctactaccaggagtccgctggtgtggctgatctaatcaccacatgttcaggcggcagaaacgtcaaggtcgctacgtacatggccaagaccggcaagtccgccctggaagcagaaaaggaactgctaaacggccagtccgcccaggggatcatcacatgcagagaagtccacgagtggctgcaaacgtgtgagttgacccaagaatacccactgttcgaggcggtgtaccagatagtttacaacaacgtccgcatggaagacctaccggaaatgattgaagaactagacatcgaggacaaatag

SEQ ID NO: 2322 - DNA, 1263 bp, Saccharomyces pastorianus
atgtctaaaggaaaggtttgtttggcttactctggtggtttggatacctccatcattttggcttggttgctggatgaaggctacgaagttgtggctttcatggctaacttgggccaagaagaagattttgatgccgctagagaaaaggctttgaagatcggtgcttgtaagtttgttagtgtggactgtcgtgaagaattcgtcaaggacattttgttccctgctgtgcaggtcaatgctgtgtacgaagacgtttatttattgggtacttctttggctagaccggttattgccaaggcccaaatcgatgttgctaagcaagaaggctgtttcgccgtttctcacggatgtactggtaaaggtaatgaccagatcagattcgaactatctttctacgctttgaagccagatgtcgtgtgtattactccatggagattgccagaatttttcgaaagatttgccggtagaaaggacttgttggactacgctgcccaaaagggtatcccagtcacccaaacaaagtccaagccatggtccactgacgaaaacgaagctcatatctcttacgaagccggtatcttggaagacccagataccaccccaccaaaggacatgtggaagttgaccgtggacccaatggatgctccagaccaaccacaagatttgactatcgacttcgagcgtggtctaccagttaagttgacctacacagacaacaaaacctccaaggaaacctctgtgaccaagcctttggacgtcttcttggcagcatccaatttggccagagccaacggtgtcggtagaatcgatatcgtcgaagatcgttacatcaacttgaaatccagaggttgttacgaacaggccccattgaccgttttgagaagagcccacgttgatttggaaggtttgaccttggacagagaagttcgtcaattgagagactccttcgttacaccaaactactctaggttgatatacaacggttcctacttcaccccagaatgtgaatacatcagatccatgatccaaccttcccaaaatagtgtcaacggtaccgttagagtcagactatataagggtagcgtcagcatcttgggtagatctaccaagactgaaaagttgtacgacccaactgaatcatctatggatgaattgaccgggttcttgcctactgacaccactggtttcatcgccattcaagccatcagaattaagaagtacggtgaggccaaaaaatctagaagtgaagaattgactttgtaa

SEQ ID NO: 2323 - DNA, 2133 bp, Saccharomyces pastorianus
atgaatcagtatttcgcggatcatgatgctcctttgagcatgctttctgtaaaaacagaatattttcctcaattgactgaaaaagagcaaaaatatgcacatttcatgtcaaaggcatcccacgcaggttcaagggtggtgatgagacaagtctctcatgaaactgaaccgatctttgacctagtccttgctattcacgcaaacctaagtggtcagtacccagtggacgatagtactgaaaagcaacaaacggaattctatctagaatacgtatctcaatttttatccaatttgggtaattacaaatcctttggtgacagtaaattcattcctcgttgtggagtggaattcttccaaaaactgttgaagttggcgaaaattgacccttcttcatctccgtcgaccttgtcgcctgcagacgtcaaccataacttcacatctcataaacttttctccactatcaatgagttggttgcggttggtgtctaccacgtggacgaaaaggctgctctcttagggttcccttctcaaggttacacttcagcatattatctgggtcaacctgtaacacctgaagatatggccctcttaaaagagcaactattcgcagaacttgccatcttgcctgagaatacaagaatcaaaaaaatcgatgatcaatcttttcaaatctgggttgcttctgagaatgttaaaaacgaaatagcagagacttatcctaatggacagatcatattgctcaataatacaaccaaagtggaattcatattcagtgaccactcacgtgagatgcgtttaatagcttcgtacctaaaagaggctcaaaattacgcagccaatgatactcaaaaagcgatgcttcaagaatacatcgaccatttcgtcacgggctcatcgcattctcataaggaagcacaaaaattatgggtgaaggatatttctcccatcatcgaaacgaacattggattcatcgaaacatacagagaaccttctggtataatcggggaatttgaatcattggttgctattcagaacaaaaaacgtactgccaagttttctagtttggttaacaacgctgaagaatttatttcgttattaccgtggtctgaagattatgaaaagccgaactttaacccaccagatttcacctccctagaagttctaacattcacagggtcgggaataccagcaggtatcaatatcccaaattatgacgatgtcagattaaagattgggttcaagaatgtttctttagggaacatcttgagcgcggctgccaaaagctcatctaagcacccaccaagtttcatttccggcgaagatcgtttaatttttgaacagtatcagagtgaatcctttgaagttcaagtaggaatccatgaattattaggccatggatcagggaaactattgaccgaatttacagatgggttcaactttgataaggaccatccacctttgggtttggacgggaattccgtgaagacgtactacaagttgggagaaacttggggctcaaaatttggacaattagcgggtccctttgaagagtgtcgtgctgaagtaatcgccatgtttttgattactaataggaagattttggatatttttggttttcatgatgaggaatctcaggataatgtggtatatgctgggtatttacaaatggcccgtgcaggtctattggcgctagaatattggaaccctaaaactggaaaatgggggcaaccacacatgcaagcgagattctctatcatgaaaacattcatgaagcattgtaaagacaagaatttcctaaagttggaaatcaacgacacgatggatgacttcaccatcaagttggataaaactctcatcaagactgccgggcttgagtgtgtaaaggactacttacaacgtttacatgtttacaaatgctcaggtgacgtggaacaaggtagtaagtattttatcgatagatcaactgtgacaccagatttggcctctttgagagacattgttgtttccaagagattgccaagaaggcaatttattcaggcaaattcacatgtcaatggcgagaatgtttctttggtagaatacgaagaaactccgcgaggcatgttacaatccttcctggatagagaactgtaa

SEQ ID NO: 2324 - DNA, 1656 bp, Saccharomyces pastorianus
atgacctacgcttcagtcagcatcaacactcccccaccatatcttactttggccagcaacgaaaaattgccagtcgtgttatccatcgctggaacagaccccagtggtggtgctggtctggaagcagatatgaaaactatcacggcgcacagatgttatgccatgacatgtgtcacctctgtaaatgttcaaactccagcaaaagtctacagtattcacaacacaccaaaggatgttgtatttcaaatcttggaaacaaatttacaagacatgaaatgtgatgttatcaagaccggtatgcttaccgtacctgctattgaggttttgcacgaaaagttgttgcaacttggtgaaaatagacctaaacttgtggttgatccagtctttgttgctactgccggttcttcattagctggcgaagatgtagttactttgattagggacaaaattgctccttttgcagaagttttgacacctaatattccagagtgtttcaaactgctaggcgaagaaagaaaaattaacaaactgcatgatatttttgaaataggtaaggaacttgccaaaatcactaaatgtgccaatatcctagtgaaaggtggccatattccatggagtgacgaaggtgaaaaatacattaccgatgttctttacttaggtgcagaacaaaagtttatcgtctttagaggcaatttcgtcaataccacgcacacccatggtaccggatgcactcttgcttctgccattgcgtccaacctagctcgtggttattctcttcctcaatctgtttacggtggtgttgaatacgtccaaaatgccgtggccattggctgtgatgttaccaacccacaaattaaggataatggcccaataaatcatgtctatgctatagaaatcccactagaaaaaatgattaccgatgaatgctttaccgcactagacgtcttacctaaaaagcaaattgcaagtgctgctgacaaaattccaggcggcaattttttcgaatacttgatcaatcaccctaaagttaagccacactgggactcatatgtgaaccacgaatttgttgaaaaggtggctgacggtacattagagcgtaagaagttcagattctttattgaacaagattatgcatacttagttgactacgctagagttcactgtatcgcgggtagcaaagctccatgtctagaagatatagagaaggaattatccattgttgcaagtgttcgtaatgaaatgggtgagcatgaaaagagactaacggaagaatttggtgtcccagaccaagcatacttccaaaacattgctagaggaccagcattaaaggcctactctcgttacttcaatgatgtttccagaagaggtaactggcaagagttagttgccgccttgactccttgtttaatgggttatggttatgctttgaccaagatgaagggtaaagtcactgcagctgagggttctgcttactacaagtggtgtgaaacttacagttctccatggtactgtgctgccatggccgaaggtgaactacttctaaatcacatcttggaaacataccctccagaggaccttgatattttggtaagaatttatggtgaagtttgtgaattagaaaccaatttctggaccgccgctttagaatacgaatga

SEQ ID NO: 2325 - DNA, 1233 bp, Saccharomyces pastorianus
atgggtgacgaattacacaaccgtttacttcatcaaagtaatagtacgaaagatgaaatcctttacaaggtaatagaatccctaatttgctctatctgccatgattatatgtttataccgatgatgacaccctgcggtcacaattattgttatggatgtttgaacacttggttttctagcaacactcagaaagaattagcctgtccacagtgtagatcggatgttacgactattcctgctttgaatactacactacaacaatatttatcatttattctggataggttgagcagcgaagaagatgattccttcaagagactattagaaactaaaattaaggaggaaaatgattacaagcttgataaggaaaaggatacattattcgaaggagtatttaagaatagtgcgttagcggtggctgacgattctgatgacggtatcacacgttgtagtaactgtcattgggaattagatccagatgaagtagaagacgggaatgtctgccctcattgtaatgccagaataaggaattatgcgggcggcaatgacgaattcgatgaagaagaatatagtgaaggagaattgaatgagatcagagagagcatgcgtaggcgtagagaggagcggcccgcatctacagatccctttgccaatggagatgatgtgagttcagaagaagatagcagcagtggcgatgagcctatgcgggaacacatcccacaaggccgctgggctaggtcacacaatcgtagcatcgcggtggatgcagtggacgatgatgaggatgaagaagaacgggaagaagaagaagaggaagagatggattccgatatgaaagatttcatagaggatgatgaggatgaagatgaagatggcagtaggagagaactggtattgtccgcgctcaataacaggcaagtgattattactgatgatgaggaagaagatgcccaagagcaagctcctgcggaagaggaggatcatgacagcgatttttatgagcacaatgatgaaggatttgtaagcggcgacagtcttgatgaaggccagaaaaaagccgcagacatggattcgaattcagactctgaagatcgttccatttcttaccctagttctaatgaagttgatgaacaagatgatcaagatgaacgcgacaccgaagaactggacgacccacaaccgaaaagacaaaagcgattccgtgttgttctaggagacagcgacgatgagtga

SEQ ID NO: 2326 - DNA, 186 bp, Saccharomyces pastorianus
atgaaagtatcacaagttttcatttctgccatctctgtcttcggcctcgctactagcgtaaatgctcaaaacgcatccaacaccacgagtaacgctgctcctgctttgcacgctcaaaatggtcaactactaaacgccggagtcgtcggtgctgctgttggtggtgctttggcctttttgatttag

SEQ ID NO: 2327 - DNA, 1155 bp, Saccharomyces pastorianus
atggctgcaagtaagataatgagcaatgcgcccatgtattccctcgattcttctttaagggacctacttaacgatgacttattcaataatcatggcaaatcggcaaagtcagaaaatgatgaaagaaatgaagtattccaggagtgtttgaatttatttataaaaggagaaattaaggactgtctggaaaggatgtatgaggctgggtttattcaccttggtatttttaagtctaatcctatgatattggatttgtttgttagtgcctgtgacctcgtatcaaatttcaatgaactaggcttaactttaaagggagaggttttgaatacatttactttggatcatccgcgatgtattgaaatacaggaaatcattctcaaagacctcaataaacttttgatcatcaataaattatttcggtgctgtatcaaggctattcagtccggtgggacagaatatatggaacgtgaaagaaccattttggacgttgagtctgaaattagaaactttattctcgcgtatacaactaagatgaggactactgtggatgttttcggattgcaggagttgattgaaatattcatttttcaagtgcaggtaaagctagagcataagaaactctccccgaatttgtactgggccctttgtaagacattaccaaacctatctgcaaccttaaagggtcttcatttattaaagaacgagtccatagaggacgctattctcaactcgattgataccaaaatacaaaaaaatttgacaaaatctaaaacaaaatcaaaaggcatgaagcagaaaatacaccatttccaagagcccttgctacacgatgatgccaaggttcgcttaaaggctgacaatgcatacagaaagcgcaactctattgatattggtaaagttgatcacaatgaaacaattcctcgtaagccccaacatggcatcaccattctagttggctccttttggaccgctttaaaaaatcactttacaaaaagaatgctgaataaaaacgggcttttgcttggaggcttgttgtttttgctatgcgtcaaaagatataaatcgttaatggcaatctttagacacgttccgacggctttccgctctgtattccctcatattgttcagctgctaaagctcctagcgagtatatga

SEQ ID NO: 2328 - DNA, 1146 bp, Saccharomyces pastorianus
atgagagaagtaagcgggcgtaggaagagaaagtatatcccaattgatgttgaagaggtggaagttcggtctaagtactttaaaaagaaagaagataaggctgatgagtcactacaaaagcctaacgttaccaaagactcacaaagcaaatatgctgtaaacatcgactggatcaaggcactgaagccgatagagtatttcgagtggattgattcgaggacttgtgacaatccaaaagcttgggaacgagtaataactagagaagaaatggtcaacgattctggggcagaaattcctgaaacttttttacccatttataatagagtaagattaatgaggtccaaagtcaacacgccagtagattcaatgggatgtagtatgattcctgtcttaattgcagataagtgtgggataccgagtgagaaagtcaacccaaagaacttcagacttcagttccttattggcactatgctttctgcccaaacaagggatgaacgaatggctcaagccgccttaaatatcacggagtactgcttggacactttaaagatatcggaaggtcttactctagatgggttacttaaaatcgacgaatcgatattagcagacttaatttgctgtgttagtttctattctagaaaagccaatttcatcaagagaacagctcagttactggtagatgattttggctctgatataccgttcgatatagacggaattctatcattacctggcgttgggcccaagatgggctatttgacactgcaaaaaggctggggtttgatcgccgggatatgcgttgatgtgcacgttcatagattgtgtaatatgtggaattgggtggatcctatcaagtgcaaaactgcagaacacaccaggaaggaactacaggcttggttacctcattcgctatggtacgaaattaacactgttttagttggattcggtcaattgatctgcatggcaaggggtaaaagatgtgatttatgtctggcgaacgacgtttgtaatgctcgtaattcgaaactaattaaatcttccaaatttcaccaattggaagatgaggaaaacatggaaatcgtgtattcgcactggttggatacacttgcaaatggcattaaaacgcagaggtacaagaagaagtaa

SEQ ID NO: 2329 - DNA, 1092 bp, Saccharomyces pastorianus
atgttctctcgaaggtttattccagttgcacaatctactaagcagaacattggcaaatatgtgcgaaaagatgctagattcactttgttgacatacaatatgctctcaccgtcatatatgtggccgcaagtctatacttatgttgcggagcggtataaaaactggaattataggcacaaactgctagagaaggagcttctaactacttttaaggcagatattatgtgcctgcaagaaatgactacgggggattacgaaaactattggcgcaattccattggagttgatatcaattacgggtccaagttcatctccaagaccccacccaagtattgggagaaaccgatcaaagatatggatggtgtatccattttttataaccttgaaaaattcgactatatttcatcgtcagggatttacttgaatcaattactaaatgtttttaatgaacgtgaattgaaatacttgtacaataaaaaggtgactttaacagacggcgcttctaatgttattggcgaagacagtttattggatgttttgaagggcaagaatcaggtatgcttattcgtgtccttgaaacataaggaatcgaataccatatttgtcgttttaaatactcacctgtattggaaatatgacgaagtaaagctgacacaatgtatgatcataatgagagaactgtcaaaaataatcaaacaacttcttccaggtgatgcagatgctcaagagaaagtgaagattttattcactggtgatttaaattctacaagagattcattagttgttaattttttgcagggccagatagttaatcatggagatcttaatcttgttaacccaatgagaccgtatttggaccgttgtgtttatgacgacataccaagtgactatttcgtgcatacgtgctattcagggaaattgaagggtatttttgattatgtctggtatcacgactcagacttcttattaactaagattttaaccggtaacgaagtttcagatgaattgttagcatcaagtcaattaggtctacccaatgaaaaccatcccagtgatcatatacccctactaacagaattcaagatactatga

SEQ ID NO: 2330 - DNA, 429 bp, Saccharomyces pastorianus
atgtctcaagctgctaacgtcaagaagagagttttcaagacccactcctacagaggtgtcgatttggaaaaattgttagaaatgtccactgaagatttcgtcaagttggctccagctagagttagaagaagatttgcccgtggtatgacttccaagccagccggtttcatgaagaaattgagagctgctaagttggctgctccagaaagtgaaaagccaaccccagttagaactcacatgagaaacatgatcattgttccagaaatgattggttccgtcgtcggtatctacaacggtaagtctttcaaccaagttgaaatcagaccagaaatgttgggtcactacttgggtgaattctccatcacttacaccccagtcagacacggtagagccggtgctactacttcccgtttcaccccattgaaataa

SEQ ID NO: 2331 - DNA, 321 bp, Saccharomyces pastorianus
atgaagtacttagctgcttacctattattgaacgctgctggcaacactccagatgccaccaagatcaaggccgttttggaatccgtcggtattgaaatcgaagacgaaaaggtctcctccgtcttgtccgctttggaaggtaagtctgttgacgaattagttactgaaggtaacgaaaagttggctgctgttccagctgctggcccagcctctgctggtggcgctgctgctgcctctggtgatgctgctgctgaagaagacaaggaagaagaagccgctgaagaatccgatgacgacatgggtttcggtttattcgattaa

SEQ ID NO: 2332 - DNA, 765 bp, Saccharomyces pastorianus
atgagtggttacgacagagctttgtccattttctcgccagatggccacattttccaagtcgagtacgccctggaggctgtaaagaggggtacctgtgccgtaggtgttaagggtaagaattgcgtggtattgggttgcgaaagaaggtctactttgaagctacaagacaccaggatcacgccttcaaaagtgtctaagatcgactcgcatgtggttttgtcgttttcgggtctaaatgcagactccagaatcttaatcgagaaggccagagtggaggcccagagtcatagacttacgttggaggatccagtgacggtggagtacttaacacgttacgtggccggtgtgcagcagagatacacgcagtccggtggtgtcagaccattcggtgtgtccacgctaatcgccggtttcgactcaagagatgatgagcccaagctctaccagaccgaaccaagtggtatatactcctcgtggtctgcgcagactatcggcagaaactccaagacggtacgtgagttcttggagaagaactacgaccgcaaagagccaccagccaccgtggaagagtgtgtcaagcttaccgtaagatctcttttggaagtcgtccagacaggtgccaagaacatcgaaatcaccgtcgtcagaccagactcagaaatcgttgccttgaacagcgacgaaatcaacgagtacgtcacccagatcgagcaagaaaagcaagaacaacaagagcaggataaaaagaagaaatccagcaattga

SEQ ID NO: 2333 - DNA, 2295 bp, Saccharomyces pastorianus
atggaccaccaagacaactcgccacccagatacaggaactctggctctaacagggccactgcatataacagtactaccctgcctacgatgcccaaaagcgccacacccacatcgagttcgacgactgttaccacgcatttgcacaatatcaaagaagaggaggcaaatgatgacgaactcacccaaatagatcgttcttcgcctcgtgttttaggaagaatctcgtcttcatcttcgtcttcgtccaatatcgatctgcacgataacttggatatgctacacgatatggataaatcagccaccaacctctcactatccactcctaatttacatgaagaaatgggcttccgtggcgacaaaggtaatagtaaggaagaactgactttgttgccacctttaccccacacgggagaattagaaattgctccaaaatttgatatcaatgaagccatttttgagcaggatgacattagtcagtcctcaatgttggaaacagaaaatgtaatagcgaacctaacgagctctactccagatgctactaggaaatcacaggatttcgccattatgacgcatgacaacaacatgattgctaacgacaattctgaattaagtgatacaatcctagataatcagacctcgttcgatctttctaaagccctggagatgaccagccattcaaacattcgcaatattattaatcccggttccgatggaagaacctcaagagcctcaagaactccgataagcactgcgacattgaaaacatattcttcgtcacctgccagtggggaacatgacgaaaacacaactacattctcctctacgtccgatcaggcggctaccatactgtatgatcctaataaaatcctgaatcccatcccggtttcaccttcttctccctatgagcaacatcagagcgatagagcctcgagagatagaagtagatctaattctagcaccttagcttctactctgagagatactatcattttaggattgccccaaaataatagcactgtagaaagaaagctatcaagaaaattgagtaatttgagtaggaaaaatacaggaacctttgaagaacgtcttcaatcgttaccgcctttaagtaccgaaaattcaagcgagtacgccatggcagcgtccatagatatcatcggcttacaacctcctgtcatatccacgccagtgccaagtacccaaacaccaataccattccaatccgaatctgctttgactagcgaagaaaagagaatgccttttttgagaagagcctctagtgccattttaagaaaaaaatctgtcaagaacggccccagtttaactagaccaaatacaccaactttaccatcgtctcaaacgttcgattcgggatcaacaaatggtcagcatcccttgctaattcgacgatcttcgaatattgaatataaacaaccaagaagacagctttcatgttcgaagtcttattctcgtttggattccgataccaagtttgctaacagtagtcgaccttccaaggaagttttacgaaccacttcgaaccatgtggaggaggtatatagaaagatatctcttggctccaagatcaagagaggtttcactagaattttaagcgatagtaatagtagcagggacgctctcgctgcatcgcccaaaatagcagtagcaggaggaaccacagcatcttctttgtcccctatatccactgtaagaagtagtccgataacgccaagccctaatgaaaggaaacgagtttcaacggatagcgtaagtttggtcaaccgaacatcaacatcctacccaaggtcatcagcagatattattcccacactacacgaagaaccccaggctaacattccaaaaagatcagcaagtagaaatatgctgtctagaaatcttagcaggaagaacattttgtccgaacaggaaaccaagggaagtgaaatatatctggacaaagaggcgttacaaaacttagtcccggtgttttctgtcacagaggacacccaccacatcaaccgttcgtctttacaaacgcagtccactatcaaattgtgcatcgacaacctaagaaataaagaaggcttgagattggatgtcaaggaatacgtggacatcttgagtcagcaacaacgcaaggaagatgaaagatatgccattttggaaaagaagttcgcgtcttgtgcgtggtgtagcgataaagatctccagtacttgaaaaagaaacgaacttctatgaacaaaatatggtctgattacgtacgattttaccgtggaaaattaaacagcccataa

SEQ ID NO: 2334 - DNA, 1605 bp, Saccharomyces pastorianus
atgatcctgctgagaataccgacacggttttattgttcatcgctgaagctcacaaagggcttgtccccattgaagaaatccctattatccaagaaaagaaaggaagatgtccatccatctacacctgtaagaactaggtttgcgccttctccgactggttttttacatttggggtcacttagaacagctctttataattatttgctggcgagaaatactaatggacagtttctacttcgtttggaagatacagaccaaaaaagattagtacctggtgcggaagagaacatttacgaggttttgaaatggtgcaaaatagattgggatgaaactcctgtaaagcagagcgagagaaaattgatctatgataaatacgtgaaaatactattatcttctgggatggcatatagatgtttttgttcgaaagaacgactgaacgatttaaggcgctcagcaatgggattgaaaccaccttctatggcaagttatgaccggtgttgtgcacacttgacaaaagacgaaatagaatctaagctagtgcaagatacgcccttcactgtgaggttgaaatcgccagaacagtatccgacatttgctgacgttttacacggtgaaattaatcttcaaccccaagttaactataacgatagaagatacgacgacctcatccttgtcaagtctgataaattgccaacttatcatctcgcaaatgttgtagatgatcacttgatggggataacacacgtaataagaggtgaagaatggctcccttccaccccaaaacacatcgccttgtacaacgcatttggttgggattatccgaagttcatccatatccccctcttgacaactgttggtgacaagaaattgagtaaaagaaagggcgacatgtccatatcaagtctaaagaatgagggagtcttaccggaagctttaatcaatttttgtgcattatttggctggtctcctccaagaaatttagcctcgaagaagcacgagtgcttttcgatggattatttggaaaaactattcaatttgaacggtttgacaaaggggaacgccaaagttgatgacaaaaaactgtggttcttcaacaagcattttttgcaggaaagattcacagaccctgtgaagttgaaagaactcgtcgatgggatcatgccttcgttagagtccaaatataatgcatctacgttaaatcgcgagaaagtgtcaaaaattctactaaattgcggtagttgcttaactaggatcaacgacttttgtgacgagttttgttatttttttgagaagcctagatacaacgataatgacggtgttacaaaattcctcagcaagaatgaaactcaccatgttgttgaattattagagaagtttggacagtttaaagaaggtgccaatgcgcaagacgtggaatctatgatcgacacgatgtgccgtgaacacggcttctctaaaaacgtcatatatcaaacgatacgatttgctcttgcaggatgccattccggcgccaaattagcagtcatgattgatattctgagtgttaaagaaagtaaccaaagactagctgaaggtttggagttcttacaaagcaggaagcggtag

SEQ ID NO: 2335 - DNA, 735 bp, Saccharomyces pastorianus
atgtttgccgcaattgcttcaggaaatcctttgcaactttctgtagaagtccctaattcaagtggattacagcatacaattgtgctttctcgaaccaagcccaaactatattcacacatcacattatttatacttcctaatgtgacctttccacaggattttgtagccacggtttattttaaattgagccctcaagaagaattcaaattgtttggatatttgagcggagagaaacctagtgcaatattcaaagtgcaaataccgagctccaagagagaacctggagaagcaagtgatggattgggggagatagacatggatgtggacgatggttcgggagctaatgacatgtcagcagatggcaacggtagtaataatatatcagaattgattattggtatttccattgagcctcgagagcaagggatgatgaagctagaagagtggaaggctagtatgaatgcagaagcacaaaagaacaattcattggttctgtcgagacctaatttgggagtaattagaaatattaccacagcgggacaattagcacaggtgtacccctctttgacacaagaattggccgcgaagattgtacaacatgcatataactatctctcgggcttccttgatagtcagggcaatgtgcccattaaaagattcgatacgtggtgggacaaattcaagaacagacttgccaatgacgggacgtttttagatgaagtaaccaaaaattag

SEQ ID NO: 2336 - DNA, 1266 bp, Saccharomyces pastorianus
atggtccgagtccttcccgtcgttttaactgctttatctttggaattggtggcgagcacaatatctcaatctataatacagccggtgtaccctcgaagtgaaaccatgtctgtggacgatactggaaacctgaagatctcaggtaattcgatctgtggcaacggccgttgctatccgaagaccttcgaacctcgttacgattggcagcccatactaccgggccaagaactgcctggtggcttggatataagaatcaacatggaaactggctcgaaagaggcaaaattaaacgatgatgacagtgaaggtgaaaacagcacatatgacttagttgtttcatcggaaaacacggaaccatctaccgataactacgagttttccagcgattttcaagaaattagaagcatcctcgactcccattcgcccttatctccacacgatatcaccgtactggaagatacgttcgatagagtaatggagtttgctcatgattacaagcacggctataaaatcattgtccatgaatttccccttttagccaacgtcagtcttaacgaagaattacccctaacgttaagagagctaagcactagagtcattacaagttgcgtgagaaataacccacctgtggtggaatatatcagtgtgaatttttcgagtttaaaaagccaaataatggccactttgtcaaagttgaataattccaaccataaattctcaaatatcttgatcaagagatatttatccattttaaacgagctacccataacgtcccgggattttcccctatattctacaacagtcttacaaagtatttatgacgaaaacagtggggacaaacagttgcaaataaaagtcttggagctaattagcaagattttcaaaacagacgtgaaggaagacgaagtcacgaatctagcattgtataaaagggattcagaaaactggtcacaaaatttgcaagaatgggcaagtgcgtttcaagaaatggtccagaacaaggacatagacgagctgcacacgagaactttctttgagaccttgtacaatttgaaaaaggtattcaagaatgatatcaccattaacaaagatttcctgaattggttagcacaacaaagcgaacacagacaatccaatctggaaaatgggctacaagaaagagacgttgaacaagactcattcgataagaaactcatcgacagcaggcacttgctttttggaaatcctatggcccacagaatcaaaaatttcagagatgaattgtga

SEQ ID NO: 2337 - DNA, 1431 bp, Saccharomyces pastorianus
atgctactacgttctttaacaggtgctcttgccttgggtgccggtttggcccaggctgcaagcagcaacagctctactccctccatcacggttaagggcaacgccttctttaactccgagtcaggcgaaagattctatattcgtggtgttgactaccagcctggtggttcttctaacttgaccgatcccttggctgactccgctgtgtgtgacagagacgtccccgttttgaaagatttaggaatcaataccgtcagagtttatactgtagacaactcacaagaccattctcactgtatgaaactgctgcaggaaaacggcatctacttgatcctggacgtcaacactcccaccagtgccatctctcgtaacgatccctcttgctcctacaacgcagactacttacaaagcgtgtttgctacagtggacacctttgctgactacgataatgtgctagggttctttgctggtaacgaagtcatcaatagcgtcaacacaaccaatacagcaacctacgtcaaggccgtagtcagagacatcaagaaatacatcaaggctagaaaatacagacagattcctgttggttattcagctgctgatatcgtagctaacaggcaattgtctgctgagtatttcaactgtggcgatgatgcggatgccagaatagatatgtttggtgttaacgattattcttggtgtggtgaatcttcattcgttgtgtctggttatgccaccaagatgaaattataccaagattattcagttcctgtctttttgagtgaatttggctgtaatcaagtcaagacctcccgtcctttcacggaaatcgaagctatatattccactcaaatgtcttctgtgttctctggtgggttagtatacgaatattccaacgaaactaacaactatgggctggttcaaatcaatggtgacaaagtcactaaattaacagattttgaaaacttgaagaacgaatacagcaaagtctctgatccccaaggtgatggtggttacagtacttctaacaactactctggctgtcctgactacgaaaagggggtttgggaagctaacaataccttgcccgctatgccaagtgctgcttctgcctatttcaagtcaggagcaggttctccaatgggaactggaattgccacacaacaaagctgtgattctgacgatgatgaagacagtgacgatagctcctcttcctcttcttctgcctcatcttcaagctcttccgagtcatcgtcgtctacttcagaagcctcttcatctgcggcctccactagtgatgcaagcgtggtgaaatctgcttcatctgctacatcctctagccaatcttctacaaaatcaaaaggtgcagccgggataattgagattccattaattttccgtgctttagctgaaattcataacttgatcttataa

SEQ ID NO: 2338 - DNA, 1749 bp, Saccharomyces pastorianus
atgttgaactttgcatcgagaacgtcatgtgtcgcaagacgccaagcaagcttgcacctcatcaaatttcaaggccctaggctgatagcctccactgctcccatgtgccattggccctcgggggcgcaagaactacaaccttactgctactcgtcgttaaggttctactcttccgaaaagacaaagaccgccgtcaagcccgcagcttcgacgtccacggatgctcctgtaaagcccaaagaaacgcttatggtcaaggtgaagcatgcattgaagcattacgttaacggtacgaagcttttgggctacgaactgaaagtctccactaagctgctggtcaagtttgctcagggttacgaactatccagaagagaaaggaaccagctaaagaggacaatgggtgatgttttcagactggttcccttttcagcattccttatcattccattcgccgaactatttttgccctttgctttgaagcttttccccaacttactaccatccacttacgaatccggtaaggataagcaggctaagagaaataagctgatcgagatcagaaagaagacttctgagtttttacacgaaactttagaggaatctaacttgatcacttacaatactatcgaaaacgcagagaaaaagcagaaattcttgaatttcttccaaaagctttattctgcgaaggaaggtaaaatcatgtctttccaacacgacgaaatcagcgccattgcgcaaatgttcaaaaacgattccgtcttggacaatttgtcaagaccgcagctggcggcaatgtccaaattcatgtctttaagaccatttggtaacgataacatgcttcgttatcaaattcgttccaaactaaaagacataatgaacgacgacaaaatcatcgattacgagggcgttcaaagtctatcccaggaagagctataccaggcttgtgtatctcgtggtatgaaggcgtatggtgcgtccaaagaggatttaaccgataacctaaaagtctggttggaactgagattgagacaaaaaatcccatccgtcttgatggttttgagttctacattcacgtttggtgggcttccaaaggagaactactcaaaggccttctcgcccctggctgagaaaaaggagaccaagagcaagtatgatgacctgttagatttgtactacgacggtatcttgcaggtactaagctccatcccagatcccgtttataatgttgccaaactggacgtatctgaatccaagtcttcctccgctgaaactgaagctgaaactgaagctgaaaagcaggctgctgaaaagaaggccaaggaagaaggagaagaagaagcagttaaaccaaaagaaaccgccataccgaataaagatactacatctaaggacgctacattagtcaccaccagccccgcagtcgctcctaagctagtcaaaattaacgaaaaggaagaaacaactatgactgaggcccaagcagaagaaaagcaggaaaccgccgctgctgattccgctgaaaccgccgagacgagcgagaagaagacctctgacgacaatgaattcaaattaaacgtcttgaaggaacaagaagaactaatcaaaaaggaagaagaggaagccaagcaaagagcttcgagagaacacgtccctgatgatatcaatttagacgaggaggaagaagctaagtctgtgccccctatcccagccgatcaagctgcaaagacttctgttgtaaagaaagattaa

SEQ ID NO: 2339 - DNA, 342 bp, Saccharomyces pastorianus
atgacggaggttgtaagcttctgggaaagcagctcggatgacgagtcgcaagagaaacgcgacatggagatacagagaatgccggactccgacgagggccggctggtacaaagcctggtgtcttttatgggctcttgctctatcaacctgctcttaccgttcctcaacggcatgatgctcgggttcggcgaactgtttgcccatgagctgtgctggaggttcaactggttcaatcgcagaaacaaagggtacaaggtgtacccggaatcgcgcaaggtaactgcacttgacgagccttcaagtccagctgcccgcggcaggactgcgaccaagtttctctaa

SEQ ID NO: 2340 - DNA, 2040 bp, Saccharomyces pastorianus
atgcttaaaagacacggattattttggttaaagacatgtccccgtctaaatgttcttcaaaaatattcaatacttatacctcattcatttattattcgtaacgtttaccaacgaaggcagtacgcgaagggaagaagaaaccaggttgtaaagaaagagttaaagccacttaagttccccattccaaattatatctccgtaaataaattagccaatttgctaaactgtcgcgtggagaaactaatcaaagatttgacagcactgggctttgagaatattacaacaacttacatcctatcaaaagaatatgttgaactgattttacaagaatacaactttgcacttccgagtctctcaacatctactaatttggacaatgtttatgatgagctaaaatctcctgtcaatccaaagttattaacgaaaagacctcctgtggtgaccataatgggccatgttgatcatggtaagacaactatcatagattatctgaggaaatcctctgttgttgctcaagaacacggtgggatcacacaacacattggtgcctttcagataacaactccaaagtctggcaaaagaatcacatttctagatactcctggtcatgcagcctttttaaaaatgagagagagaggtgcaaatatcactgacatcattgttctcgtggtctctgttgaagattctgttatgccgcagacgttggaagccataaaacatgtcaaaaagtcaggcaatgaattgataattgcaataacgaaaatagacaggattcctcagccgaaagaacgtgaaaaaaaaattgagaaagtcatcaatgatttgattagtcaagatattgcagttgagaaaatcggtggagatgttcaggtgattcccataagtgccaaaaccggcgaaaatatggacctcttagaggaatcgattgtgttgttaagtgatgtgatggatattagagccgagaattcccctaaaactattgcagagggatggattatcgaaagtcaagtcaaaaagcaagttggaaatgtagctaccattctggttaaaaaaggcactctacgaaaaggcaaaattctgatttgtggtaacacattttgtaaaatcaaaaacttaatcgatgacaaaggtacacacattcctgaagcaacaccgtcctttgctactgaagtatttggatggaaagatgttccacatgttggagacgaaataattcaagtcaagagtgaagcgattgccaaaaagttcattagtaagaggcaagatcttgtcgaggttcagaaaaacagtagtaccgttgaaaggttaaacgaagagagagctttagccaaagagaatcaccacaacaaagataaagatgttgattcagaaagtcaagatgccacacaggacaataaactggacgccggacctaaaaatattaattttatcatcaagtgtgatgtctctgggtctgctgaggcagtctcagaaagtatttcttcgttggggaacaatgaagtgagatgtaacgtcatatcttcttctgtcggtatacctgctgaaagcgacttgaagatggcacaaataacggatagcacaatcctgtgcttcaatttgggtaatttacccagcgaggtaatcaacaatagggctggcatcaaaataaaacagtacaatgttatctataaattaatcgaggacgtaactgaaacgttgactgaaaatctcaaaccaatttttgaaaaaaaaataatctcaactgtagatattcgtgaaatttttgattttaaactgaaaaagaaaacaattaaaattgccggttgcaaagtaaataacggtatcatcaagaagaattcattgattcaagtagttaggggtcctaatgacgatgtcattttcgatggaacgctctcaactctaaaacataataaagatgatgtagcagaagtttcaaaaggacacgaatgtgggatcacatttgagaacgcttttgaaggtttcaaacccggtgataaaattctggcttatgaaaatgtgaaagttcctcgttatctgtaa

SEQ ID NO: 2341 - DNA, 1233 bp, Saccharomyces pastorianus
atgtctaaaattgaagagctgccgccatctgacattgaagatgaatcctattctagtaaacctggagacgtgtttttagcggttgtggatacacctgttaaagaaactgatgaaatattgattgaggacagttttattggcggtgagcccaaatggctgcatccagattcacaaccaccagttgaactattgaaatgtggtacttgtaaatcagccgataatatgaagttattgctacaagctttttcaccattagatgatgagcaaatgagtaccattcaacagcgagttggcgttaataatatgaattatgttaatccccaagatgatagagtgttatatgtcttcctttgtaccaaatgtcaaagaaagggcaattcagtgcgttgtataagaggtgtaaagaagaataaaaacgatgataagctttctgagaagatggcctcagcttcgttgggtaaaaatttcctaaataacccatttgacattacaaacaactctgactctacacctaatgcattttcaggtaacccattcgaaaatccttctacagctaccaacccatttggagttgatagcaccaaatcaggtatatcgcaaaaggaagggggaaataaagaagaagaatctgcaaaggcttctgcaaaggctgccagaaaactgcacgattcacaaaaggacaaagaatatgatcaaactagatgtttcaaaagttacctattatatgttgaggaagaaacgttcaagaataaaaagccagcacatttgcaactacctaagaacttaaagattgaccaggaagcattggatttaacaggtgatgaagatctcgaaaaagacccgatcaagttggacccaagaacggaaaagttatgcaagtttcttgacgatgacgtattccaaaagtttcaagaggtggtcggttacaacccattacaagtattgcgttatgacttaggtgggagaccattactatatgctgaaaccaaaattgatattttatcaacgctgccaagacctggttacaacccatcaagccaaagaatttttgaaatgcagctaatgccaaagatgatttttgatttggaggagacagtatctgttgaaaatggaatggaatggggcaccatccttgtttttaccgatgtcgaaaattacatacctaaatttgatgaacacggtgttggctatgtagaagaatgtgtcaaggtccaatgggaatcgagaacttaa

SEQ ID NO: 2342 - DNA, 1779 bp, Saccharomyces pastorianus
atggctggtgactttattccttccaccacgtatccgagtgaggagcttaaggaacggaaatccacatccgaattcgtaggctacaaatccaagcagttaacatcctcttcgtcgcacaattcggacacatctcatcacgatgacaactatcaatatagcaacaggaacatcttccagcggtgcgtcgactctttcaagccgcccctggacggttcgtttgacacaggtaacctgaaaaggacactgaagcccaggcatttgatcatgattgccatcgggggcagtatagggaccggtctgtttgtcggtagtggtaaagccatcgcggagggcggtcctctgggtgtcgtcctaggttggaccattgccggctcgcaaatcatcgggaccatccatgggttgggtgaaatcacagtacggttccccgttgtgggcgcgtttgccaattatggtacaaggtttttggaccccagtataagttttgttgtttctaccatatacgtgctacagtggttcttcgttttgcccttggaaatcattgctgcagccatgaccgtgcagtactggaactccgccatcgaccccgtagtttgggtggccatcttttacgtcatcattgtatccataaacctgtttggtgcaagaggtttcggcgaggctgaattcgcattttccaccatcaaggcaataacggtttgcgggttcatcatattatgcatcgtccttatttttggaggaggacccgaccatgaatacattggcgccaaatactggtacgatcctggttgcttggccaacgggtttcccggtgttttgtccgtgcttgttgttgcctcgtattccctgggtggtattgaaatgacatgtttggcatcgggtgaaacggatcctaagggtctaccaagcgctatcaagcaagtgttttggagaatcttgtttttctttttggtgtcgttgacgctggtcggattcctggtcccatatacaaaccaaaatctgctcggtggttcatccgtagacaactcgcccttcgtgatcgccatcaaactgcaccatatcaaagttttgccatccattgtcaacgtggtcattctaatcagtgttttgagtgtggggaactcctgcatcttcgcttcgagtagaacactgtgttccatggcccatcaaggccttattccgtggtggtttggttacatcgaccgtgccggcagaccgctagttggcattatggcaaactcgctgttcgggttactagcctttctggtcaaatcaggttccatggcagacatcttcaattggctcatggccattgctggtctagccacgtgtatagtctggttgagtatcaatttgtcgcatatcagatttagaatggcaatgaaggcccaggggaaaaaactggatgagctggagtttgtcagtgctgtcgggacatggggatctgcgtactccgcattaatcaactgcctgatcttgatagcccagttttactgttctttatggcccattggtggctggaaagatagcaaagatagagcaaagatattcttccaaaactacctctgcgctttaatcatgttattcatattcgtcacccacaagatttactataagtgccaaacaggccaatggtgggggattaaagctctaaaggacatcgatctagaaactgatcgcaaaaacatcgatatcgagattgtcaagcaggaaatcgccgaaaagaagatgttcttggattcatgtccgtggtatgtcagacacttccattactggtgctag

SEQ ID NO: 2343 - DNA, 1254 bp, Saccharomyces pastorianus
  modified_base (1047)..(1148): a, c, g, t, unknown, or other
atgttcagagatagaactaatttatttttatcgtaccgtaggactttcccacataatataaccatttcatctgggaaaggacccttaagcgatgatcgagatatcgaaatgggtacgtacccgatgactgatatgtcgcacgatatatccgccaggttaatggatgaacaggacggtaagcgtggaagtagtggtgatgctttaccacccatattcattgatatagcgcaggacgtcgacgattatcttcttgaagtgagacggttgagtgaacaacttgcgaaggtttacagaaagaactcgttaccagggtttgaagataaaagtcatgatgaggcgctgattgaggatctaagcttcaaggttattcagatgttacagaagtgctatggggttatgaagcggttgaagacaatcttcagctctcagtttgtagatgggaagcaattaagtcgagaagaactgatcatactagataatctacagaagacttatgcagagaagatacaaactgaaagtaacaagtttagagtattacagaacaattacttgaagtttttgaataaagatgatttgaaacccattcgtaacaataaactcaatacagaagacactctgttgttggacgacgaggaggaggcaacaagagaaaagcgggagggtcttgatattgaggattattcgaaaaggacgttacaaaggcaacagcaactgcatgacacttccgcagaggcgtatttgagagaacgtgacgaagagattactcaattggcaaggggtgtattggaagtaagcacgatttttagggaaatgcaagatttggttattgatcaaggaaccattgtagatagaattgattacaatctagagaacacagtcgtggaattaaaaagtgcggataaagaactgaataaagctacacattaccaaaaaagaacacaaaaatgtaaagttatcctactgttaacattatgcgtgattacattgtttttcttcgttatgttgaaaccacatagtagcggtggtggtggtagtggtagtcatggnnnnnnnnnnnnnnnnnnnnnnnnnnnnnnnnnnnnnnnnnnnnnnnnnnnnnnnnnnnnnnnnnnnnnnnnnnnnnnnnnnnnnnnnnnnnnnnnnnnnnncggagatagtggtagtaatagtaatagcagtgaggaaaacaaggaattgccaagcacaattgaggtgacagagccggataacagggctccaaatcatattctttga

SEQ ID NO: 2344 - DNA, 1758 bp, Saccharomyces pastorianus
atgtttatagaatattccaggttaccaggattcgaaagtatcaatgcgtcattttccagaggcatgctcagactggccaagtttaccaatttcgctactaatgaggagaaattggaatacctcaaacttttggcaggtcctaacaagcatgttcagagaatcagcgtcaaagatttcaaggaaaatccagatgagataaattatatcttcattatgctaatatctattttacaaatggaagaatgtttgaccgttcttgttcaatgtccgactgtttattggatacgattcggctggcctggaaaacaggccgtaagcactgtgaattctgcaaaccaaacactggcaagcgctttccatgctatttttactccctatttttcaataatgaagaaggttatggccaaaatcaaagacaacatgttgctttttgcccaaccttatgctaattcaaataatttgtttatcaagcatttccatgatctcattttcaagaactcaaaagaagaagctgcaagtgatacaatcctatatttaagaaacaacgtcaatattccaaatgttttttttagtaatagaaaagcagttttccatggtgatcgtgtgaaaattggaaaatttgatggccagtttttaagcttttcctttaaacgaaaagtgagttggtcgaagttggattcagtggattcatttgaaatcactgcagtgaactatagagtactcgttaactgggagaaaacgccaagaaagatttttcttcctttgaatagtgacacaagtaacctgcgctatatatcaaaaacaactttgaatggagaagaagggaaccttatcaaggcaaaaacaggaaaacctctccataaggatgaaaacgcttgcaccaacgaatcaccgtccatcgagtttccagttacgacatcagcaaaaacagaatatttgctaaaaagtgatttttccttacaaaggattaataagagcagagatcctacccttcaagagctcatgttgaataaggcgcatttgtcacgagaagacactttttacgccgaaaacatgtccaaaagaaagcattgctcttctgatgcagttgctcacgttaataagtgtgacagtgtgcctatgcttgtccagaaaaagcatactactgatctccctctttcagtaatcgaaccgctaaatccttctgcaactagtaatagggaagttgtcttaggggaaaccaaatatcaaccaagtgtcaaaactaaaaatgaagcctctggggctgaaaagattgtatcgagaagaagggcaaactggatcagctccaatccagctcctgacccctacagaaaagcttcaatgagcaaaagcattttttgccccagttttaaagacgtctcggaaatagcgccttccaaacgtattaaatcagcttctccaaattatacgcctgatttagagcaaagtccaagaagtctcattataaaaagcaagtctaaacctttccaaaagcataacatttccctgagtacttgtggacgctttcgaaacaaactgacgaaaggggcttttaaaatcaaatcttgctatcataacttggacgctgatgtacacaggaacaaaggaaataatttattacaaaaacgtctaattcttcaggataaaaccaggaaaaaattcgagcaattcaggaacgatttgcaaagagtttcacaagcgcttagagctgccagaaaaagctgggaagaacatggctcccacaatcccatctattga

SEQ ID NO: 2345 - DNA, 1644 bp, Saccharomyces pastorianus
atggtgcctgagaatagaaggaaacagctcgttgtattcatagccgtcacttatttgttgacattctattgtatatactctgctaccaagacaagtgtatcctttttgcaggtaacgttaaaactaaatgaaggttttaatctaatggttttatcaatattcatcctattgaactctactttgctatggcagctgttgacgaaattgctatttggagaattaaggctcattgagcacgagcatatatttgaaaggttaccgtttaccatcataaacactttgttcatgtcttcgatgttccacgaaagatactttttcacagtggcattcttcggattattattactatatttgaaagtgttccattggatcataaaggataggttggaagctttattacaatccattaacgattccaccacgatgaaaacccttatctttagtagattctcattcaacctcgtgctattggcgctcacagattaccagatcataacacgttgcatttcatccatatacacaaacaaaaatatcgatgtcgtctccacctccctctatctgatgcaagtgatggaatttaccatgctcttgattgacttgctcaatttattcctacaaacttctttgaacttctgggaattttatcgttcacaacagagccaatctactgaaaacaaccatgttgtccaggatgaactcgaagacgaagttgattctggagagccccatgcagtgctggataatgatgatgacgaagacgatgacgacgatagacaattcaccggtttggaaggtaaatttatgtatgaaaaggcaattgacgttttcacaagattcttgaaaacggcactgcatctatcaatgttaataccatttagaatgccaatgatgcttctgaaggatgtcgtatgggatgtcttggcattataccaaagtgctacgactctgtggaaaatatggagaaacaataaacaactggacgatactcttatcactgtcaccgtagaacaattgcaaaattccgcaaatgaagataacatttgtatcatttgtatggatgaactaattcattccccgaaccaacaaacgtggaaaaataaaaacaagaaaccaaaaaggttaccttgtggccatatactccacttgtcatgcttaaaaaactggatggaacgttctcaaacctgtcctatatgtagattgcctgtctttgatgaaaaaggtaacgtcgttcaaactacttttacgtccaactccaccacaaccgctaccactagcacaacaacgacagcaaggacgacagcaaatcaatatgtatctacaaatgagacagagttaattcctaccaggacaatttctcatgatgtgggaatagcgtctagtcagaacatgaatatgtcagcatcaatgccagcgtcatccaacacgtggtatacgttcccactgcaacaaaccgataatacttccggcgaatcaaaatgttccacctatgaatttttgatatccaattcaaatgaaaaggaaaatagtattccagtaaaactaacagtagaaagccacgaaccaaactctgagcaaggacgggaagaagaacaaggtgctcagaggagaattgtcataccagatcattttatccagcatatttag

SEQ ID NO: 2346 - DNA, 405 bp, Saccharomyces pastorianus
atgtccggaaaagctcatggaggtaaaggtaagtctggcgctaaagatggcggttcgttaagatcccaatcttcctcggccagagctggtttgcagttccccgttggtagaattaagcgttacctgaagagacacgccacgggcaaaacaagggtaggatctaaagctgccatttatctgactgctgtgttggaatatctaactgcggaagtgctggaactggctggtaatgctgccaaggatttgaaagtcaagagaattaccccaagacatctgcaattggccatcagaggtgacgacgaattagattctttgattagagccactatcgcttccggtggtgttttgcctcatataaataaagctttgttactgaaagtggaaaaaaagggcaataaaaaatga

SEQ ID NO: 2347 - DNA, 2049 bp, Saccharomyces pastorianus
atggtacgtctgttatgttcgagagttgttatcgcttgtatactcgtaatttctcggtttttagtagtgccgattaatgcatggtcgcccacagatagctatgtaccgggtacggtgtcgtgtcccgatgatataaatctggtaagagaggccacgtccatctctcagaatgaaaccgcatggctggaaaagagaaataaagtcactagtggcgctttgaaggattttctgacaagagccactgtaaatttttcagacagctctgaaattttatccaaattgtttgctaatgacaatagtgaaaacctccccaaggttgctgttgctgtttcaggcggcggctatcggtccatgttgacaggtgctggtattttagcagcgatggataacagaactgaaggcgcgaacgagcatgggctaggtggcctcttgcagagcacaacatatctatctggtgcctccggtggtaactggctggtcggtactttagccttgaacaattggacttctgttcaggacattctcaataacatgcataatgacgattctatttgggatttgtctgactctattgttactccaggcggtattaatatttttaagactgccaaaagatgggatcacatctccaatgctgttgaatcgaagcaaaaggcaggttacaatacttctttagctgatatttggggcaaagccctggcctataattttttcccctccctgaacagaggcggtataggcctgacctggtcttctttaagagatttcccggtttttcaaaacgctgaaatgcctttcccaatttctgttgcggacggaaggtatcctggtacaaaagttatcaacctaaacgcaacagttttcgaatttaacccctttgaaatgggatcttgggatccttctttgaattcattcaccaatatcaagtatttgggtaccaacgtttctaatggtatcccactggaaagaggaaagtgtactgctggtttcgataatgcaggtttcatcatgggtacttcctccaccctattcaatcagtttcttttgaggataaattccactcatctaccgggtttcatcacaagattagcaaggcatttcttaaaggatttatctcaagacttcaacgatattgctgtctatagtccaaatccattcaaggatacgaagtttttggacggtgactatactacaagtatcgtggattcagacagcttattcttagttgacggcggtgaagatgacgaaaacgtacctgttttaccacttattcaaaaggagcgtgatgtggatattatttttgctgttgataattcagctgatatgagaatggcttggcctgatggttcttctttagtccatacctacgaacgtcaattcgttaaacaaggccaaggtatgtcttttccatacgtcccagatacaaatacttttgttaatttgggtttgaacaagaaaccaaccttttttggctgcgacgctaataacttgactgatcttcaatacatcccacctttggtcgtctatctacctaatgcagaatactcttttgatagtaatcaaagcgctttcaagttatcttattccgaatctcaaagaagaagcatgattcaaaacgggtttgaaattgcgactagaaataactttaccgacgatcctgaattcatgggttgtgttggttgtgccatcatgagacgtaaacaacaagcgttaaatatcactctgcctccagaatgtgaaacctgcttctcgaactactgctggaatggtactctggacactaccccattaccagatatcgaaaaagatgttcatcactcctttatcaacgttggccattattctaatagcaccatggagcaacaagaagatcatctcattgggcctgaagcttctaaatcatcctcttcgtcttctccaatttcgtcagctacggcaacccttgagaaaaaggcaactgcaaattctggatcacattcatctggaataagtgcaaagttcgctgtcttaatgatacttgctgtgtccatctttactggaggggtatga

SEQ ID NO: 2348 - DNA, 1104 bp, Saccharomyces pastorianus
atgtcatcccctgcttccaggtatgtcactttccaagggtcgcaaaattttagattacggatcgtcttagcaacattatcaggaaaacaaataaaaattgaaaaaatccgttcaggtgacttgaatcctggtctgaaagattatgaagtctccttcctaaggctgattgaatcggttaccaacggtagtgtcattgaaatttcgtatactggtaccactgtaatctacaagcctggtattatagttggcggtgcatctacccatgtttgtcctagttccaaaccagtgggttatttcgtggaaccaatgttatatttagctccattttcaaagaaaaagttttcgattttatttaagggcataaccgcatctcataatgatgcaggtattgaagctatcaaatgggggctcatgcccatcatggagaaatttggtgtaagagaatgtgccctacatactttgaaaagaggctctccgccactaggtggtggtgaagtacatctggttgttgactctttgattgctcaaccaatcacgatgcatgaagtagatagacccataatttcttcaatcaccggagtagcgtactctacaagagtaagtccgtcactcgtaaatagaatgatcgacggtgccaaaaaagtattgaaggacctccaatgtgaggttaacataacagcagatgtttggagaggcgaaaattcaggtaagagtccaggctggggtataactttggtggctgaatccaagcagaaaagttggagctatttcgccgaagatattggtgatgcaggctctatacccgaagaacttggtgaaaaagttgcttaccgtttattagaagaaatatcgaaaagcgctgctgtcggtagaagtcaacttccactagcaatcgtatacatggtcatcggaaaagaagatatcggcagattaagaattaataaggaccagatagatgaaaggtttataaccctcttgagagatataaagaagatcttctgcacagaagtctttttgaaaccagttgacgaaatggacaatgacgacatgatagcaactatcaagggtgttggttttataaatacaagtaaaaagattgcatag

SEQ ID NO: 2349 - DNA, 1032 bp, Saccharomyces pastorianus
atgaaactgccaaaaatttccatttggaaagtgctgctactgctcaatttcttcgttctacaagactttcagtttgcctccgctgcgaacctgccttctttatcaactagtacaaaagcgaatgatagttctagtaagaccacttctacaacaaaggcaacgaaatcgtctagccgaaactcagtcaccagccaacatgttacctcaagtaacagtactacctctaaaaccaacatgcctaaaatcactacaagtgcaagttcgagtttatattcaaactctagcatagccagcaatcagagcggaatttcaatttcgtctatcacaccttctagtgtttatatcccaatcacagatggaaacggattcatctatcaggcgcgtcatcctgacggcactgtatttattgcatttgcaagctgtctaggtgctattctattgtcgctaacagctgtttggattgttctaactgtaaagtcatggcgaagtgctagaagggaaaacaagttgaggaatttggaaagccaataccaatacgaccccttctatttccaatcgaactctaatgatgacgacagcgaaacctcttctcattctggtgagagtgatatatcggaaaagattctaaaggacaagtcgtctcgtatgagtctatataccctaggatcctcatctgttctgaacctattgaacaatactacggacaccaatgaaaactttaggtcttctatgtttatctctccaactgagattctgcagcgcgatgccaataattctaacacatggtctcagcaaagcaatggtagtgagatgtttgagtccttatccagcactcctaaggaacgtactgctgcccagatagttggtaagttttcagataatactactaatccattcaactacacatcatataatttaggccctgattctggagacaactctacgccgaagtccaacgctagtcaaggaaaaaccaaaaaataccgtcctccgagtgttcatctggaccaattactggatggtaaggattag

SEQ ID NO: 2350 - DNA, 1137 bp, Saccharomyces pastorianus
atggctgtgaaattgaaatggccttggttagggatcgcaatcccgacgttcttaatatcgtttataggttatggggctcattacttcattttatcaaattttttatcaacattgaaacaaatagcattcgaatcatctttactgatgatatgggtatcctactatttggctatctacacgaatccaggaaggccttcgcctacttaccagccaagccctagtgtctggtcaaactactgtaagaagtgccaaaactataagccagaacgttctcaccattgtaaagcttgtaatcaatgcgttttaatgatggatcatcattgcccgtggacgatgaattgtgttggcttcaaaaattatccgcattttctaagattcgtattttgggtcattacaacaaccggtgttttgttttggatacaagttaaacgtgtatgttttatttggcagcaaagacacttgcctggatatttattcaaaaagtcagaactactatttttaaccatattaactcctatgaatttctttgttctttttacgataacaattcttttcctacgatgtgtattcaatcaaataataaatggaagatctcaaattgaatcctgggacatggataggctagaatcgctattcgactctcaaagattgattaagaaattgatcgaaaatacttggaagatccatcctgaggcgaaatcaccccaacttgaaagagatgctgaaaatttgctgacgcaacataggatccgttttgaggaagttgtaaacttcccttataatattgatttgttcaccaatgcaataatatatcttggtcccctccatctatggctatggccatttggtgctcctacaggagatggaaatagctttccaaagaatgatatttccaaatatgatgttaattcttcattagaagatattatgctctcgcttccctggccgccagatggcggtaaaattaaaactgtttctaatcatagcaatttagcaatagagacgttcaatgaaggtggcgagcaagtggtgagaagcagaattgcccaaagtggtagatctgctattcgtgaaaagtggtataacgattggggggaatctttagacgactttggagtcgacgttgatatggaatag

SEQ ID NO: 2351 - DNA, 876 bp, Saccharomyces pastorianus
atggaaagaccagtgagagaccaatccgaagatacacaagaggatcacagtattccaaaaataattctgccctccgagttcaaaaaatgttctagaacagatcttgtagtactcatatcacggatgctagtattactcatagcaattaacgaaaattcctcaaccaaaaaacctgatgaccaaataactttaacgagataccattccaagattccaccaaacatatcaatcttcaactacttcatacgactgactaaattctcttctctggaacattgcgttcttataacatcactttattatattgatttactacagaccgcgtatccagattttacactaaattctttgaccgcccataggtttttattgacagctactacggtagcagcaaaaggcttgtgcgattcattctctactaatgctcattatgcaaaagttggtggagtacgatgtcatgagttgaatatcctagaaaacgattttctaaagagagtaaactacagaataattcctagagatcataatattacgttatgtagcgtagaacaaaaacagaaaaaatttgttatagataaaaacgcattagggtctgttgatttgagttgttattcttatgctaatcgtttgaaaagcggttataatgttctagacaaatactatcaaagaatagttcagttggtaggttcttttaatgcttcaccagataaaagtaagagaattgactatgttctcccgtccaattttaatgaagataatgaaagtggtactcgacttcagcaacccaaagcatcacctgagtctcactattcacaaaaacgaatctctgaagcagaggacgcgagtaagtataataaacgctcaaagccagattaa

SEQ ID NO: 2352 - DNA, 1635 bp, Saccharomyces pastorianus
atggccattggtaaaaggttactggtgaacaagccagcagaggaatcattttatgcttccccgatgtatgattttctgtatccattcaggccagttggaaatcaatggctgccagagtacatcattttcgtatgcgccgttatagtaagatgcgcaattggacttggaccatattctggaaagtccactccgcccctgcacggtgattttgaagctcaaaggcactggatggaaatcacacagcacttaccactctccaaatggtactggtatgacttacaatactggggcttggactatccgccattaacagctttccactcttaccttttaggtcttattgggacctttttcaatccatcatggtttgctcttgacaagtctcgtgggtttgaatcccctgataatggcctaaaaacttacatgcgttctactgtcatcatcagtgacatattattctattttccagcagttatatatttcaccaaatggcttggtagataccgaaaccagtcaccaatagggcagtctattgcggcggcagcaatactgttccaaccttcgttaatgctcattgaccatgggcacttccaatataattcagttatgctcggtctcactgcatatgccataaataacctgctagacgaatattatgctatggctgcaatgtgctttgtcctgtccatctgtttcaaacaaatggcactgtactatgcaccaatttttttcgcctatctattaagtcgatcattattgttcccaaagttcaatatagcgcggttaacagttattgcgtttgcaacactcgcaacctttgctttaatgtttgcaccactttatttcctaggaggaggactaagaaatatttaccagtgcattcacaggatgtttccgttcgctagaggtattttcgaagacaaagttgcaaatttttggtgcgttaccaacatatttgtgaagtacaaggaaagatttagtattcagcaactccaactatattccctagttgccacagttctcggttttttaccggctatgatgatgacattattacacccaaagaagcatcttcttccatatgtactaatcgcatgttctatgtcgttctttctcttcagttttcaggttcacgagaaaactattttagttccacttttacctattacattactctattcttctactgattggaatgttttatctttagtaagttggataaacaatgttgctttgttcactttatggcctttattgaaaaaggacggtcttcatttacagtacgttgtgtcttttctactaaccaattggctgattggaaacttcagttttattacaccaagattcttgccaaaatccttaactcctggtccatccattagtagtatcaatagcgattacagaagaagaagtctgttgccctataatgtggtatggaaaagttttattataggaacgtatatcgccatgggcttatatcatttcttagatctatttgtagcgcctccaacgaaatatccggacttgtgggtgctgttaaattgtgctgtagggtttatctgtttcagcatattttgggtatggtcttactacaagatatttacatctggaaataaatcaatgaaggacttgtaa

SEQ ID NO: 2353 - DNA, 1437 bp, Saccharomyces pastorianus
atgaagctttcaaccgtcttacttgctctttgtgcaggttgtagtctatgtatgttcatccctggcttcgacgggatagttcattttactgaaagcaatggagatttccgcaatgcaaagggccagaaaggtttaggtcaacaggagactgggaactttcatttacaggaacaaaaggtcatccaaaaggcagagtcgcttccttatcgatatattatagccttccgtgaagatagttccttgcagtgcattgaatcgcacaaacgaatgatccaggagatgcagaaggagtctgtaagtaagcttgcaaaagacgatgcctttttagtgacaatttcaacttcagcaccctctcatttgcaatttggaggtattgatagcttttttgatataaacggtctatttcgaggttatactggctatttcaccgaagaagtcattaagagagctctccaagatccaattattaaatttatagaacaagaaagcacggtgaaagcttcaaattcatcatctcaagaggaagctccttggggattgcataggatttctcacagagaaaaagcaaaatacggtcaggatttggagtatttatatgaagatgctgcaggaagaggagtcaaatcttatgtcctcgatacagggattgacatcgaccacgaagatttcgaggggcgtgctgtatggggagccgttatacctgataacgatgaggcttctgatttgaacggccatgggacacattgtgctgggatcattggttccaggcattttggcgtgactaagaatacgaatcttgtagcagtaaaagttctccgttcgaatggagaagggacggtgtcagacgttatcaagggtatcgaatttgttgttcaggaccacatagattcatcaaagaaaggaggccccaagttcaaaggatctactgctaacctatccttgggaagtagtaaatcacctgcaatggaaatggctgtggacgcagccgtagaaagtggtgttcatttcgctatcgcagcggggaacgaagatgaagatgcctgtttgagctcaccagccggtgctgaaaaaagcattaccgttggagcttcaacattcagtgatgatagagcatttttttcggattggggtacgtgtgttgatgtgtttgctccgggtgtaaatattttatctacctatattggctcgagaaatgcaagtttgagtttatcaggcacctcaatggctgcacctcacgttgctggtattttgagttactttctttcattacaacctagctcagatagtgattttttcgatggcactgtttcacctcaacaattgaaggagaaaataataaattttagtacgcagggtgttttgggtgatgtcggtgaagagacgcctaatagattaatatacaatggagggggcaagaaattggataatttttggtag

SEQ ID NO: 2354 - DNA, 1041 bp, Saccharomyces pastorianus
atgtcagcctcaaaagaagaaattgcgtccctcattgtaaactactttacctccattgtggaaaagaaagaagtctcagaagacagtgctgattcattaaatgtcgctatggactgtatctctgaagcctttggcttcgagagagacgcggtatcaagcatcttaaacaagtccacattcaagggccagagtttaaacaacctactaagtttaggatcaaaatccccagaatcgggtaaaaaggatgatgctcaaaatgtcgaagttaacattccagaagaagatgccgaaaccaaggccaaagctgaagacttgaaaattcaaggtaacaaagccatggctaacaaagaatacgaacttgccatcagcaaatatactgaagccatcgacgttttaccaacaaatgctatctattacgccaacagagcagcagcccattcatctttgaaagaatacgatgaagcgatcaaagacgcagaatctgcaatttctgttgacccatcttacttcagaggttactctagattaggttttgccaagtatgcacaaggtaagcccgaagaagcccttgaagcatataagaaggttcttgacattgaaggcgataacgcaacagatgccatgaaaagggattatgaaagtgctaagaagagggtcgaacaatctttgaacttggagaaaaccacttcagaacaaccaagggatgctggcgccaatgctggccaaggtgctggtgcaggcggattaccagatctaggctctttactaggtggtggtcttggtggtttgatgaacaacccacaattaatgcaagctgcacaaaagatgatgagcaatcctggtgctatgcaaaatattcaaaacatgatgcaagatcctagtatcaggcaaatggctgaaggctttacttctggtggaggaactccaaatttgtctgacttgatgaagaaccctgcccttagaaacatggcgggcagtctatttggtggagcggatgccccatctaccgaagacactccagacagcgaaaacaaacaatag

SEQ ID NO: 2355 - DNA, 732 bp, Saccharomyces pastorianus
atggcttacattaaaatcgctttactagctgctgtcgctgcttttgcttctgcccaaactgaagaagaaattgacgaattgaacgttattttgaacgatgtcaaatccaatttggctcaatacatgagtttggctgaagattcatcttctggtttctctttgtccagtttgccatctggtgttttggacgttggtatggctctggcttctgctactgacgactcctacaccagtttatactctgaaattgacttcggtgccgtctcctctttgttgaccatgttgccatggtactcttccagattggaaccagctttggaatccttgttaggaacttctacctctgctgctgcctcctctactcaagctaagacctcttctgctgctgcctcttcatctgctgttgtcagctcctctgctgttgcttcttcgtctgctgctgcttcttcgtctgctgctgcttcatcatctgctgccgcctcttcatctgctgttgtctcttctgccgccagctcttctgccgctgcttcctcttccgccaaggcttcttccgccgctagttccgccaaggcgtctactactgcttccggttctgcttccgctatttcccaaatctctgacggtcaaatccaagctactaataccgtttctcaacaaaccgaaaatggtgctgctaaggctgtcattggtatgggtgccggtgtcatggctgctgccgctatgttattataa

SEQ ID NO: 2356 - DNA, 2274 bp, Saccharomyces pastorianus
atgatgcgtggttttaaacagagattgataaagaagaccactgggtcttcttcttcttcaaacagtaaaaagaaggacaaagagaaggaaaaagaaaaagcttcaaccgcaacgtcggcaactaaaaagccgacttcagctacctcttctacccacggtaccacaagcagcacgggatcaaagactacgactgacaagggcaaggtgtcaggtacggctcctgcgcagggaaagcatcaaggtagttctaccccaaaggcaaaaacaactgccactcctacttccagcagcagcagcagtaggagctcaagcgtcagtcgctccggttcaacttccacaaaaaaatcaagttcgagaaaagggcaagatcagaccaaacaaccacagcctcagaagcaagggccttcttcatcttctacatcatcttctaccactgtgataagtgctaccccggtacttactgtcacaaaggatgataaaagggtgtccggtgaaaaccatgcacaccccacattattaggtgcagcatcagctgttccatcttctccaattacaagtgctacaggaacagtggcttcctcacacgtggataacggtaatagcaacatcaacaacaacagtaatactagtagtagcaatactgcagatgcaaaccattcttcttctcaaagtattgacattcccagatcatcacactcgtttgagaggctaccaacgccaacaaaactaaatcccgatacggatttagaattgatcaagactcctcaacgtcactcttcatcaagattcgagccctctaggtacacaccgttgacgaaactgccaaatttcaatgaagtttcccccgaagaaagaattcccttgtttatcgctaaagttgatcaatgcaataccatgtttgattttaatgatcctagtttcgacattcaaggtaaagaaataaaaagaagtactttggatgaactaatagaatttcttgtgacaaacaggtttacctatacaagtgagatgtatgctcatgtagtaaacatgtttaaagtcaatctatttagacctattccaccgccagtaaatcctgttggtgatatttatgatccagatgaagatgagccggtcaatgaattggcttggcctcacatgcaggcagtttatgaattctttttaagatttgtggaaagtcctgactttaatcatcaaattgctaaacaatacatcgaccaagacttcattttaaagctcctagaactatttgatagcgaagacattagagaaagagattgcttgaaaacaacattgcacaggatatacgggaagttcttgtcactaagaagctttattcgtcgttcaatgaacaacatcttcttacaattcatttatgaaactgaaaaattcaatggtgtagcagagctgttagaaatattgggttcaatcattaatgggtttgctctaccgctaaaggaagagcacaaggttttcctggtgagaatattgattccattacacaaggtccgtagtttatcgttataccacccacaattggcttactgtatcgtacaattcctcgaaaaagatcctttattaactgaagaagtggttatgggcttattgcgttattggccaaaaatcaactctacaaaagaaattatgtttttgaatgaaattgaagatatatttgaagtaatcgaaccattggaatttataaaggttgaagtcccactgtttgttcaattggctaagtgtatttcatctccacatttccaagtggcagaaaaagttttaagttactggaataatgaatacttcttaaatttatgtattgaaaatgccgaagttattctgcccataatatttcctgcattatatgaactgacatctcagttagagttagatacagcaaacggtgaagatagcatttcagatccttatatgcttgttgaacaggctattaattcaggctcgtggaatagggcaattcatgcaatggcattcaaagctctaaagatttttttggaaacaaatccagtattatacgaaaactgtaatgcattgtacttatcaagtgcgaaagaaactcaacaacgtaaaatccaacgtgaagaaaactggaacaagcttgaagaatatgtaaggggcttaaaaattaacaatgaaaaggaccagtatgcagccaatgagagaatgaatccagaactaagaaatgactacaataaagacaaagaaaataacacattaaatgaagagaatgaaaacgaaagtgacagcgaaatacagtaa

SEQ ID NO: 2357 - DNA, 273 bp, Saccharomyces pastorianus
atgggtgccgcatataaaatatttggcagaactgttcaacctcatgtattggccatatctacattcgttgctacggctgctgtgacatcttactttacaatgaagccaaagagtaaagatgaaaccaaggaagtccctcacctgaaccaacagaatggtgagaaaccgtcaacagcgaatgctgatgggaaagatgatgatgttatgaaaagtattgaaggatttttgaatgacctggagaaggatacaaaacaggataaaaaagtcaactga

SEQ ID NO: 2358 - DNA, 642 bp, Saccharomyces pastorianus
atgaagtatattattgaacatatggaggaaggattcagtgaatgggtcattctagagtatagccaaattttaagagatgttggagctgaaaacttaattttatcgtcgttaccaaagaacaccactgaaaaggacatacctgaaaagctattatcgcttggtttgagatggacaacaagtgatctgaagaacattgatgaagatttcaaggatttggaacctttgaaagacggaagagtttgtttattggacccaagagctgcgattgatttacaacctgaagacgctgcagaattcgattatttcgtatttggtggtatattaggtgaccatcctccaagagatcgtactaaagaactaaagactacatatcctaatctgctggtgggtagaagacttggcgacaagcaaatgaccacagatactgcgataagaacaacccagttgattgtcaaaaacaaaaccaagtttgaagatatcaagttcattgattatcctgaatttaggttcaataaaaatgaagccacggagatgccgtttagatatgttcttgataaagaaggtagaccaatcctaccagagggtatgttagagttgatcaagaaggattctgctcaaagcttggatgatctgctaatgtaa

SEQ ID NO: 2359 - DNA, 1713 bp, Saccharomyces pastorianus
atgatgaatcccagccaagataaacagcaacagcagcaccaacagcactatcatcatcataatccgtcgtcgtcgtcgtccaggattaccagtgtgtaccaggtcacgacgcccaagtctccgcaggacctcgaaaacagcatggacgtgccctacaaaatggacgccgccaccggcgatgcggacagggacagcgaaaacacccagcggttgaagtacgagtgtgccaagcgggaaatcctgagcgctctgaacctgcacattatgcttaaccacaagcacgttagtcggctgcacaggaacgtccagaaggtcgacgccaagttggttcttctggaaacgctgcatgacgataccggtttgctgggcaaaatcgagcaaacgtaccagctgaagataaagcagcaccagcaacatatcggcttcaacaacaacaacaacaacaacaacaacaacagcatcagcatagaaaatataaacgcatccacggactttggcgcctcatatcccgtgctgtccgactacaacatcaactgccagcccctgtcttccagcagcaacgctacgctgtcggcaccacacatggccccccaccactaccagaccagaagcaagagcaacgggttcctgcttgagccctccgtcctgcgtccggcaaactcgaacataatagactacaggatcaccggctccaagtccatagcgcatgccacggccaagcctgccgacgtgtcctcgccccgctcctcctccatttcccccacggacgagcaacccgggttccagatactccccttcaagccaagccagatgcacctgaaccacaggcgcaactacagcagcacctgcttgaccagcaacagcggcgtcatcggtaaaacggaggacaacgagcccatcttcagaagatacgacgggatcctgataataataacgtgctccaagtgcgaccgctccggcttcacctccgcgcagggcattgtcaaccatacccgtctaaagcactccaaactgtactcaagccagcccctggcggtcctgaacaaccaaaaactgctgcccgacgacaagcaggacccgaaaatcctgtccagcttcaaggagttgggcttagacccaaacaaagactacctgccctctgagatcgccataccgaaaccgcaatcaccaatcagcacctcagacaaccatgcgcggacccacaagtctgtcaaggacatcccgcacctggaaaaactataccagaataaggacgatttcaaaaaattgatcgatatggtcaatgagacgccgaatgacttgaaagagttcttgaatcagcgcgaaatgcagctgaaagaacaggacgaggacgaggacgaggaagaacgagaggatgactcttctagaactgataacgaagcttcgtacgtgccatcgccatccctctcggcaacagcgaccacaacaacaacaacaacaacagacccgccctccccaccggtattgtcctcttcgttgcaaagaaaacttttgcgtaaaagaagactggacgtggatactgccactactactggagatttgcccttaagagaaaggctgagaccaagccccaccgataagaagccaagaaaggccactcttttgatgaacaaagatgctagcagtgcgggaaggccttcgtcctactacaacctcaggtcaaaatcaaggcttcgcgggtcccatacatag

SEQ ID NO: 2360 - DNA, 1029 bp, Saccharomyces pastorianus
atgcaagtagtagaaatcgagcaggccccgagagactatataagcgatatcaagctagtcccttccagatcgttgctcttaataacttcatgggatggttcgctctcaacctacaaagtagacaaacaggcgaagaaagtcgatctttcgcaaacgctacaatacaaacacccgttgctgtgttgcgacttcatcgataatccagacctacaaatatacgtgggggctgtacagggcgaaattctaagggtagatttgacagctacgccccacttccaagccctagcaaacaatgaggccaacctgggcatttgtcgaatgtgcaaatacggcgatgacaaacttctcgccgcctcatgggacggtctgatacaggtcgtcgaccctttccactacccccaggaagtcggccccaccacgaagaacctgaaccccatcggtgcggaggtaaagaacaagatcttcgccatggatgccaactcttcccgtttgatccttggtatgaacaacagtcaggtccgatggttttacctgccccttcgcgaagacgacgacggaacgctggcggagtctggactgaagtaccaaataagagatatcgctctcttacctcaagaccaagacggttatgcatgcagcagtatagacgggcgagttgctgtggaattcttcagcgacgggggcaacgaagatgacttaaccaagagattcgcatttagatgccaccgcctcaacttgaaggacacaaacctggcgtaccctgtaaattccatcgagttttcccctgtctccaggttcttatacacagctggctctgatggtattgtttcgtgctggaatctacaaactcgcaagaaagtaaaaaactttcccaaatttaacgagaacagcgtggtcaagatggcttgcggagataacatcctatgtctggccacctcagacgataccttcaagactaacgcagccattgatcatgccatcgaactggaagcaagctcagcatacataatattcgactatgagaactag

SEQ ID NO: 2361 - DNA, 1761 bp, Saccharomyces pastorianus
atgtcattaactgctgacgaatacaagcaacaaggtaacgccgcttttaccgctaaggattacggtaaggccatcgacctcttcaccaaagccatcgaagtctctgaagctccaaaccatgttttatattccaacaggtctgcctgctacacctctttgaagaaattcactgacgctttgaacgacgctaccgaatgtgtcaagatcaacccatcatggtccaagggttataatagattgggtgccgcccatttagggcttggcgatctagatgatgctgaaagcaactacaagaaagccctggaattagatggcactaacaaagcagctaaggacgggttggaccaggtccatcgtagtcaacaagcgagacaggctcaacctgatttagggttgacccagttatttgctgaccctaatctaattgaaaatttgaagaaaaacccaaaaactagtgaaatgatgaaggaccctcaattggtggccaagttgattggctacaagcaaaacccacaagccattggccaagatttattctccgatccaagattaatgaccattatggctacattgatgggtgtcgacttgaacatggatgacgtaaatcaatcaaactccatgccaaaggacccagccactgacgccaacgctgaacaaaagcaagacgctaaaccacagactacaaagagcgaaagttcttcaaaggctccacaacaagaggaaactaaggaagccgaaccaatggaagttgacgaagatgactctaaagtcgaagcagacaaagagaaagccgaaggtaacaagttttacaaagcccgtcaattcgaagaagccatcgaacactacaacaaagcttgggaactacacagggacatcacttacttgaacaaccgtgctgccgctgaatacgaaaagggtgattacgaaaccgctattgcaactctaactgatgctgtggagcagggtagagaaatgagagctgactacaaggttatttccaaatcatttgctcgtatcggtaatgcttaccacaaattaggtgacttgaaaaaaaccatagaaaattaccaaaaatcattaactgaacatcgtacagctgatatcttgaccaaattaagaaacgccgaaaaggaactgaaaaaagctgaagccgaagcatacattaatcctgaaaaagcagaagaagctcgtttagaaggtaaagaatatttcacaaagagtgactggcccaatgctgttaaggcttacacagaaatgatcaaaagatctcctgaagacgcaagaggctattctaatagagccgctgccttagctaagctaatgtcattccccgaggctattgctgactgtaataaagccatcgaaaaggacccaaatttcgtaagagcttacatcagaaaggctaccgcacagatcgctgttcaagaattcgctggcgccttggaaacgttagacgcagcaagaaccaaggatgctgaagtgaacaacggcgcaagtgccagggaaatcgaccaactatactacaaggcgagccaacaaagattccagtccaacaccggtaacgactccccagaggaaacctaccaaagggccatgaaagatcctgaagtagctgccatcatgcaagatcctgtcatgcaaagtattttgcaacaggctcaacaaaaccctgctgctttacaagaacatatgaagaacccagaagtatacaaaaagatccaaactttaattgcctctggtattatccgcactggccgctaa

SEQ ID NO: 2362 - DNA, 1863 bp, Saccharomyces pastorianus
atgaacataagtttgcttttctactacttcatcattttgatctacaatctaggactgacagatgcacggggaaaacaagcaagagaaagactcccacctttacagctaaacccagccccaccgagacatagagatgcagatagaagaccaccaccgtttgatcatgggccatactcttacggaaaactcattaaccattttccggcgtacaatcttactgatttgataaatgacagaatactgaataaatacggtaattcatgcagggcaaatgtcttgacaggtgggtttgtttcatcaggaaataattcgtcacattcgaaacttttcaaccacactttaaattatcctacttttttaatccgttgtgataatggcagtaacaattctaatttctcgcacatcctacaagacttcgtccacgatatcaaccacaatgtacgtatccaggatgatagtaccgaatatatcgggaaggatccatttcacttgggaatgatgatggttacttttgcttgtgggtgcatatgcgtcgcaacttggatgctttttttggttgtgttactactcccatctgataaccataatagaaggaaaaaacttgtgcatatttacgtgctcttttttgcggttgtaagaacggtattccttaataacactatatccgtaatctttaacaagcagtatcacgacgactatcaggattctagccagtttgagtcatctattttagaggctaatccctataaaatattcggattaatctgcaatattttgagtaatataaactggatttatattgttcattacttacagtgtacttatgggaagcccacttggaattgggtcccatttaaaatgaaaaggggaactcgggtcattatcattgtgggtaccctcctttcattcattgacaatcttttgttcgggttgcttctttggaataagaggcctgttgtcttgagggcttttttcaagggaatggaactcttgatgtacacaatttttatttcagttatctgttatttcacatggcacaattttgcttacgtacttttaccaaaaactgccgaaattagtggggatagcaaatacaaaacgaaacttcgaatactttgggagaactaccacgaaacgattccgttgctgacgtacaatatcctgatctttgtattattttatattaccactatttttttcgctgccttcacttttcaccttagaaaatggacttttagctttgttcaatttttgaaagttttgataacggtgaacgtttggggtttaattggggtgttggagaagagggagctgcatataagcaaaaaaactgtactcggacggaaaattaacaacaaagataagttttttgctaatccaacggtcaattattacgaggacgacttaggcaagcgcataagttccatgacattagaccgggacctaaacactacccaaagcaaagatacctcacacggttcatcgagcttagtggtttccccctcgcccacttggaaatcaccaatcgaaagaataaaggacagaagaaaaagacacaagataatgaaatccaaaaacaaattcgaacaaaagcacggtacaggaagtaaacccagtttcagtgctgccacaaaagcaacgctctctaaataccgaaagctgttaggaaagtctgagcgaaaaactgatttgtatgagcccaaacttgaggtcgggccaaaaaaggagcgcacgagagctaagacgagaagtgctgcccattctagaggttcaattcaccatgctacgtgccttagtgatgatgaaagtgtggagacagaacttcgaacgaaccacatttacaattacgaaagcagtgattaa
